United States Patent Application Publication US 2022/0290142 A1 - sequence listing, part 24

SEQ ID NO: 15793 - DNA, 71547 bp, Homo sapiens
gccaatcctatgagaactcagcatcccagctcatctgagcagatcctggaagtgatttctgcagctcaggattttttttttaagctacattgaaaatataggtttattttttgttcaggtttttcttttatattttttttctgcacaaaggaggaggatttttcacttactcatatcgaggccagatttttaaagccagctaaggcagcatcagctgtgcgggatttaaagcctatagctcagctgaaaaaaaaggtggggggcagggaagggaagataaaaggagaggaagctgggagaagacaagcatcatcttattttgctatgtggtaggaactgtctataagatagtgtagaattgtttatcttgagcagtttgttcttaacctataaggtatttttccttttttttttttttaaacctcccccacccttttcctgaaagctttgtttcagagctttgtattgggtttttttggtgaggaggttgtatttatttttttggtgtgtgtgtgtgagtgtgtgtgtgtctgtgtgtgtgttgtggtcccagctgagtcatcatgtctgctctgacgcctccgaccgatatgccaacccccaccactgacaagatcacacaggctgccatggagaccatctacctttgcaaattccgagtgtccatggatggagaatggctctgcctgcgagagctggatgacatctcacttacacctgacccagagcctacccatgaaggtatggtcagatcctgtccgctagtatttcaccagcatcctcattgttatgggggagggctgggaggatcagggagaggtagaaagaacctacactctcaactgttaacagtcctgaaaaccttgcatccttacttaccacccagctccccttctcttgctcatgggggaaagataattttttttcttgcccctttaggtatcctttcaaaagatgctggatactcgtttagagttctttgtctttaagcctctaaataaaacatttgaggtcacttatcacatctgattctattcaataatgagaaagctattaattttgttcatatatgaaaatgttatagaaattgtagtgatttataacactaagttaagacaacatgactataattataggattgtacatgatgaatacagtagaaacaccagggtatttggtaatggtatcctcaccattatatgaggatacaattttaagcaagttatgacatctaggaaatgtttgataaaacatttttttaacaatatggattattaggttagatgagaaaataacttttcagcatttatttattgaatatggactcctaagaaagcataatgcctggaaaggttaaatatgattaatatggcatccctatagattacaatagaatggtaatattggaatctattggccattgctttttataaattatttgtggtaactattatgatccatttgagatttccactgtcagtacctctgagatctttgtggtctcttgacttgcgacttttttccaggactcttgctaatttatgagaggttttctgcttctaccctttaattctcttaataccacagaaagagagctgatttgaatcatagctacaaatcgttttgtttttaatacagttgcttcttagctaaggtttattctctgtccttatactgatgaaaaaaaacaaaaaacgcttgcatatgaggagaaattctttataaacatctgcctgatagttaggcacatcgacaggacaaagaagaccataggtgaattgtacctagcagatggggttaggaaaggtgattctctgcctttgaccttgagttgaaatcttatcatgactcagaattttcccattgtgtttgataagcattttatcttcccagtcagccttagccttgagaaagttttagggatggttaataacacagaacacaaagcagtcattttgggtgtgtctttaagaacaatgtttaagtggtttttaagaccctttgcatcttttaacaattggtttgttaattagacagctttctttggctgtatgtttcgttatgtgcacaagttataagacatcagctgaaattccatgcaatgccagtactatttattttttattattattttattctatattttcatcaaaacatcgttacatccaacaattccagtactacttaaaacagcctccaaagctttaaaagtctttagggaagaaaaatacagttttagaaggctaccaagaagtcttctggcaactgcctcagtttacatattttgtttgaaaaaaatgtattcccgtccaatttgagagttatacaatatgaaatattccctttatcatgaaatctagtttaccagtgtctcaaaaataatttttaacaattttaacacctcaaatatatgtttttggagcaggattcctatggataagcaaaagtgagctgtttggttcatgtaagcgtttttagcagcgccatttgaattcttcatagagaaatctgtagcaacacatttctcagtatggaaaatgtgtgagagctataatctaagtaataaattgtatgtctgctgattaaagaaatcagataaatacagagtttccaagacctgtaatcaactatagaggatttggaagaaaatagagaaatgccgacagtgcattttagaattttgccttaaattgggcaagaaagctattattttaaattactagaaatgaaaataaagaaagcatagtcccatgaaagcctgtgagtattactgccttgctccattaccaaactctggatatttaaacagtcatttggtcccaagaaatacccacttttatgttaataccactgatagttattagatttaatttagctataagcatttaagtggtggtcaccaggcccatgattatgtgaatctcaccttgttcacaaaatggaactcctgatgtctggacgcgggagtattcagactgctttccgggctgattcacagagggaaaaacatctgaccacccaaatcctagagtgaagtctcctcactcccacaaaagaaaataggcaaacagcataatgttccctcttaaaatgatgtagactgactgtgtgtactcagcaatagaggctctgtggcttccatattttattttcttaaaaccagagttcctggcccttcactgagcagtccgcagtataggcctggacctagagtttctgcctactttaacccttaaataaatgaaaataaaagcattcacttcattatctcaatgcttattggtggtcaatgagggattatctctcttttgtcttatatactcttttttttttttttgagacagagttttgttcttattgcccaggctggagtgcaatggcgcaatcttggctcactgaaaactctgcctaccgggttcaagcgattctcctgcctcagcctcccaaatagctgggattacaggcatgcgccaccacacccagctaatttttgtatttttagtagagacggggtttttgcatgttgatcaggctggtctcgaactcccaacctcaggtgatacaccctccttgacctcccaaagtgctgggattacaggtgtgagccaccatgcccggcttatatactcttattttcaaaagccaacagcaaatctacaacaagtttaattgcaaatagatttcccctaaaggcaagagcctgtgattgactccacaggagaagggtcaggagaggcttcattaagtgagaccttaagagataaacaggtgatcaccagaccgacatagggagggcatttcaaacagtacacagtgagctggcccagccagggaatagcaacaggagcacagagggcttctgtttggcacaacagggagcaagactggaaagataagcaggggcttgactgtagaaatcttattcatactgaaaagcctgcacttgattctgtagtgaaaagctactggtgctttatgtctgggagtaacataaaataagatttgtgtttggaatgatcactctggcaacagtgtagtgaatggatcagaaggatataagctctcagggacccctaactataacttttaaaatggtctgggtaagagatgacaatctcacattaaggtagcaagagtgaacaccaaaggaacaatccctggaaaagcagaatgtacccgatgactgaggggctgggtggctggagaatgaacataaggcagtgcctgggatgactctccaacttctggctgcagaagctaggttccctttaccagtagggaatatagaaggaagagaacatttgagttgttgatgcttaatagattgtgactaacaaaagcactaccatcactcttttttttcttttttttgagacagtttcgctcttattgcccaggctggagtgcaatggcgctatctcagttcactgcaacctccacctcccaggttcaagcaattctccttaactcagactctccagactccccaagtagctgggattacaggcatgcgccaccacgcccagctaattttgtatttttagcagagacagggtttctccatgttggtcaggctggtctcgaactcccgacctcaggtgatcgcccgcctcagcttcccagagtgctgggattacaggcgtgagccaccgtgccccgcccattactctttcagttgagccttctacccgccccacagaagcattaatcagatttatacttttccagattacatatcctggcttaagtctgtaccctaatttacattaagagttggaatcctcacatggaaaggcgggggtgaagataaaaggagtgagacttaaatggacattcagagatgtgagaatgtggcttactttcttactttgcttgtgccatgtcagtgctagaggagcagccttgtttatagaaaattcattttgcattttcttaatttagggaaacatgtaccaccattgaaataacctctcagacttttgtttgtttgtttgttttactttgtgaaagcgtagtgggatttctttccttttttttttttttttttttaaccgaagcaatgttggaagtaagtggaatttcaaagtaaaggaacttttaaagcaccatgaaaattttagagaacatgtgttctctgtttttttcaagaatggaagcagaacgcttcagttagacctttaagcatcattatattaatttcagaaatggtgttattactgagatgaagtggtatattttatttttgcgattttttttaagtcacatgctcatatgtatctgaatttcttggagtaacattctcaaaacaagttacatataattctaggatcaggaaagtaataactttttttttttttttttttgagacagagtctcactctgttgcccaggctggagtgcagtggcgagttcccagctcgctgaaacctctgcctcccaggttcaagcgactctcctgcctcagcctccctagtaactgggattacaggcagacgccaccacgcctgggtaatttttgtatttttagtagagacggggtttcaccatgttggccaggctggtcttgaactcctgacctcaggcgatccacccaccttgccctcccaaagtgctgggattacaaaaaattagctgggcgtggtggcgggtgcctgtaatcccagctactcgggaggctgaggcaggagaatcgcttgaacccaggaggcaggggttgcggtgagccgagatcgtgccactgcactccagcctgggcaacaagagagaaactctgtctcaaaaaaaaaaaaaaagatttttttaaagaaattcaccaatacatgttatgtatacgcatgtccacatacgtgaagggcagggatagtattaccttcagtattattgagtgtttaacaacaaaaccaactatagctatgactcagtttataacacgtttacccttaataagtttacctaattagaaatgtatatgttaataaaaatttttacactttaaagaggatttttaaagaatgaaatcctgactcatttgttgtctcaagtgactacagataccccttgaattaagatggggttatgtcctgagaaactcatcctaagttgaaaataccataaaatgaaaattcacttaacacacctactctactgaacttaatagcttaagtagcttagcctctcttgccttaaacatgcttagaagacttaaattagccaacagttgcgcaaaatcatctggcagcacagtaccctgtagcgtattggttgtttaccctgatctgtggctgatcgtgtggctgactaggatggtgtggctgactgggagctgcggcttgctgccgctgcgcagcatcgtgagagaggatcacctggcgtattgctagctcgggaaaaaatcaaaattcaaaatttgaagtagggtttctactgaacacatatcactttctcatcgttgtaaagttgaaatatcggaagttgaaccctcataagccagggactgtctgtgaattgaaattagcctaaaagacagcagtagtatcatatttcaaaaaagaaaatgttattttgcatatactgcctttactctgtaaagtgtttcagacagatttttttaaaatataatttgtgatctaagtccaattccttgttcttaaactaaatgtccagcttttggtctattttcttttttcttccacattcctactctctgttatcatttttcggatatttatatggtttgagtggcaggcaagttaaaaatcgcaatttaaaataatttttgtgtgcttttcaaagtgaagctaagttggatttttttaaataagacttttttccgattacaaaaggaaatttgttgtggagatttggatatttctttttttttttttttaaatgaggccttgagatttggaaatttctaagtagaattttgacacagaattcaaaatgactgaagaaatctgctggatacctaatgagtctctttagagttgggtggataaattagtcaatggaaaactttattgctgtcaatatggggtatatttgagaacagtaaaggaattagtacaataatggggttgatttggcaattcgtgttttagctactgtgatggtcattaatttagagataatataggatagtggttaaaagtatggattttgtggcttggacctggacctggattcagttccttacccagtactcagtagtcatgtgacgttgcacaagtgatcacttcatgcttgagtttttttgtttttttttgagacagagtctcacagtgtcacctggactggagtgcaatggcacgatctcagctcactgcaacctccacctcctgagttcacacaattctcctgcctcagcctcctgagtagctgggattacaggcgcataccaccacacccagctaattttttgtatttttagtagagacgaggtttccccatgttggccaggctggtctcgaactcctgacctcaagtgatctgcccacctctgtctcccaaagtgctaggattatagatgtgagccatcatgcttgagtttttctctcctcttaactgggaatattaacggtaactacttcagaggttaggaggattaaatgagatacttaatgtaaagcaccctataaatggtagctatttatattagtagttattcatgaagcagtagctgaagccacagcagtttaagccggattcttcaatacattgccattttattttatatttctatttttatatctatctttatagagtagtctgaacaagttatttatcagactaaagatgaacattagtagtagcttaaactcaagttttagcattgtcctttcttggacctctataaataagaaaataattgattaaaaatccacaagttatcagttatccaggaatatgcatttttgtttctttcgttttttttttttttttgagatggagtctcgctcttgtcacccaggctggaacacagtggcgcaatcttggttcactacaacccctgcctccccagttcaagcgattctcctgcctcagcctcccaaatagctgggattacaggcacccaccaccatttctggctaatttctgtatttttagtagagacaggttttcaccatgttggccaggctagtcttgaactccttgaacctgcctcggcctcccaaagtgctgggattacaagcgtgagccactgcacccagccaaaatatgtgcttttctattaaccttcttttagggataaggagtctgacattgagaggtgatgcacagatgatcagttgaatgcaataaaatatacatctggcctgattagttactttccgctaggaattatttactccaagtgttaaaaatgtattctctcatttaatttttacaacaaccttttgagcctaggtacaactattacccccaatttacaaataaactgacatttggccaggcgcggtggctcacacttgtaatcccagcactttgggaggctgaggcgggtggatcacctgaggtcaggagttcaagactagcctggccaacatggtgtactaaaaatacaaaaaaaaaaaaaaagattagctgggcgtggtggcaggtgcctgtaatcccaactacttgggagactgaggcaggagaatcacttgaacctgggagacagaggttgcagtgagccgagattgcaccaccgcactcactccagcctgggcgacaagagtgaaactccatctcaaaaattaaaaaaagtaaaataagctgacattcaagggtgtaataaccggtagaggcaggattcaaactcagactaccaatggttcaacccatacacaacactcctgtcccagaattctagagtgtaagtccaacaataggcctgcgtgtaataagaggagtcttcttcccagtctctgatgacatatttgcagaagttttatacacaattgaacacagcattggcagcttaagtacagtcagcatgcagataaggccaaaagcatcccagctgggacatgcttggtgattgccatctttttttttttttttttgagacggagtctcgctcttgtccaggctggagtgcagctgcgcgatttcggctcactgcaacctccgcctcctgggttcaaacaattctcctgccttaggctcctgagtagctgggattacaggtgcccgccaccatgcccggctaatttttgtactttagtaaagaaggggtttcatcatgttggcctaggcttgtcttgaactcttgacctcaggtgatctgtccaccttggcctcccaaagtgctgggattacaggcgtgagccaccaagcctggccagtgattgccatcttttaaagtggagactgagttttttgtccacatgttttctttttcctcttttcactcacttttataaagtaaatgaaaatatttacataatcgtgcatatactaccaaacagcaaaaatagtacactgctgaaactgacctggctggcaagtgacacctctatatgctaaatttagctttctgaagcagatgtacaaaagcaataagaaaagcagttttgttttgtttttgttttgagacagagtttcgttctgttgcccagtctggagtgcagtggcgcagtctcggctcactgcaacctctgcctcccaggttcaagtgattctcctgcctcagcctcctgagtagctgggactataaatgtgcaccaccatgcccggctaatttttgtatttttagtgcagacagggttttgccatgttggccaggctggtcttgaactcttgggctcaagcgatcacccgcctcagcctctgaaagtactgggattacaggcatgagccaccgcacttagcctgaaaagcagtttgtgatagcagtaatgttcacgattatggattgtttgaaatagtagctacaggtaatcattattcttttagccaagcattctcatgcccttctttggatgattttttcaatgttttttcaaactccttttcaacatacttacctgttccagtcagactgtgcttcagtaaaatcctgattattctttttgttttactattctgacttgtgattcttcatgcccgtgttatatcaggaagggtaatggacccctgactcccttcatctacaagtccttctctaacagatctcacacctttcatgtcctgaatcactggttagcatctgggacatttgtttgaatatgctagaaatcattccccagttatttaattcatgggattccttatttctgaaattatatagaaagttcttcagggcaaaccttttctttggcgttcttcagaaggccccatggtactgtgtactatttatcgtagatatccaacaaacttctggtgaactcagtgattccctattactccataaaatcattttaaaagaaaggatttgcatgttactgtaaagacacatgcacacgtatgtttattgcggcactattcatagtagcaaagacttggaaccaacccagatatccatcaataatacactggataaagaaaatgtggcacatatacaccatggaatactatgcagccataaaacaggatgtgttcatgtcctttgcaaggacatggatgaagctggaaaccatcattctgagcaagctatcacaaggacaaaaaaccaaacaccgcatgttctcactcataagtgggagtcaaacaatgagaacacatggatacagggaagggaacatcacacactggggacctgtcggtgggtagggggctggggggagggatagcattaggagaaatacctaatataaatgacgagttgatgggtgcagcaaaccaacatggcacatgtatacctatgtaacaaacctgcacgttttgcacatgtactccggaacttaaagtattaaaaaaaataaaaagccaggtgcagtggcgggcgcctgtaatcccagctatgtgggaggccgaggcaggagaatcacttgaactcgggaggcggaggttgcagtgagccaagatcgcgccactgcactctaacctgggcaacagagtgagactccatttcaaaagaaagagagagagagagagagagaggagagagagagagagagagagagagggagggagggagggagggagagagagagagagagagagagagagagaaagaaagaaagaaaaatggattttgtcttcctccattacacacaatttaatttatggtttctaatgttttctttatttttaattgtttatctcatattctggaccgactgtatattatttggaaaatataagtttagaataatgtaataatttgttgtttaaatatatcttaataatacgtagtattgataaaaatatgggacgacttggggcctctgctagtgggaatgtgcattggtacatcctttatagaaatcattttatcattgtgaatcaaggaccttaaaaaattaattctcagtaattgtaccagacacctatcctaaggaaataataagagatacaaacaaaaagtttatgtatgtactgtatatttatcacggtattctgacttcctgtaacacactcttgagagcaacttaaatagcctaagaggaaaattattcaataagttgtagaacaccttacactaaaaattattgtggaacaatatttgatgtgtagggtaatgtttggatataactttaaaagctgtctcttaagctgcatatttactatagtcacaatttttttaagtataggtatacataaacacaagtaaaaggaaatgtatcaaaaatataaaaattgattatctctggatagtggaattatgggtgatttttataatattctttatatttctttatatctcccaaatattctacaagaggacatattactctaatatgaaaacaaatgttcctttttcaaaggaaaaatctttatgaaaattaacgggtgtgcaatcatccatccaacagatatttgtattatatatcagtaccttctatgacagtttcacacatctgtgagtgggaacatttgcctcacagcagagctactgctttagattcaatttccattataattttttaatatttctattaggcattttattttgggtttttttcaaacacagacctgtgtttatttactggcatgctctgttttcatagctgtttaaatgctgtttgcagtgtatggggtggcccacagtgtctagatttagaagcatttacagcatttgatttattcctttcctaagtgtttggaaaataaaacctgagtcattgggattctctttttcacagaattgtgttattgttctttgctttcactgtggcacacccccttttgtaattggcccttggtgagattacagaaacatttgttgccaccagtgcagtcagccttagatttacactgtcaggttctctgagctgtgattatgtgttcagaaggcagtctcagtgaacttctcaaagtgagaaggttgtagcttttaatacagtctcagaagcctatgggacaaagttttctggacacggttcatcccttcttgttgctctgccctgaaaataacctggctagtcaccctttcaaggtaagttttacccacttagcttccaggattttgtaaaattctaaatctgggtgagaaatatcagtagctctgtacttgtatgccagttcctatctaaaccacgaaagaggtgcatgctgcctctgatctgaccgtaacatactctgcataaaatcagcttttccttcctgtttcaggactactttcagtttcttcctgtctctttgatactcttgcactagcgttggcttcagtgcactgtcattaaccacagtgccttacagtattttcttctattggtgagccttttctggacctttcgtgaaacagagcttctacttgaatctttaatttgtgcccttcataacagaactcacattaactcttctttgggttatcagcttctgacacccaagagtcatttgtcctaaactaatcactgaaatatgaatcattttccaaaaagaaatgctgtgccagagaagataattgccactcagtgatagagctcagaacggaattcacgttgtcagattcccaagcctgagtaccaaccaagatctggttggaaagagcaagtgctgtcgtctgagaacatccaccatattctgtactcttcagtagctgttctgtgttttgcttttttgatggtgcccctcctgagggggaggtggagagtatataattgggcatgttttttcattgtggttcctctagtccccaccagtcaactgtgactactatgaagtgcttttgagtacagggctgtaaatactaaaatctgttcctttgcaatttttggtatttgagcttttccagagaacaaatagaaggatttgatgagcttagaaatacatgtgtagaggaacagtgaaaaagacttcttcccaaatggctgctaagtaattatatatttttcatcataattaaatattctcaaaattgtatgtcagtgtgttgaaaatagtgttttcaaagaaaatattggctgggcgtggtggctcacacctgtaatcccaacattttgggaggccaaggcaggcggattgcttgagctcaggagttcaaggccagcctgggcaacatggcaaaaccctatatctacaaaaaaaaataaaaattagctgggtgctgctgggcactgtggctcatgtctgtaatcccagcactttcagaggtcgaggcgggtggatcacctgaggtcaggagttcgagaccagcctggccaacctggtgaaaccctgtctctactaaaactacaaaatattagccgggcatggtggcggatacttgcaatctcagctactcaggaggctgaggcaggagaattgcttgaatccaggaggtggaggttgcagtgagatgagatcacatcactgcactccagcctgggcaacaagagcaaaacttcatctcaaaaaaaattagctgggtgtggtggtgcatgcctgtggtcccagctactcaggaggctgacgtgggaggatgggaagattacttgagctcagcaggtcaaggctgctgtgagctgtgattgcgccacagtgctccactgggtggcagagttcagaccctgtctcaaaaaaaaaaaaaaaaagaaaagaaaaggaaagaaagaaatgtctttagcattattatgtacagatatttttaatgaaaacaactttagttatagaggtgatatatttgcattgtaagtcacaagatacagaaaagtataaaaatgcaaaataatagaatgcacctacatttcaaatacctagggataaccactgttaagatttagtatcagattctctttttcaatgtatacactttttcaatgtatacactgaaggttcacttgcaaactcaaaattttatacatgtaagatcataccacacctgtgctgtgtgacctgccttttttcctctgcaatatttttccatatgggtaaattgaaatttttgtcattttgtttaatgtcttcagttattggatgtgctataatttcttttcttttcttttttttttctgagacggagttttgctcttattgtctgggctggagtgcaatggcatggtctcagctcactgcaacctctgcctcccgggttcaagtgattctcttgcctcagcctcccaagtagctgggattacaggcgctttcgaccatgtccggctaatttttgtattttcagtagagacagggtttcaccatgttggccaggctagtctcaaactcctgacctcaggtgatccacccaccctggcctcccaaagtgctggtattacaggcgtgagccactgcgcctggcctggatgtgccataatttctttgactatttctttattacaggcatttaggttgtttctaaatttttctacccaagacagttttagaaaaattgttatgtgtataacttgaatatttaaccaatttttagtttttaatttttatacacattgccaaactactttaaacaattaaaacaaattttgaatagcatggtatcataaactttcatattagctactcatcaaagcttggttttgtctttcctgcttgcagttggttgcgtttttctcatgctgtattaacatctgaagtttccaaaagatacagttgtggttttcaagacagttggttcagcagctgaaaacctcatgatattactttctctactttttttttttaagctaacagtagtgtcctaagcaaaagagagtttttactgttaattgtgcaatgagaaactgcatgtttttctaagattgctagaatttgctttttgggatgaaaaagctgcatgctgggatttcctttttctttcttatacagatataaaactaagagtgtatgtgagatgtactacattttgtctgagaatcccacagtgtccagtcctgtggacagcagcttcccagctaaagtatcttagagacattatctctgccagcatagccattccagcatgagagcaaagggtctactggtcagggctttctttcctcatccgctcaccccccatcaggctcagccctccttagcgttctagtgtcacctagctgctcacctaagaatctgttttatcttcacttatgtcactaatattaattcctcttttttttttttttttttgagatagggtcttgctctgtcaaccaggctggagtgcagtggtaccatctcagctcactgcaatctccacctggattcaagcaattctcctgcctcagcctcctgagtagctgggattgcaggcacacaccaccacgcctggctaatttttgtatttttagtagagacagggttacaccatgttgccaggctggtctcgaactcctgacttcaagtgatctgcctgcttaggcttcccaaagtgctgggattacagacaggagccaccatgcccagcctattaattccttttttttttttttttttgagatagggtttcactctatcacccaggctggagtgcaagtggtacaatctcagctcactccagcctccacctcccaggctcaagcaatcctcctaccttggcctcccaagtagctgggattagaggcatgctgcactaccacacctggctatttcttttgtatttttggcagagacagggtttcgccatgttgtctaggctggtcgccgcctcctggactcaagcgatctgcctgccttggcctcccaaagtgctgggattacaagcatgagctaccacgcccagccttaattccttgtaaagcttatgtcatacttatttagatctcaagggcattgtctatgggtgtttcatcttttttttttttttttttttttttgagacggagttttggtctgtcacccaggctggagtgcagtggcacgatcttggctcactgcagcccccgcctcccgggttgaagcaattatcctgcctcagcctctggagtagctgggactacaggcatgcgccaccacgcccggctaattttttgtatttttggtagagacagggtttcactgtgttggccaggatggtcttgatctcctgacctcatgatctgcccgcctcggcctcccaaagtgctgggattacaggcgtgagccaccgtgcccagccagatgtttcatctttttaacttccattgcattagtaaagtcttttgctcaccataaatgctcaataaattttattttattttatttttattatttatattatttgtttttattttatattactttatttatttttgggtctcactctgtcacccaggctggagtgccgtggcatgatcatagcttattgcagcctcaaactcctggcctcaagagatcctcctgtttcagtctgtcaagtagcctggtctccctatattgagtaggctgttcttgaactcatgggctaggcgatgcacccacctctgccttccaaagtgctgggattacaggcatgaaccaccacacccagcctcagtaaaattaaaatggctgaagtgttgatgacttaatgtgttaccttttctagggctatttgtctttttttttttttttgctgatatttttgtggagaaagtagaccttggcccaaattactggtttattagaacaaaacctcaaagcatttatgaaaattaatatatgacaattgctttgttaccaagctaataatactatggttagtttaatagcacctcagctgttaatttgtcatttggtttatttaggttgactaattttttttcctgtttttaatatttagcttagctggctttttaaaattccattcactctattgtctttgaataattacggcaaatatagagaaatccagttgtaagtgtaaagttgacattgagtacctatgctttgctaagtacttcaaatttattagcttttattttcacaatagcccttcaaggagttatatgtgatgtgtctgggtttggggcttcagaaaggtgttgccttaagaaaccataataaaattctaaaaattaacactaaatcaaagacacttggtctcaaggggacaaaataacccccaggccttgtaaaatctgtcacttggttgcctatagcaatactgctagagaaaggctacctcaagaagagatttcacaaccatggatacataaacaaaggcgaagcattttttagcccattcaagcacttccctgtagaaaaggagcttcattcagccagttgcctcatccagagaaaaaagaagtacaagaggggccaggctcaccttctaccagaccatgtactccagaacttaaagtataaaaaaaaaaaaaaaagccgggtgcagtgggggacgcctataatcccagctactctggaggctgaggcaggataattgcttcaacccaggaggcggaggctgcagtgagctgagatcgtgccactgcactccagcctgggtgacagagaaaaactccgtctcaaaaaaaaaaaaaaaaaaagatgaaacacccatagacctgtttcaggtctaagaatgaaaaaaaatcaatagactaattatgtagctctgaaaagatttaagctggtggcactgtaaacatctacccttaaggtacatagtgactcaaaggaccttgaggtataaaagaatggcatgttacctattgtagtaaagtcctgagcatgccaaggtaaagtggagaacagctttacatggaaaagacagaccttttagtttctgggggagaaaagttctcttaaattaattgcatcactctgatacttaaaactttaatctctgttttaagaagaaaacagaaaatatgtctgtttgtaacagaaaaatgttctagatgggatatgcccaaggaaaagtccgagatccctggtatccaccacgcattcctacctagaaattcactttccagagcctttttctatacaaatcttggaggctcttcatattttgctttactaaggtaggcttttatcttcataggtgacaaatagagtttctaattaaatacaatacaataaagaacaaaatgggaatattccctctattgacttttgcaaggtcacagcaagtctgtaaagtaataatgtggatggtaagagtccattctcatgaatctgtaatcctacataatatagatttgtggcacattatattgtcaaaggattgaacctgaaaatgacttctgcaaatatgtctatatataatgtatttcagcactaatttactataaaataatagtagccaactcacagtatttttttttctgtatgagacactttccatttgctttacatatatagacacataattccaaaattaaaaaaacctctggaaatgaaaagcatttttcacaaatttgcctgaacttatttggtgttacaacatgatgtgaatttacttgaggctatttatagtctttattctacttaatctgaatattcatttcctgcagaaatattaatgtgcttgattgtaggttactgcctcagatcctgctagttctgtatggtgaataaacatctggctttattgaattatatgtgatttattttgtgtatcttcaaagtagcctcctttatttttgttttggggaaggagaattgggggagggggagttggaaaaagtatttggattttttttttttttaagaaaagtcactagtttgcatcataatatttgtcctgaatctaaaagaaatatatcgcacatacttttcaattccctgaagtgatcaaaataatagttgagttagattaatgtcgcctacacttagaatacaaagagcctttgattttcaatagaaaaataaatctgtgttgctttttaataggatatgcatctttgtttccctttatttgaaactttgaaattgctaatcttagctttgaaacatatttaataaccgtagttgctatctctgcttatttggttgtactcccagcccttgtcactgttaatcgctgtgataagtagaaagaatcctaggaacctccctttcagttatccctttggaaatcttgtttttaatagcacttttctttctgggcttgcatgacattttatctttcttttcctttctttttgccgtttgcaaagactcttgggaggatttgacagatttggtggagcaaatgcgcgatgatacagaaggtgcgtgccacaccaacatctttcagctttttctccttgctttttaaaattttctaaccaccttttaattgttttccgtaagaggaaatgtcagctttaggttttatttcccatggcaataagtggaaatcttaatgttttggttccaagtaaaatagtgtcaatgtatgtttatgttgcttttgaaagatatttgctgaataacgtgtttaaaagggacattatttcaagattatatcaagtttttgccatggctgttttttcacttgtttgttgagaaagtgtaaattttattactcatgcaaatacatgtatatatatttctgtgaatttcacagcagccaaaagcaaacagatcccaggaatctagtggttggcctggaatgttgctctgatttgtagatttccataacattacacacttaagctttgtcatgtcatagcattcttttctggtgtaattattttttgttaattttttcttcttcatacaagagactgaaacatggaatggtgtgattatctttttaaagtagcacacatgttctaatgtggaaaggttccccaaaccaatcagtgtttcttctgtatcaaggcagctaactatagggagctcagagcgatttacacattttatactaaaaatagaaaaattgagatttgaatctactttatcattttacatgttcccgctttgctgtagcacacacccctgacacacacacatccaccactctgtccagactgacctttcctgcccacctcctcctctcctactttgttcctgtgacatctcatgtatttatacccttccccctccgcctgtgccacctgcgaacccttcagtccttatgggatttccacaatttactctttgacagctttggcccacattcttttctccattcacttgctgctgcagaacttggagcttaaggaaggctttttacttattctctaattcttgtgtgtttatcaacctagttaaagggtaaactccttgagaacagagattgtcttaaacttcttggtatccttaatcagacctgggacgagtactgccctcagtagatctggtcattaccaaacaaaatcaaggcagctttaccctctctgttgatgcccaagagtatcttctgtttcagcccttgcctttgaatgtgtgaattctgaaatcctgagtgtcatctcttttcctttggtcaaactatttttatgccatctttgattctgcttttaatataactgattacatatagttcagtgaaagaacaaatcagtattgtctagttgattgacagttcacagacaagaaaaaagagaaggatgttgattcatttagtgtgtaatgtttactattgtgttagctgctattattattattattatatttatttatttattttgaaatggaatctcactccatcgtccaggctgcggtgcagtggagcgatctcatctcactgcaacttctgcctcctggggttcaagcaattctcctgcctcagcttcctaagtagctgggattataggtgcataccaccatccctggctaatttttttgtgtttttagtagagacggggtttcaacatgttggccaggctggtctcgaactcctgacctcaagtgatccacctgcctcagcctctcaaagtgctgggattacaagtgtgaaccactgtgcctggcctattatcattattattaattattggctaggcaccaccaggtttaaggctttaattcctttgatagactagatattaaaggaaaatgctacataaagtttatccccttcttgagaactttaccatgactcatcacaggcaagattctatttctttaatacaaagtattaataatgcaagagtcaagcttactgtgagagtcagactccttttttttaattttgtttttgctgggatttttgtcgatggttattataggtgaactccaaaagggagagaagatgaactttaacagtatagtacataaaatatccagaaaatgttgattatgtcagtaccttcatgatcttaatagatttccagtcaagtgatatatggtaatgttgatcaagatcctctttacagaaaagtctttctgaaaagtagttaaaaaaaaaaatgagaatggggagagggagatggcttcactttaactcttttgataatttcattcttcttgatatccttctctgcttttcttgcctcatggtctcaatcacagttatgtaaaattccagcatttcacacaactgtattacgtaacttggagatgttataaataagtgctagtactaagaagaaataagttatggagtattacctgcacataacacacaatagcaattcagggtctgggaagaatcctcatttcagactcagaaaaagctgatgatatatgcaggctcagatcttttctggagaccttcaactgctaagctgttttcaatgctgtttctcatctgttattgcagatgggccataacagttggcttttttaaaattttattttattttattttatttttttgagacgaggtatcactctgttgcccaggctggagtgcagtggcatgatcatagcttcctgcagcctcgaactcccaggctccttcctcagcctcctgagtagctgggactacaggcatgtgccatcacacctggctaatttttatgtatgtatgtatgtatgtatgtagagacagggtctcactttgttgcccaggctggtctcaaactcctaggctcaaacgatcctcccacttcagcctcccaacgcactaggattgcaggcttgagccaccgaacccggctatagtttgctttttaatagatagagtgttaacactggcttctggcctcctaaaaatttttaaaataacagactctagtgggttgcagatttgaactggtcgttgtttttgttttttgtttcagttctgtcacaattgaagcttcttattttgaatttttttttttttttttgagatggagtttcgctcttgttgcccaggctggagtgcaatgctatgatatcagctcactgcaacctccacctcccagattgaagcaattctcctgcctcagcctcctgagtagctgggactacaggcacatgccaccacatctggctaatttttgcatttttagtagagacagggtctcaccatgttggctaggctggtctcgaactcctggcctcaggtgatgcgcccgcctcaggctcccaaagtgctgggattacagacatgagccactgtgcccagcccttttgaatttttttagaagatgggagtcttgctgtgttgcccaggctggagtgctgtggtgcaatctcggctcactgcagcctctgctagtgattcttcttgcctcagcctcctgagtagctgggactacaggtgcacaccaccatgcctagctaatttttgcattttttagtagagatggagtttcaccatgtttgccaggatggtctcaatctcctgacctcgtggtccacccgccttggcctcccaaagtgctgggattacaagtgtgagccaccgcgcccggcctgaactattttttacagtgatgattagtttcatattctatgtgtttgtaacttatatctactagaatatgaagtgtcttcttagggtacaattgtatgatgtacaacacctattatattgcatctcctttccttatatgctagtaatttgtgtctaaaatgttttgaaactcactagggaaattatgaacattaaattaaataatgaaaggcacatagcttattacctttagtttttcaataaatatcggatttctgtctgtactcattacaagccttttgaacagattttgtaaatttgcagtggcccagattactgcccgtctctctgaggattaaaatagtcaggacagtacttgaatttaggcaataatatacctgtgtaaaatattacctaccaaaattgcatactggttccttggcatttgggggcagagggtgttaagacttgatgcatgttgaaaaacagaagaaacatatcttaagagattttattagcttctagcactgtgccacatcgtcattcaataagcttattaagttaaacaaaattgttataatggcttagagtggtggttcacttctataatcccagtactttgcggggccgaggcaggcagattacttgacgtcaggagttcaagaccagcctggccaacatgacaaaacccgtctctactaaaaatacaaaaaattgctgaggcgaggaattgcttgaaactgggaggcagaggttgcggtgagctgagatcacgccactgcactccagcctgggcaatagagtgagtctccctctcaaaacacaacaacaaaaaaattggcggggcgtggtggctcacgcctgtaatcctagcactttgggatgccaaggtgggcggatcacttgatgccaggagttcaaggccagcctgggcaacatggtgaaaccctgtctctactaaaaatacaaaaagttagccaggtatggtggcaggcgcctgtaatcccagttcctgggagtctgaggcacgagaatcgcttgagcccgggaggcggaggttgcagtgagtcaagatcatgccactgcactcaagcctggttgacagagcaagactccttaaaaaaaaaaaaaaaaattagccaggcatggtggcgggtgcctgtagtcccagctactcagaaggctgaggcaagaaaatcacttgaagctgtgagttggaggttgcagtgagccgagattgcaccattgcattccagcctgggtgactgagcaagactgtctcaaaaaaaaaaaaaaaaaaaagttatgtacatggaagaccataataattgcagtagctaacaacttttttccttagtatattccaagcacttctaaatggttacgtataagaacttgtttactcttcagaaccctgtcaccattttatagataaggaaagtgacacatacagaggttaagaaagtttcccagcaaaatactactcagttgtaaaaaggaagagaccactgatacatgcaacaacctgaatgattcttcggagaattatgctgaataacaaaaagtcaattttaatggttgcatactatatgattctatttacataacagtcttgaagtgatgaaagtatagaaatgaagaacagattagtggttggcatgggttgaggatggagtaggggcaaggagagatgtgggcatggctataaaacatcaatatgggggatccttgtcgtgatggaaatgttcagtgtcttgactgtaattcaacatcagtatactggttgtgataatgtactacagttttgcaagatacccttgggagaactaggttaaaagtacatggtatctctcgatattatttcttacaatttcatgtgattcctcaattatctcaaaacagaaaatgcaacaagagaaaaaacttttcccaaggtcacacagctagggaagagtttgaatagagttcaaactcccacagaccagctttagagcttgtgctgttaaccactacaccaaaattgtttaaacttatttgacacaagaacaactgtaaaaatacatcttcatcagaactcagtacacacatcatttatttgtatgtatcttaaaacaaaagtttcatgaaacaatacatagccttactatataggacattaaattgattttgtgacccactaaagggttgtgacctttgtttgaaagacactccagtatcctgtgctgcctctctggtatatacatccatttgtacggtagccactgtctaggtgtgtgcaaaaaaaaaaaaacaaattcctgaaaggactgttttggctctgtttccagcctgtaatcgtgggcatactttaaaggctgggctagtaaccttgcatccttctatttctctttaaaacatctccttgtgaaagcatcttttctcataactgctattattgtcctatgctgatgactctctaagtccaaacttccatttgcatttacaactaggtgatcaaaaatatcttgaaagctgggcatggtggttgcattcctggagacccatctattcaggaggctgaggtgggaggattgcttgagcccatgagtccaagtccagcctgggcaacatagtgagaccttgtctttaaaaataatatgttgagaatccttccacataaatatcctttatgatatccaaaaccaagtttattttgccctttatctccataacagttactcaactttttcatttccctttatagcacactcttccagtctctcagggcaaaaatgttggtgttattcttgaccccttcatttcctttatcttttctatgactatctgaacttgaatcactacagttcttcgtggcagaccattttgattctcttccctcaaattcattttgcgtaatcttctcagattagtcatctccaaacaaaattttaggcacgctgattctctgctcaaaactacagtggttcccattgcttcctccattaatatccaagtctagtttcagagacctctttatctgactctaccctacctgtgttttccagttctccccagtaagaactccctcttccactcttattttctccacctgacttcacacacccattccaaccacttggaataccgtccttcatgtgttctgtgataccacgacatttaggatctacctcaagtactgcagtatattgagatttatcacacttttattcatattacttttggtgttatctcatttgaagtacaaatgtacaatattccagggagttaaactaaggacagtggttattcctggtttttgtcaggtctgaggtttacctgctttaacaaattaataaagcctcttgctgtttcttggatgctggcaaaagacacaagactcctaggtcagagataaaggactttattactcatgacagtgcaagcagcctgagcatctgcatatctgtgccagttcttcttggaccagagtcccatggggtgacactggatggctcagtgacatgcttcacacgtggtaggtttgtgttgcagatgaagaaggccaagttgggagaacccattgtttttataggaagcagtaggaaagcttcgtctctcattatcaggttcataaatggcccaggaaagagtggtcagggccgtatagtcttgacataacccagtaaagaaatgtaggtgcccaagaggtccaaggaggattgtcttccccaacattttacagatgaaacagaagaatgaggatttcccccaacatcactcagggaatatgagagagacagatctaacccttctagatcatagatctaactgcgattgccctctcacatccatttacattgtttttcttttcttttcttttcttttttttatacctaggtaaagcccaaaacatttaaattatttctatgcaataaattgagcaaaccaaggaattcttgggttgtatttaccacctaaatttcttatgttgtatcaaaacaacgaaggtttgtcctaacttctaaatgtttccagaaatcttctaggtattcttctgcagcatggaattctcaggtaaaggtaactgaagaagtctgggaaactttccaaaactaaaattgattatattatgatatgggagcccaatgaagaagaaatcagtgtgtttcctagggaactcttgtgcaagctaatatatttttttttaatctattaaagattagagaaatgtatacctaaccaagaatgagtaagagtatatgaaaataatggttttggttaagtaagctgactcatttcaatgctaaagcccatcaaaagggtttttttttttttttggttatatacggaggtagaagaaactacactagtttcttcttaccttcttacaggaggccagcagctaaaccttgacctggagtaagagaaagcagaattacttttttcttgtcttgtcttttttttttttttttgagacaggatctcactctgttgcccaggctagaaggtggtggcacagctcactgtagcttacactttccaggctcaagccatcctcccacctcagcttcccaaggagctgggactacaggtttgcaccaccacacccagctaattttttgtgtgttttttatggagagggggtctcaccttgttgcctagcctggtcttgactcctgaggtcaagctatccatctgccagcctcagcctcccaaagtgctgggattacaggtgtgagccactgtgcccagccagaattttacttttactttaaattttttacttttaattatgaaacttttttttttttttaaagagacagggtctcaaccctgttgcccaggccagagtacagtagcatgatcatagctctcgtagctctctgtaactttgaactcttggttcaagtgaccttcctgccttacctcagccccgagtagctagggctatgggtgcgtaccaccaagtccagcttaattacacaactttttatagtacgtaaaaagaatagcttaatgaacttaaatatctccatcaccagcttcagtaattattgccaatcttatttaatctaatacctccatttttgtttctggagcattttaaagcaaactccaaacattacatctcagcacctgtaaatccttcagtgtcagagctaacaaaattaacaacaaagtcttatagtgtctcagcccattttcaaagtctgttgattgtctcaaatatgtctttttatagttggtttatttgaatcaagaaacatacaagttatatattattattatgtctaaaaactttagtggtttttttctaataatagccttattgaggtacaattcacataccataaaggtcaccactttaaagtgtacaattcagtggtggttagtatagtcacaaagctgtgcatccatcaccactctctaatcgaagaatattttcatcaccttttctaaaaagaaactctgtacccattaataaccactctctattcttcctcctcccagccgctggcaaccactagtctattttctgtctctgcagtttttttttgaggggcttcttcaagtatttacatatgtctctctccatagatttgcctattctgggcattttatataaacaaaaataaaatatgtggtcttttgtgtcaggcttctttcacttagtatatgttttcaagggttatccatgttgtagcatgtatcgtaacttcatttctttttatggattaataatattgtatgggcatatcatattttgtctattggttggtggacatttggcttgtttcactttggggcaaattatgaataatactgtgaacattaatgcatacattttgtgtggatatattttttaaataatttcagctcttgttttagattcaggggctacatgcgcaggtttgttacatgggtatactgtgtgatgctgagatttggggtatgatggatcctgtcacccaggtagtgagcatagtacccaacagttagtttttctgcttccctcccaccaccctctagtagtcttcagtgtctattgttggcatttttatgatgtgtggacatgttttcatattgaaaatgttgaattgctgggtcaaataactcatatgtttaattttttggagaattgccagactgccaaagcagctggaccattttacactcctacaagcaaggcacaaaagtttccagttttccacattcttgctaataccatttgcttcaatgaataattattattgttatcctagtgagtgtgaaaaggtatctcatcttgatttgtatttctctaattagcatcttttcatatgctttctggccatttgtctatcttctctgcagaaatgtatatttcaagcctttgcccattcttttttactaggattatttctcttctgttgttaaatcataataattatttatacattctggatattggatctgatttgcaaatattttctgccattctgtgggttgtcttttcactttcttgatgatgtcgtttgaaacacaaatgtttttatttttgatgaagtccaccttacctattttttcttttgttgctaaaccattgcctagcctatggttataaaatatttagacctgtgtttccttctaagagttttatagttttagctcttacactttggtctcagatctattttgagctttttaaaaaattattttgcatttggatatccaattatcctaccaccatttgttgcaaataataatttttgtaattttagtagagatggggtttcaccatgttggccaggctggtcttgaactcctgacctcaagtgatccacccacttaggtctcccaaagtgctgggattacagacgtgagataccgcgcccagcctgatcttttaaaatttcttgcagcaaagttttatagttttccatgtacaagtcttgtacttcttttgttaagtttattggtaaatatttttctggtgctattgtaaatggaattgtttttaaatttctttttcgaattgtttgttgctaatgtatacaaatataattaatttttgtgtattgatcttgtaccttacaaccttgccaaactcattttatgtacatactttgtgtgtgtgtgtgtggattccttaggattttttatatacaagatcatgtcatctgcaaatatagttttacttcttccttttcaaactggatgcctttcatttccttttcttgcctacttgccctggcaagactcgcctatacaatttggttagaagtagcaaaagtgggcatccttgtcttgttcctgatctttgagaaagccttcagtcttttgccatcaagtttgttagctgtgagttttttgtagatgccctttgtcaagctaaggaagttctttctcttcctagtttgttgaatgtttttatcattaatggatattggaacttgtcaagtactttgtctgcttctaatgaaatgaccatgtgatgtctttctttactctgttaatttggtgtattacactgattgagttttgtgtgttggaccgaccttgcattctgtgattaatcccacttggtccagttatataatccttcttatatgtttctggatttggtttaccagtattttgttaaggatttttgtgtctgtattcataaggagtattgatctatagttttcttatgatatctttatctgatttggtctcaaggtaatattagtgtcatagaatgagttcggaagttctctcttctaatttttggaatagtctgtcaaggattggtgtcaattccttaaatgactggtagattttaacaacgagactatctggtcctggcctcctctgtatgctatttttttattattattactaattcaggatctttacttgtaggtctgttcagatttcctatttcttcttatgtcagttttggtagtttgtgtctaagaaattgtccattttgtctagattatctaatatgttgacatacagttgtccgtagtattcccttataatccttgtttctgtaatgtcaatactactgtcccctctttcattcccgattttagtaatttgaatcttctcccttttctactgatcagtctagctaaatgtcagtattgttaatcttgtcaaagagccaactttggattttattgatttttctcagtagttgtttttgctttttaatttatttctgatctaatctttattatttccttcctcctagggctttctacttatatacatgtatgttggttgcccttgatgaagccaactgtgaaatcatggaattataatatgctagctaggagagtgatctaggccagtgcttctcaaactttaatgcacatacagattgcttggggatctagttaaagtgcaaaacctgattcagtggtagtgttgaagtctacagcttcccttgtctaaaagctttcctggttatgccagtgttgatgttctgagaccagagagtagaaaggatctagttcatttggtatcaatcatttgtgggattttccaaacagaacatgtcatttctctggttccaggtatattaatatgtctctccctttgagaatcagtgctgctatatgtcattatgactattatgaatgtgcatggtttccaagggaaaaaactgaacaagcccaaccctctcattttactgatgaggaaattgaagcttcaaaggggtgagatttcttgcctgaagtcatataataggttaattggctccatggatgagtatattaatcctttctgatgacaagtcctaactcagtgaagttcatcattgattatactgttaccaagaaaaggtagcaatgaggacaagtaaatttatggttaatttttttttttttttcgagatggagttttgctgttgtcgcccaggctggatggagtgcaatggcacaatcttggctcactgcagtttctgcctgccgggttcaagtgattctcctgcctcagcctcctgagtagctgggattacaggtgcctggcaccacacccagctaacttttgtacttttagtagagatggggcttccccatgttggccaggctggtctcgaactcctgacctcaggtaatccacctgcctcggcctcccaaagtgctgggattacaggtgtgagccaccaagcctggctggttaatttttttgactaacccctttaacagatttcaatccagagaaaatgttacttaagtaaattttcttattattgagtagaaatatgatacctgagacgccattaagaatagatagatatagttatggatatagatatatagatattctaagggtcctaagactctattataatttttttttttttttgtaaatgaggatagaataaaagttcatgattgtctcatacaaataagtgtcatcaggctaactaaatggtgttttattacaaggtctttttcagtactttcacttctttctttcacaattaaggactcattttctgtccagttttatacgctaaggtctttttagtactttcacttctttctttcacaatcaaggactcattttctgtccagttttatactctaagaacaattattgcaaaagttcaaaatagatttatttaaaattattgttcttcagtcattcccaacatagagtaagcttttctttctatatgtttctgttagtttgttgtttttaatctcatattaaagcttttttttttttctttttttcttgagacgggggtatcactctatctcccaggctggaatgcagtggtgtgatcttggctcactgcaacctccgcttcccgggttgaagcgattctcctgcctcagtctccctagtagctgggattacaggcgcctgccaccatgcccagctaatttttgtatttttagtaaagacgaggtttcactgtgttggctaggctggtctcaaacttttgacctcagatgatcctccctgagccaccgcgtgagccaccagcgtgagccactgcgcccagccaaaagcttttacacatctttgaaaagtcttctgtgtgataaccattttgtttcttatataagataaaagctttaatctgttagataataagaaaattctgaagaataactatgattgtgctacatattaatatcaattattctctgccaagaattgcatataacatacttaatactaatattaaatatatctttcttttccttcaattatttagaaaacatttcaagattttgctgtatgaacattagtcattgcattataagaagataaaatggcaccttggtgacatgatttgttttcagaacaatatgactcactgtcactgttagctatatgacttcagatcacttttatcatcactattaactaaatgagctacatgactctgtaaagtttattaaaatacccttatatggaaattagcagtcttgaagagatacagtgaagaatcacatgctttttgaaagaacattgaggtcgggtacggtggctcatgcctgtaatcccagcactttgggacactgaggcgggcggatcacgaggtcaggagatcaagaccatcctggctaacacagtgaaactccgtatctactaaaaatacaaaaagttagccgggcgtggcagcaggtgcctgtagtcccagctactcaggaggctgaggcaggagaatggcgtgaacctgggaggcggaacttgcagtgagctgagatcacgcctctgcactccatcccgggtgacagagcgagattctgtctcgaaaaaaaaaaaaaggaaaaaaagaacattgatttgagaaccagtcaacataatgtattattttaactatagtcacttccacatgatttctttagtccagtgctcttgctgtattccccaccaatgtgatctgcaccatcgtccatctaatcgccaaaactacaaatagggaagttactctccattctccttgactatgtccagatagtcaagctatgaaatgctaacgttctaccccagaatgtctctccatgctgactccctcttctccatacagccccactgctctagttctaccctttattatttattttcctctgccattgcagtagacccttacttgcccctcagctttgagttcatgcacccttccaatcatcttccaaaaggatgcaagaatggcttctctaaaattcaaatttgtgacatcacatcccacgttaaagtcttcactgactttaaggtgaaatctgtactccttaaacaaggtccttagcagtctgcccttgtctctttctcttgtctcatctctaatacttaaacccctggcattttttcagtgttgtttttcttctgtgtatgttatgttcttccatacttctgtacctttacctaagctattccttccatcctgttcccttcacatctctactgctaccccttccttacgtgactcctttctttttatcctttaagattgaactcaaaagtctcatcctctgaggatttatagaaacacacggggcccctaaaattgaaggaaaaatagggagccaggtcagatacctttctcctatgcatattcccctggtatcctgtatataccattgttggagttcttactgcagtgtagttgcagtacttctcagtcttctccacagaagtgcacccaatgtcagaggaaattgtattatgcttacagcctgcctgaaaccctaaattaatgacatcaattatcttagttttaagaaatgtagaaaactaacatttccatagaataggtttatgtcatttaacaaaaaaaaaatttttttaattagctgggcatggcgacccatgcctgtaatctcattactttgggaggctgaggtgagaggatcacttgatcttaggagtttgggaccagctgggcaacatagggagaccctgtctctacaaaaaataaaaaaaaaattagccgggcatggttgcacacacctgtttattatcccaggtactcaggaggctgagatgggagaatcacttgagcctgggagattgggactacagtgagttgtgatcgtgccactgcactccagcctgggtgatagagcaagatcctgcctcaaaaatcaaaacaaaacaaatggaacatttaaaattatttgttctgggccgggcgcggtggttcatgcctgtaatcccagcactttgggaggccgaggcaggtggatcacctgaggtcaggagtttgagaccagcctgaccaatatggtgagaccctgtctctactaaaaatacaaaactagccgcacgtggtggcacatgcctgtaatcccagatacttgggaggctgagacaggaaaatcacttgaacccaggaagacgaggttgcagtgagccaagatcgcgccattgcactccagcctgggcaacaagagtgaaactccatctgaaaaattaaaaaattaaaataaaataaaatatttgtcctggaataaaattgatctttgttaaatatgattatgtttatcctgaaatttcaggtgtttgctgtacactgccctatttgttctctataagtttgtattaaccaactgcgataaatagtaagcactttgatggcagggactaagtctattattacctctgtatttctagcattaaaacaatatctaacacatagtagatgttcaatatgtattgaaaaaaataattgcatgaaagttctctattggaatgatagtgttaaatgccagtgttgtgaacattttaaaattttaaatcatttttctcataggaaaagcttgactgatgatatcatgaaagtcatgcatgttttaaaatggctttctggcttatacaatataacagaatctttttttactttatatagttaaaagtacaaaatacacagaaaagaatcctatattataagtattcagctcagtacaatgttacacacacaacatgcttgcataataaacacccataccaacaaacagaaattcacctgccctcagaagcccctccatactctgtcaggtcattgcagccctttttaacaggataggttagttttgcaaaatcattttacacttgaatagtatttaagacaagtaatgttgaatagaaaatattctgtgacaaatcaggttaatgatttaatattcattattagcagccaacattatttgtaggccaggtgtagtggcttatacctttaatcccagcacttcgggaggccaacatgggaggatggcttgaggccaggagttcaagaccagtttgagcaacatagcaagactaaatagccatacttttgtatactattcagcacaaaaatgttaataataagaattaaataatactcattttagcttttgtgttcatttacaatgagcaatatattctttttaaaatttttgatgtgtaataattatacatatttagggatacagactgacattttggctcatgtatacaatgtaatgatcaaatcagggtaattagcatatctcttgcctcaaacacttatttattaattttgggaatattcaaaatcctctcttctagctatttgaaaatataaaaaaaaaaaaattattgccaggcgtggtggctcacacctgtaatcccagcacttgtgggaggccgaggcaggtagatcacgaggtcaggagatcaagaccatcctggttaacacagtggaaccccatctctactaaaaatacaaaaaattagcccagcgtggtgtgggtgcctgtagtcccagctactcgggaggccgaggcaggagaatgacatgaacccgggaggcggagcttgcagtgagccgagatcgtgccactgcactccagcctgggcgacagcaagactctgtctcaaaaaaaaaaaagaaaattattgactatagtcaccatacaatgctacagaacactagaacttactcatcttatctagttgtagctttgcatctgttaaccaacctctccctatcttcccctcctccatactcttttcattttctaataatcacaattctactctctacttctatgagctcaacttttttagcttccacatatgagtgagaacatgtggtatttatctttctgtcccagacttatttcacttaacataatgtcctttaggctcatccatgttgccatgaatcataggatttcattctttttatggctgaatttgtgtgtgtgtgtgtatgtgtgtgtgtgtgtgtgtgtgtgtgtgtataccacatttctttattcatgttgatgacacttaggttgatttcatatcttggttattgtgaatagtgctgaattaaacatgggaatgcagctatctctttgttatatcgatttcctttcctttggataaatatctggtagtgggattgctgaatcatatggtagttctacttttagttttttgaggaacctccgtacagttttccataaaggctatactaattgacattcccaccaacagtgtataagaattcccttttttctgcatccacaccagcattttttattttttgtcttgttagtaatagccattctgagtgaattgttacttttaagctcttatctctaacaatcaaattactataacagatttttgtttcactttcatttgtttagattagtagttctcaatgtggaaggacctgatttaatctcccaaagaatatttggcagtgtctggagacatttttggttgtcttaacccaccaaaaacagttgtcagtgctactgacatctagtgttacccactactgggttgctgtgaaaattagttttcagaacagagccccataaaaatgaattatctagcttaaaatgtcaacagtgccaaggttgagagtagtgttttttaaagaatgggtaggttgtttatgtttgatggaagttagtttaaatagattgtagcaccttactaatggagtccatgatatcagaaatttaattcccatagacgctagttaacctgtctgtagttcatgcactccagacctcagccagatgtcttaaacatttctgctgcagattataagaagaacaagatgagaaaatgtagatgggttggtataaatctatcactacttctggaaaaatgtctcaatatgatattttttacttaacccaagtctatctctcaccacatgactagttctcactacgttggaatcagcttgtaaactttgactagcagcattgtttaatcttgttataagttcctgaattaatggtctacaggcttgaggcagagtgaatgcctcaaagttatgggcaggcagttatctagtaccaaccatagtctcctgccatctattgggaggtgtcaggtgggaaggctagtagccctctacacatattcatacccacaccccagctctattttttttttttgagtaattataggaggtcagaaacactagaatgtacatacatgctggtaataaatggaaattaatatctgatagttttcttcatggctgtctttcagggcatagttttccatgtattttgctgtcctcttgtgagaatactacccttgacaagttgatctacatttaagctatggccacatttaaactatggccctaaaacatttgttgttatgcaagaaagaattaatggtgatatataccaattctgactctcacataaagtgtttctccaaaagtaacctcagacaacataacaacaaaccaagatttatatagttggaattgcaaatccgtaagtccttaaacttaatgagaagattaatttggaatttgaccatttgactctgctcatttaactttgaaagcagatataaataaaaaccttgtatgaagaaaattgcttgggataatttgcattaaacagtctgttttttgctaagtggcttatttgtattatggaagcatagccttattagtatttttagtcttcctaagaagaaatggaatacatcatagagctctaggccttctttagttttcagtacaaatttggtatatttggtgtttgggaggatatacatggcataaggtaaagagagcattagctttcacgtcagatccaggtccagattctgccacttataaactgttacaccttggaccacctagctattatgggcctgctttagcaccggaaagaagggagaatacctaaatatgatgagagaataagtaggtaaaataatcatgtaaaagaatggtcaggaggagtctggcctctggctctgtcatttattattgtctgtgcccatgggccggctgcaactatttgattgacctaaaatgggatggtgacttgcccgaggtcatacagtgagtcagggcagagcagctgaagctttactctctaagtctcattttccttccctgtaaaattgttgtattggtgactgtctcacagcatgttgtaaggagagatggagatcataattgtaagaggtagcccacagtgctggcacagtgtaagcaccaataaatgaaggtaatgagtacaataaaatgtgtcacttagcccctttccccaaatagtttatccatctggttgatgagagccatacactgtatgctaagacttaaaaatgtgggagttgattaagttctagtactgcattatactaataatgctagtgcatagtttaaagaataataaaataccataatgcaaagtttgtttaagccctttaccctttttttcctacattggggctttatttttagagcacttcacaaattatgcagagaaaagaggggtaggcaagaatggaagcagagagagcagtgtgaaggtagtacagtagggagttatgacagatgcttaggttagggtgatagcagaggtggtggtgagactattaaaagactactcagccaggcatggtggctcacgcgtattatcccaacactctgggaggtcgaagtgggaatatcgcttcagctcaagagctcaagaccagcctgggcaacaaagtgagaccatgtctctacagaaaatacaaaaattagccagtgtgatggcgtgcgcctatagttccagctacttgggaggcagagacagaagggttacttgagcccagaaggttgaggctacagtgagctatgatcatgccactgcattccagtttgggcaacagagcaagaccctgtctcaaagaaaaaaagaaagaaaagactactcaaggcttgagatttgataaaatagttcattttactgcttcattgaggatattcttaaaggaaactggcattttttttcacagtgagtacatggtggagaagaatacaactaatactgaattttaaaatgtgctatttctagtaaccagccttcatcttcttcccctttggctgcagatcctaattatctcatggctaatgaacgcatgaacctcatgaacatggccaagctgagtatcaagggcttgattgaatcagctctgaacctggggaggactcttgactctgactatgcacctctccagcaattctttgtggtgatggagcactgtctgaaacatggcttgaaaggtaggccatcaccccaaaatgcaaatatgcatgcagctgttttctagcaatgcatactatagaagaaagcattctttgtggagccaaagaataagaggcttgaattaataatattaatccattggaatgcagtcttttataggagcagggttatggttgactcaatggacttatagggctttaaaaatacagatcattaaatgttacagttggaggggccattataagtaatcaagtacagtacagtagttctgtttgacaggtggaaataggcctgcccagaatgagacatgacttggtcaaggtcacacattgagttgtggcagagtaggtgctagaactcaggtctcccgactcttgggtcagtgttctttccacttaactataagcttttgagggcagtaactggtcttgttcacccttgtttcctttcttcttgccttctcaatattcttttcttgttgttttttgtttgattgttttttttaaatctgtatgcctatgcttaccaacttcccaatattccatagcctatttctggattacatattcttttctattgagctgttttcttcattaataccacacaattttaggcactaaattgttaaaatgttttattatattatagggctaggccacaaactgtttgtgaaagaagaagggctgagtcttgggaagtagagaatttttttattttcacaaaatattatctattctaaaagcatgaatgaatccaaaaccatcttataacctaggattggtttcctgaaaagttgtgtgtgtatgtgtgtgtgtattgagagtgcgcttatgttgtaaagaatattaaaatactgctttatttttgttgccttagctaaaaaaacttttctcggacaaaataaatccttctgggggcctctagaactggtagaaaagcttgttccagaagccgcagagataacagcaagtgttaaagatcttccaggacttaagtaagtctaaggttgaattccatttctcaggaacagcattcttattaactatcccttgaagagcaagactaaagacaattatgtacgaataatttattttataacaatccaaaatgcatgatgtcatgaataggtgctgacaggagagaattggtatacagaatattgagaaaaatgtgctcttgagggataattattcatctaagagagattgtctttttgttgaaatgccaaacatttgcttattttttaaagcacttgggagaatcatatctaagggggtggcatgctgtacttgacttagggaaaaaaggtattcagtgggtttgagagtcaagattaaaacagctgtcaaattaacctgaagagctagtgactgtagcctgccttagaactataaagtagtgaccaccttcccaaatgagactggtttaattttaatcagacagaggcctagattgcctgtgtccacattcatgctttggacatttatataatccacactgaatttataaggatttgctattattgatctgatggaacatttttagttgggtctcccagaggctgtgtcttcaaattgtagttacattcagtaattctttttgaaagcatttgttccgggtcacattagcccacacacaaaaattccttgcatgggaatgtactgggagaggtcctgaggagcacctcagtgtgcttgttacactggaataccattagcaagaataagtgaactgattctactgtagcctttgcttctggtgcttatgttttcagttgtttgatttctgtgtttttgtaggacaccagtaggtagaggaagagcctggcttcgtttggcattaatgcaaaagaaactttcagaatatatgaaagctttgatcaataagaaagaacttctcaggtatgaacaccttcttgaactttcttctttccttggtatgttctacatcgtataaagtcaaaccatataagttcactatttttgtagatcagaaacatttgattcataacagcttcactgatactttctctcatacctcacacacatatcctcccaaatggatgatttatgttatgtgtgttctgtctgtcactgtggcatatattggtcctttccaaggcaggccaagacttacctctagaaaacagaaggcaccttagcatgtgcccaggctcaataagacaagaacttgacatgtagcattaaattcaaatatagcacaaaattggacgggtgcagtggttcacgcctgtaatcccagcatttcgggaggccaaggtgggcagaccacttgaggccaggagtctgagaccagcctggtcaatatgtcgaaaccctatctctactaaaaaaatataaaaattagccgggcgtggcggtggacacctgtaatcccagctacttgggcggctgaggcacgagaatcgcttggacctgggaagtagaagctgcagtgatccgagagcgtgccaccactcttcagcccgggcgacagagtgagactctgtctcaaaaaaaaaaaaaaaaaatgtgtatatatatatatatatttgtaaaatcacaaaatcttccagtagatcatagatacaactgggagaggcaaaacaacattattttatccgtctttattatatgattccattgtataaaggtcaaaactaggtaaaatcaatctatggtgatagaaatcaggataatagttaccttgaagaggtgggggtagagattggaagagagaaagaatccgatttctaggatttcagtactgttctctttcctgatcatgatagtgattacacagatagatgtgttttttgtgaaagttcatggaactaacagttagctgagatttggaaatgtgtgaatgttggaattcagccatattccacttctgaacagttcataaggttaggcttttgggacaataaactgtcaaagaaccttgttcattccagttctactcagtttccttcagaggctatcaaagaacaaaaatagcatgtgatcagtttttgagagaaacagtaaatttgcagctcattcacttgctgtttttgtgctattttgtcatttgttaatatcttttttttttttttttgagacagagtctcactctgtcaccaggctgtaggctgtagtgcagtggcgctatctccactcactgccacctccgcctcccgggttcaagcgattctcctgccacagcctcctgagtagctgggactacaggcgcacaccaccacacccagctaatttttgtatttttagtagagacggggtttcaccgtgttggccaggatggtctcgatctcttgatctcgtgatccacccaccttggcctcccaaagtgctgggattacaggcgtgagcccagcctattaatatcttttatagtgaatcagaaaagaaataaggaactaatatcagtgaattatattgattgttaacagtgattgaggttgacctttacccccaggtaacttgttgaaaacaaattgattgcagtgttgttttaatcatgatgtcaaattgactgaaaatgaataattcaggtcactgggttttcgtgttttgttttgttttgctttaagagactcgcgctctgtcacccaggttggagtgcagtggtgcaatcacggctcactgcagcttccacctcccaggttcaatcgattctcctgcctcagcctcccgagtagatgggactataggcatgcaccaccacacctggctaatttttgtatttttagtacagacagggtttcaccacgttggccaggctggtcttcaactcctgacctcaagtgatccacctgcctcagcctcccaaagtgtggggtttacaggcgtgagccaccgcacccgcctgtttccatttttttaaaaaatctaaaagactattttttagagtggttttaaatttatagcaatattgagtagaaggtacagatatttttcatacatacccttcccccctgtacaacctccctcattatcaacatcccacaggagtggtacatttgttacaattgatgaacctacattgacacatcattatctcccaaagttcatagttcacattaaggtttactcttggtattgtatgttttatggattttgacagatgtataatgatatgtatccatatgtcattatagtaccatacaaaatagtttcatggccctaaaaaatcctctgtgctccacctattcatctctctgtcctccaacccctaataaccactgatcgtactgtgattgtactgttgttaccaggggtttactgtctctgtggtttttccttttccagaatgtcatgtagtgggaatcatagagtatatggccttttcagactggcacctttcacttagtaatatgcatttaagtttcctctgtggcttgatagctccctttttttttgttctttgagacagagtttcactcttgttgcccaggctggagtgcagtggcacgatctcagctcaccgcaatctccgcctcccaggttcaagtgattgtcctgcctcagcctcctgagtagctgggattacaggcgtgtgccaccatgcccggctaattttgtattttttttttttttttttttttttttttttagtagagacagggtttctacatgttggtcaggctggtctcgaacttccgacctcaggtgatccacccgccttgacctcccaaagtgctgggattgcaggcgtgagccactgcgcctggcgatagctccctttttttagtgctaagtcatatgccattgtccattcatttactgaaggacatcttggttgctcccaaattttggcaattaagagtaaaactgctataaacacatgtatgcaggtttttgtgtggacgtaagtttttaactcagttgggtaaataccaaggaatgcaatagttagatcatatgaattacatcactggtttttttgtgtgtgtattagtaatttaggtgcattataagcagtatttaattatctatgggtcttcacgaatttttttttttgagacagagtgttgctctgtcacccaggctggagtgcagtggcacaatctcagctcactgcaacctccgcctcctgtgttcaagcgattctcctgcctcagcctcctgagtagctgggattacaggtgtgcaccaccacacccagctaatttttgtatttttagtagagatggggtttcaccatgttggccaggctggtcttgaactcctgacctcaagtgatccacccgcctcggcctcccaaagtgctgggattacaagcgtgagccaccgtgcccagccaataatttttatccattcagatttttttttgtttttagtagagatggggtcttactatgttgctcactctggtctcaaagtcctgggctcaagcagtcctcccgccttggtctccccaagtgctgggattacaggtgcgaaccaccatgccgagctaccaaacaaatgttttaagatgcataaaagattgcaaaattatctgatggtgcatcacaagtacaaatatgtcagaaaagtctgaatacctgcttcaaccacaatactgttcagtcacgtctttctgccagcctattatttaaagaatctattcatgcgcctattatttttttcttttaaaaaattttttctccagtgccacttgccaacatccacctattattctaaaagtaaaatatttactaaagcctttctttttgtagttttttttttactatttttgtagatggctataatcaaccatgatgactatgattcaaccatgaatcaaccatttttgtccttgtctctggatttttgagatttttgttacaataaggaattctgtggatttctcttacagtgaattctacgaacccaatgccctcatgatggaagaagaaggagccataattgctggtctgttggtgggtctgaatgtcattgatgccaatttctgtatgaaaggagaagacttggactctcaggtatgggaaagagactcattcccatgggtgtcactctgagttctgctatctcagaagtggatttgattaggttataccaaccaaattaggccatattctatgagtcataaacaggatttccttccattttgatgggaatataaaaaaaagattgtttttccttccagtttggctcatttatacgttacgaatgttttttagattcttgtcttggctgtactctctgttaaacatacatatacacacacacacatacacatttacatacacatacatacacacacaaacacaggtatacccagagatattgcaggtttggtttcagatcacaacaataaagcaaatatcataataaagcaagtcacatgcattttttggtttcccagtacatgtaaaagtttgtttatactaggccaggtgcgattgttcacacctgtaatccctgcactttggggcaggagtatcacttgaacccagaagtttgagaccagcctgggcaacatagtgagaccccgtctctacaaaaaataaaaaattagctggttgtgtagctacttgggaggctgaggcaggaggatcacttaagcttgggaagtcgaggctatagttagccataattgtgcattccagcctgggtgacagtgagaccctgtctcaaaataaaactctaaaaaaaattttttaaataaaaagtttgtttgcattatactgtagtctattaagtatgtgatagtgtaagtgtaaaaaataatgtacataccttaacttaaaaatactttattgctaaaaaaatgctaacaatcacctgagccttcagtgagttgtaatctttttgctggtagagggtcttacctcagtgttaatggctgctgactgatcttggcagttgctgaaagttgaggtggctgtggcaatttcttaaaataagacaacaatgaagtttaccacattaattggcttcctttacaaaagatttctctgtagcataccacgctgtttgacagcattttacccacagtagaatttctttcaaaattggagtcagtcctctcaaatcttgctgctgctttatcaactaagtttatgtaatactctagtaaaccatgctgtaaacagatgtgctgtctttgttgtaccctttatttttgttttgtttttgtttttgttttttgttttttagagacagagtcttaatgtgtctcccaggctggaatgcagtggcaccatctcagctcactgcaacctccgcctcctgggctcaagcaatcctcatgcctcatcctcctgagtagctggactacaggcatgcaccaccacacctagctaatttttttatttatagtagagatggggttttgccatattgcccaggctgatctcaaactcatggcctcaagtgatctgcctgccttggcttcccaaagtgctgggattacaggcatgaaccaccatgcccagcccactattccatttataaagcataggcagagtagatttagcatcattcttaagggccctaggattttcagaatggtaaatgagcactggcttcaacttagagtcaccagctgtattagcctctaacaagagagtcagtctgtcctttgcagctttgaagccaggcattgacttctcatctatagctatgaaagtcctagatggcattgtctaatagaaggctgttttgactacagtgaaaatctgttgttgagtgtatccaccttcatcaattatcttaattagatcttctggataacttgctacagcttctattatttacatcagtgcttgctgcttcaacttgtacttttatgttatggagacactttccttaaacctcgtaaaccagtggctgctaacttcaggcttttcctctgcagcttttttacctctcaatctccatagaattcaagagcattagggccttgctctgaattaggtgttggcttaagggaatgttgtggctggtttgatcttctatacagaccactcaaactttattcctgtcagcaataaggctgttttgctttcttgtcattcatttgttcatgagtagcacttaattcccttcaagcacttctcctttgctttcacaacctggctgtttggcccaaaaagcctaccttttggcctgtcttctctttcgacatgccttcttcactgagcttaattttttctggcttttgatttaaaataagaaatgtgcaattcttcctttcacttgaacacttagtggccattgcagggttattaattggcctaatttcagtattgttgtgtcttagggaatagggaggccaaggagaagggagagagatgggggaacggccagtaagtagagcagtgagaacatacacatttatggattgcttgccatcttatatgggcgtagttcatggagccccaaaataattttgatagtaacatcaaagatcactgattacaggttatcatagcagatgtaataataaagaaaaagtttaaagtactgtgagagttaccaaaatgtgaaaccgagacatgaagcgagcacatgctgttggaaaaatggcactaatatacttgcatgacgcagggttgccacaaaccttcaatttgtaaaaaatgcaatatctgtgaagcaaagtgcaataaaatgaggtatgtgtgtgtgtgcgtgtgtgtgtatactaaaatatatgcagttgactcttgaacaacagagtaaggcattccacatggtagaaacatcccacatagaaaattcacctaaaacttttcattccctaaaaacgttaagtactaatagcatacgattaaccagaggccttactagtaacataaacagtcaattaacacatattttgtatattataaatagttatatttatatttattttattttatttttgagacaaagtctcactgtcatccaggccggagtgccgtggagtgaactcagctcagtgcaacctctgcctcccaggcttaattgatccttccacttcagccttcagagtagctgggactataggaacatgctaccacacccagctaatttttttgttttgtggagacagagtttcgctatgttgcctaagctggtcttgaactcctgagctcaagtgatcctcctgcctcggcctcccaaagtgctgggattacaggcatgagccatggcgcctggcctattgtatatttcatatgctgtattcttacaataaagtaagctagagacaagaaaatattataggaaaattataaagatgagaaaatatatttactattcatttaaatgaatggattatcataaaggaaccagatcatcataaaggtcttcacactaaccagattgatgaggaggaggaggaagaggaggcggttggtcttgctgtctcaggagtggcagagatggaggaaaaccttttttttttctgcctggatgacagagtgagactttgtctcagaaataaaataatataatataaatatatattttatattgtgtatatatatagtatataggtggactcgcacaattcaaagtcgtgttgttcaagaatcaactgtacagttgtccttcagtgtccaaaggagattatttccagcacctccatgaataccaacactcacaatgctcaagcccttacagtcagccctctgcgtccttggattttaggacttgctgagaatgagagcgaactgtactaaaggccattaaagcacggtagttaagagtaaaggctctgaagctaactgcctaggtttggattctggcttcctcattttctagctgaatatattttataattacttagtttcttgttgtttcagatttcttgatgtaatgcagttagaacagggcctagtacacattaattgcccaataaataatgttttcactttaattacttctcaccctttctgtatgaaatactatgacaaacttctgttatgttttattctggtaaaataggaagggaagtaagattttttggtgtggattttttttttatttttttatttttattttttttgagacggagttttgctcttgttgcccaggctggagtgcaatggtgagatcctggcttaccgcaacctccacctcctggattcaagcaattctcctgcctcagcctcccgagtagctgggattacaggcatgtgccaccacacccagctaatttttgtatttttagtagagacagggtttctccatgttgttcagtctggtctcgaactcctgacctcaggtgatccacccgcttcggcctcccaaagtgctgggattataggcaagagccactgcgcccggcctttggtgtggatttttaaaaagaaataagctaaataataaaatggcaatcttgaaaaatgaagacgtgtacatcaatgaaagtttggaggaacagacaccaaaatattagcaatggtcatcttcagtggttgggattatgagtgtttaatattacttccccttttttttagctgtattttctgaaacttctacaggggaaatgtgctaatttttaaaaagttatttctaaaaatgaacagggattcagtagcagaatacccgaaataagcaaaagagaaagaaactttagaccttatttatattaagtattctgttgactgtgttagttgtgatctagtcttctagtcttattgacataatcttgattctttacttccaactcttgttaattcttgattaaactgaaagtaaaacagtacatttttaatcgtaaatttctagtaagtgtcatgactgtattactgttttgagtgcctagaaggagacattgtgttatgccttgtaaagaatatctaattttatattaaaacctgaaaattctctctgtaggttggagttatagatttttcaatgtatctcaaggacgggaacagcagtaaaggtactgaagggtacgtacaaagaaaattagatttcttttctcctgatgtagcattttttttcctttggtggtacttaaagtttacaacaatactgttttaacagacgtgctgaaagaatttctgatcatatagctttaataaagtcttgccagaaatatctgactattacgcctacctctaaaccctaaaaggatttttttgtttgtttgtttaatgattttcctgctatgtggttcaggggcaaagaaaatacaaattttctaaaggattccaattctccatgtcttatagtagggtttaaaaacatggtcattttgaccagaggagtcgcattctcagtttgcttaaaattggcaatatgaaatatgcactgtgaggttatgtaaaatattgacattaggggaaactgattgaaggtacatgggaactctgtgctgcgtttatacctcttcttgtatatctaaaattgtgttaaacacttttaaaatattcattatggtacttagtaattagagatcagaagcacatctattctttttataaatttagccattgaaagcataattagtctgatttttaatttttgacattgagctaagattatctcactgttcttttagtaattgtataggtttggggccttaattttatcttacagctgaaaaatctggctgtttatcttttgtctactacagattagttggttgtagacgtgaaccttctttatccacagtttaatttttcatgtaataataaacatttgggccgggcatggtggctcatgcttgtaatcccagcactttgggaggccgaggcaggcagatgacctgaggtcaggagtttgagaccagcctggccaacatggtgaaaccccatctctacaataatacaaaaaaaaaaaaatagccaggcattatggcgggtgcctgtaatcccagctacttgggaggctgaggccggagaattgcttgaacccgggaggtggaggttgcagtgagccgaaatcacaccattgcactccggcctgggtgacaaagcaggactctgcctcaaaaaaaaaaaaaaaaaaaaaaaaaaaaaaatatatatatatatatatatatatataaaataaacattcaatcttcgtgaaaccctttttaaccattcactttaaatgttaaatagcacttacagacaaatatttagcccttgagaacagctatattacatcagagtgagcttaattcaagtcctatgacaattggaaagttgttactataaatactactagtgaagctgaaaaacctattaacaagaaaatttttatcctttaaatgcgtctaatagattgcaacatcatacctgtgacctaaattattaatactgaggtttgtaagctataacaagagctttattagtgaggggttttgtcatttttaaactcctgactctttcttgttgctatgtcaagagggttttacatcaaatctgtcttatggttcagtgtatctgtgccacaatttttttctcatgttttatgaaaagatggggtggggtggggttgggatcttggtatttcttatgttatttattttatttctattttcttccccttcccccagagacggtcagattactgcaattctggaccagaagaactatgtagaagaactgaacagacatttgaagtaaataatgaataaatatattactttactggggaattgttgaaggagaagggaagagtaagatgatgcgcagtgaggataaattcagacagtgttcaacaaatatatgtagaattcctgtttgccaggcactgagttaggcactagataaataaatggcatttaacagttttggtgacctttagtgaaaggcagtatataatgttatatataatatataataacatagtatataatattacgtatgtaattataactctagtgattaaatagataaatacgtaaatacattcagttaagaattttaaaatatgtgacatatacagttgaaattggtagctttttcagtttagtagagatagctgcatatttcagaactgatcttgggtaaaccactcattacattagtacctttaaattaatcatatcgtccaggtgtgctgggccaaagcctgtagtcccaacactttgggaggccaaggcaggaggattgctttagctcaggagttcaagatgagctagggtaacatagcaagaccttgtctctattaaaaaactcaaaactagccgggcatgtgcctgtagtcccagctacttgtggggctgagacaggaggaggatcacttgagcctgggaagctgaggctgcagtgaaccctggtcttgccattacaccccaccctgggttacagagcgagacactgtcttaaacaaaaaaaaaaaaacgaaaaaaaagatacatgctttgttttcctgcatttctcatttatacattgaattaatagcattaatttaatatataaattgaatttctttgccattattacagttaattcaccaagtattcacaaagtacagtagttcccccttatgtggaggggatacattctaagacccccaaaggatatctgaaaccacagatagtaccaaaccctatatatgctatgttttttcctatacatatgtacctatgataaagtttaatttataaattaggcaaggtaggagattagcaacaataataaaataaaacaactttaacaatagactataataaaagtaatgtgaatgtagtgtctccctcaaaatcaacacatccttttattttgttttcattgaacttcttcttcctagttttctcaggtttttttcccccttcagttttctgtatttatatttcttattgtccttaaatgactatggctattctatatctgagcacagtgaataaaacattaaagtttaattaaaaattaaagaggccgggagcagtggctcacgcctataatcccagcactttgggaggccgaggcaggcggatcacaaggtcaggatatggagatcatcctggctaacacggtgaaaccccatctctactaaaaatacaaaaaaaattagccgggcgtggtaccaggcgcctgtagtcccagctgctcgggaggctgaggcaggagaacggcgtgaacccgggaggcagagcttacagtaagccgagatcgcgccactgcactccagcatgggcaaccgagcgagactccgtctcaaaacaaaacaaaacaaaacaaaaattagagaaagaaagcattagaaataccagtttcaagattttgtgcattgagaaatcattatttccaaaagattttctaagggccactgtccttacgacaattcagtgttgtatatatgttcacagtttatttttttatcttaggagaagtaaaaatccttactggataatccttatttatttgtgttttttaaacatactcatacttccctctattgtttgtgtcatagagagcacaaatcagatttggacatcttatgtgggatttaaacaaatacgtttatacatgagtctatcaaaatccttatttacatgtaagaaaaaaatacatgcccagctttgcccaaggaagtcccagagggagaacagtatcttattgtactattcttacctatttttgaaccacagttgagtgcaggtaactgaaaccacagaaaacaaaactatagataagagaggactactgtattttcagaattttccagaacataaaacagtttcctctctcctgagaagagctatccaaaagctattggtattctcaagtactttgatgttcttgttatgttaagactactgaataattttgaagaataattaatatattcattaattatcttgtttgtagttctcttatgaaaaatagacatttttaatttaagtaaaacttataatatgattatactactgtcagtaaaattttaagtagtcttggttccacctagcaaattcaaaacaatttaagtacattttctctggggaccaagaactaatataatgactttaatgaactatggagatgttagccaagcaaagatatggttacagttaacaatgaaatataaacaatggcactattatttactctttctatgccttagtttctttatctgtaaatgagaatacctaacataaagggttgttgaaaggaataaatgcaataacgcaaataacgtaatttagaagagggtttggtgcatgtaagtatttaattcatatagactgttattatcatatgtagataaacaaagtttattctgtagggaatgaactcttttatttcattgaataaatacttactgaattaaaactcaaatgccaaagataatagccttttgtaagcctagaggtcaagatttgtgagcattaaggcctggcgcagtggctcatgcctgtaatcccagcactctgggaggccgaggcaggtgggtcacttgaggtcaacagtttgagacctgcctgggcaacatggtgcaaccccatctccaccaaaaaatacaaaaattagctggatttggtggtgcatgtctgtagtctccagctacttgggagactgaggcaagagaatcacttgaacccaggaggcagaggttgcagggagccgagaatcgcaccactgcactccagtctcagcgacacaacgagactccgtctaaaaataataataataataaaataaaaaattatgaacattagacaatgaaggataagtgtgaagggtttaaaaaggaaggtacagagtattgtctgtttttcaaaagtgacttttttttcttctctatattatagtgctactgtaaacaaccttcaggcaaaagtagatgcattagaaaaatccaacactaaactgacagaggaggtaagttttggaaatgctttgattgacttatagaatttaatatgcattagtagaaccaataattttaatgtaaccttggaaagaaagaacttgacttttcaaataatattgactgtagtacataacttcttattctttttttttttttttttttttttgagatggagtttcgcttttgttgcccaggctggagtgcagtggcgcgatcttggctcaccgcaacctccgtctcccaagttcaagcgatgctcctgcctcagcctcccgagtagctgggattacaggcatacaccaccaccccggctaattttgtatttttttagtagagacggggtttctccatgttagtcaggctggtcttgaactcctgacctcaggtgatccacccgcctcagcctcccaaagtgctgggattacaggcgtgagccacctcgcctggcccataactccttattctgactagaacggcccagttggcttattgcagggatctcatttacccaattagactgtgtaggggcatgttgccaggttgatggagtatcttggtttctttcgtgtgcatgttttgtctgggctagcctagattaaatgtttagcatatagcatattcatcatttattcagtaagcgtttcacacagtttatgtgcaagagctagacaaatatttatatgtgccaggcattgatttatgttccagattggcaaactccccaccacttatgtccttgttttcttcctgggacagttacatagataaggtgaagagtactggtcagaagatcagtaatccctgcctacaaatcatgcttatgtaactcatgtgctcctgagtaagtcagccacttgacctccaagaggctgagttccgtcactggaaaatgagagtgtttacaatacacttccttttcggcctcacaattaactctgaagatcagataagaatatgaaaactcttagaaaagtccctaaaataagaacagaaaaataacctcatgttttacttctaataaaaatattttttccttaacttgccaagccttagctacagatattttttctttaaatagcattagatggttttatgaaaaatactaaataacattgtccagatggcaaagagtttaccttccttatttctttttctttttttttttttttttctgagatagggtatcattctgttgtccaggctggaatgcagtgacacaagggcttactgtaacccccgccccccgggctcaagtgatctcccaccctcagcctcccaagtagctgggatcacaggcacacaccaccacacctggctatttttagtagagagggggtcttgccatgttgcccatgctggtcctgaactgctgagctcaagtgacccgcctgcctcggccttccaaagtgctagaataataggcatagccactgcgcctggcccaccttctttatttctaattgtaatgatgcccttacaccccatgggatgaatttagtttaaataaaatcaaattaaagcactagtcaggaagatgcttttaatcagtttttctttagaatgaacattttcattattatagttttaaaataccttttttattactcaactctgtgaccttcactttcggacaaaaatttttaaattttatatatcttaaaactttatgcttagggtccttagaatcttatcacataggcttttggaatgttcagcacagattttttactgttattctgctgctactatgttgaagcagtacagcatagcaattaagcatgatctctaaagttaggctacttgggttcatgtcctggctctggcacttgctagttttttgtttttttgttttgttttgttttgttttttgttttttgttttttgagacagagtattgctttgtcgcccaggttgaagtgcagtggtgccatcttggctcactttaacctccacctcccggttcaagcaattctcctgcctcagcctccgagtagccgggaccacaggcatgcaccatcacagctggctaatatttgtatttttatagaaacagagtttcaccaggttggccaggctggtcttgagctcccggcctcaggtgatccacccgcctcggcctcccaaagtgctgggattacaggcatgagccgccgtacccagccacttgctagtcttctaatcctgggccaattacttaagcttctattccttgatttatttatctataacatggaaatagcaataataacattttatgagattgctgtgtgaatgaaatgatttaatacatgattagggcttagaacagtacctaacacatcataagcactcaataaatatagttgttaattttattccctcagtcataagacttgtcttccttagagtcatattaatactaacaatatttattcattgacttatttattttaccagtagcacttattttcttaaagaaaatatgctctaagagagtagacgaggctcattagttctgccttttttcatttccattttgggtttaagaaagccagtaaggccaggcacagtggctcatgcctgtaatcccaacacttgggacatcaaggtgggtggatcgcttgaggccaggattccaaaaccagcgtgggcaacatagcaaaaccccatctcacaaaaaaaaaaaaaagggccagtaaaaaagatagcagacctcttttcccctcctgggttttgaatctgaatgacaaactaagaagaattaagcagatgaagatataaatatccacttcaggcctggcacagtgactcacacctgtaatcccagccctttggaagccaaggcaggaggatcgtttgaggccaagagttcaagattaggctgggaaacatagtgagaccccatctctacaccaaaaaaattagccggctgttgtggtgcacacctgtagtcccagctactcggcatgctgaggagggaggattgcttgagcctgggagaccaaggctgcagtagccaagattgtgccaccacactccaacctgggcaacagagggagaccctgtctcaaataaataaatagataaataaatgtctacttcattattggtaaagctgaattggaaagcctcctgtgatctgcagccataatcaggtttcccaatagtttctcttaaatcaagattttggaatgacctgcctgagggcatacttgaatctagagaggagacctacttgcccagaattggtttcgtgcacatttttaggccacaggatctgagagagaattggacttccaggcctgcccccagaaagcatgagcttctctgtgcttaccatgttaggacaggaactgagcagagcctgcacccactgctaatgaggagataataattgaggagactagcctggctgagaggagcctgcttggttattcctctcggcctcatacaggcaccttcacattctccgggagtttagtagatgcagagaagaaaaaagtgtttccaccttactttttccttctaagaaagagatataaatgtttccctgtagcagttgactgctaataacgttacctgatctttttaggtgttgaaatgaaaaatctcctcaatgcttaatgggatcttttagcatgagaactttggagttcatgtctttaatcttttaagaaatcatctataaaagatcttatagagcgtttgtcacatgggttccatggtgtgacaggacccctttattaaacattttagaaatagacattattaataaataatttttttcttactaaatatgtgtacatctataagaacacccttgagataatcttaagttaaaacttttcatataaaagtagcagtaaggtgatattttatttcttttttttttttttttgagaccgagtttcactctcaccaggctggagtgcagtggcgcgatcttgatctcgggtcactgcaacctctggttcaagctattctcctgcctcagcctcccgagtagctgggattacaggcacacaccactacgcccagctaatttttgtatttttagtagagatggggtttcaccatgttggccaggatggtctcgatctcctgacctcgtgatccgctcgcatcagcctcctaaagtgctgggattacaggcatgagccactgcacctggccaaggagatattttttatttttatttagactgctctaaaaatatttcttggtcgggcgcagtggctcatgcctataatcccagcactttgggaggccgaggtgggcagatctcttgaaggcagaagttcaacaccagcctggccaacatggtgaaaccttgtctctactaaaaatacaaaaattagttgggcgtggtggtgcatgcctatagtcccagctacttgggaggctaaggcatgagaatcacttgaaccaggaggcagaggttacagtgacccgagattatgccactgcactccaggctgggcaatagagtgaggccctgtctcagaaaaataaagaaaaatatttctcttgagttcttataagaacatttttattgggttatagcttccttgctttctaagaatatccaagcctgagaattacatcctagcagatcgtgaattatcttatactatgttaattttaaaaagataaaagattatttttaaaattttatccacagcttgcagttgcaaacaacaggatcattaccttacaagaagaaatggaacgagttaaagaggaaagttcctacatactggaatccaatcggaaggttaatcttactggatttataaaatattcactgagagcatatcaacttgttagtggtaaaggggagtctctaaaggactattttaagcagctggcctgtatcaagcacactttttatttagactccatgcataattgtgtgatgaaggttgtgggagggttatgcgcctttttctacaagatgcttcgtggcttcacagccacctacatctgtttagagacttcaagaaacagtctaattcagtttcttgtttttatgtactaatggttcaaacagtatttaataatttgttatgttaaacatactattacttttatagcatgttactgttttgtaagaagtgacaccttatttatatatcactgggaaagagctaccatataaatgtattttctacataacttaattccttaaagtatcaaactttttatacatgtctaattagaattttgtaaacctttatgttttgtacaattccaagccttcttaattaaggacataatttaatacatttagccctttacgatgactgaggatcattaattaccaacattgacaattccctactaaattataatagtgccactttaggaggctattgaaattgatagagcttctgacacctacacttaaatattccccgatttctgtggatggttttttttcctgtcttttacgtattcaatagcatctcttactttttactgatgctcggtgttatctttaggatgatctctactttcttttatcttcatgcttctaatctactctccctaggaattcaaatccatagttattaaaattgttcttaaagagttactaggctctgcgaggggacaaaagcagttttccatgagtaaagtgattgactttaataatgcatggacttcatgactgctcagaataatttttttatgacctgcttgtttttatctgtgatcttgctggatagttgaagataaccagttgcgaattctctggagattgaatgtattaacatttaaacctatagcccctgggctgggtgcagtggctcacgcctgtaatcccagcactttgggaggccaaggaggcagatcacttgaggtcgggagttcgagaccagcctggccaacgtggtgaaaccccgtctctactaaaaatacaaaaattagccgggcgtggtggcgcacgcctataatcccagctactcgggaagctgagacaggagaatcgcttgaacccaggaggtggaggttgcagtgagcagagattgagccactgcagtccagcctgggcgacagagtgagactccgtctcaaaaaagaaaaaaaaaaaacctataacccaactcatattttgaaatgaatgctatgttatttttagaggctgatttttaaaacttctaccatctggtttggaaacctattttaggattttaaataaagtgtcaggaagcccccaattcagcttaacctttaaaaatgtactagacttcaatttctttgttgtgtttgttcattattatacctgcttcagtatgatctttttttcttgctaagtagcagtgttagtgtctaattctgtatagattaaatccttaaatatgtacaatgttatttatcttttcaagggtcccaagcaagacagaactgcagaagggcaagcactaagtgaagcaagaaagcatttaaaagaagagacacaattacgattggtaaactatgcttaatttctaatagttcaggaatatattaaaaggtaactgcccacttagaggttttatcatacagaccaagattaggaatatcagtagtgttctgaaaaattctagatcctataaaatggttcatctctttttaacccacattccttatcatactttctcaatctttttctgagtattctcaacaagattttgttaatctttatttttttgcttttatagtttgtattacaagaatattaagtatacagaacctacttttttaaactatgccgtctcactcctacctaagtcctcatccctgcaaagattcttggaggtggtggctcctcttttctttacaaagaatcattaatgtaggattactctattttatttttagctgttatttctgatttattattggtcttagatataaatggaaaatttatcatccagtattagtcttaagatttttttagaaattaaaaaaaatacatatcaatatatagatagagagtatatcatctcactctaatcagaatggcaactatcaaaaaattgaaggataagtgttgacaaggatgtagagaaagagaacctttacacactgctggtgaaaatataaattagtatagccactatggaaaacatagttgtcttaaaaaattaaaaatcgggccaggcacagtggctcacacctgtaatcccagcactttgggaggctgaggcggatggatcacgtaaggtcgggagttcgagaccagcatgaccagcatggtgaaaccccatctctactaaaaatacaaaaaaaaaaaaatcagccgggcatggtggcatgcacctgtaatcccagctacttgggaggctgaccaggagaattgcttgaacctgggaagcggaggctgcagtgagccaagattgtatcactgcactccatcctaggcaacagagccagactccgtctcaaaaaataaaaaataaattaattaaaaatcagtctagcaaaagatccagcaatcccactactggggatatatccaaaggaaatgaaatcagtatgtcagagagaatctgtactcctatgtttattgcagcactattcacagtagccaagatagggaatcaacctaagtgttcatcaacacttgaatggataaagaaagcatggtatatatacacaatgggatgctattcagcgataaaaaggaatgaaatcctgtcatttgtggcaacatgggtgaacctggaggacattatgtgaagtgtagtaagccaaacacagaaagagaaatgccatatgataacactcatacgtggaatctaaaacgttgttctcataaaagtagagagtaaggtggggttaccagagggagaggaggcaggggatagtaagagattggtcaacaggtacaaagctatagttagataggaggaataagttctggtcctctgttgcatagtgtggggtgactagagttaacaataatacacattttaatatagttagaagaaaggtttttttttttctttttttttattgatgcataatagatatacatagctctggggttcatatgataatttaatatactcatgtagtaaagaccaaatcagtgttcttggtatacccatcaccttaaatatttgtcttttctttatgctggaaaaaaaagaggcttttgaatgttctcatcacaaatgataaatgtttaagatgatagatacattcatttctctgatttggtcattacacaatttttatattatcaaaacatcatgttctataccataaattactatgtgtcagtcatactttttttaaaaagaatttataataagggatactattcctgtactagattttatccaggtgctagtgttattatattaataacccctggtattcacatactaactcttcctggagtttagatagtataacaaacacaaggacctccccagaatgtctttaagaataaggaggagcctgaaaataaggggtgacttaacttgtactaaaaaattattacaggccaagcgccatggctcacacctgtaattccagcactttgggaggatcgcttgagcttaggagtttgagcccagcctgggcaacatagggacaccctatctctacaaaaattacaaaattaaccatgcttgatagtacatgcctgtattcccagctacttgggaagctgaggagggagatcacctgagcccaaggaggttaaggctgcagtgagccaagatcacactgcactccagcctgggtgacaaagtgagaccctgtctcagaaaaaaaaaaaaaaaaaaaatatatatatatatatatatatatataaaaacaaattgacagtatataacataattttagatttatttatttgtttttttttttttttgagatggagtcttgctctgccacccaggctgaagtgcagtggtgtagtctcagctcactgcaacctccgcctcccaggttcaagagattctcctgcctcagcctcctgaatggctggaattacaggcgcctgccaccacacccagctaatttttgtattttagtagagatggggtttcaccatgttggccaggctggtctcaaactcctgaccttgtaattgtgatccgcctgcctcagactcccaaagtgctgggattacaggtgtgagccatcacacccggccagaatttcagattttttgaaaacaaagcgatattattttgacatccttaaaatagttagcatttgccttctatgtatttgtgaatgagatctcaaaatataatacttttcataagaaaggtcgcagaaataatatatgtcagcattttaagaaggggtatgattcgttttctataatgctaatcaagtaaaatgagaatctcagtgaagtggcacataataaaaatcttaaaatttttcatatccttttatcacagtaagacaaatgtttgttaagaaggaaagaaactaagaaagtatttgaggtcctaggtgagcccaaggcacaaggcagatgcagaagatcctcaggtctttgtatcttcgatcacccacataatgttgcagtaataatggttgaaacaaaaagaggtttcatgttaagtgaactaaaaattctgttagcggccgagtgtggtggctcacacctgtaatcccagcactttgggaggctgaggcgggcagatcacgaggtcaggaattcacaccagcctggtcaacatggtgaaaccccgtctctactaaacatacaaaaaattagccaggcatggtggcatgcacccgtagtcccagctactcaggaggctgaggcaggagaatcgcttgaacccgggaggtggaggttgcagtgagccaagactgagcccctgcactccagcctgagcgacagagcgagactctgtctcaaaaaaaaaaaaaaaatctgttcgcctcgtaaccatactagtcatcatcctcagtaattgcgatgttaccccagggacccagatggtcctctgggttccctgggctcttgaatatatcaacaacattcacatttaggaggactgcaactgcttcattttgtgctgactgctgtaaccctgtaggtatatttctataataagatatgaccatcagttgtcgtaatatctactgaagtgtctcaaatatgtatatattttagatgtattaaataacactatctttggcttagcaggtttttcagatttgtacattattgggcaaatgttattgtatatcctaattattattgttaattattaattaattattgttaatgtctctgaaaatgaatggtagcttaagctattttgccagaatattcagacctgagagttttggtgtactttttcctgtgaaatattatggtttgtacttagttgaaggaacagagtgtaagcaatttacttacctttgggggcaggatgttgagaaagaactggagatgcagatcagcatgaggcaggagatggaattggctatgaagatgctggagaaggatgtctgtgagaagcaggatgccctggtatctcttcggcagcagctggatgacctcagagctctcaagcatgaacttgcctttaagctgcaggtaggggaaatatgaggaatagactcactggctctctaaaatcctggggcttccctcctcccatctgatcctccagaatcacactttaattacaagaggaaagaatcacatctcattttgatgctagctgccagtaaactactttcagaatcagacaaccatgggatcctgtattgctgttctagaaaaccatggccacttttcacattatagtagaggatgagggtcttttttatcctatagggtaatttctactctgcagtctaccgtgccagctaagttatatattctattagcttttacactggaatgtgatacattgatgaactattactgtgatcacactgcatataacaatactaactttagataaattgcttttttttccatttcaggattaactgatattgaaatatatgaacatttctgttttcccacttaccattagattcaaaaggcatgtgtggttgtattttaggatttatgttatacaggttgtttatcgttattttccataacagagttcagacttaggagtaaaacagaaaagtgaactaaacagtcgcttggaagagaagactaatcagatggctgctaccattaaacaacttgaacaaaggtaaaagtcctgtttctttaatgaaacactttggattgtcagtgctgaagtgaaaagaatgtgctgtacattcggcaaatagaaaatacatgaaattcttccaaattagcatcagacattctggtagaaaaaagccagttgaatgttatgtgtgttttctaaggtatgactgaaatgtttttaggaaatgtcaatcacttgactagcctttaaaaaaaaaaaagaaaggtcagccttttatgactgttttgaacatcagaactcttaatccatgtcagagtcatgtgttagaggaaggatacttaaaagcatggaaggactcttaaatgtatgtatgtaattctgtgattttattgttcatcactgaagtctttgaatacttggatgctaggggatatagaggcactgagagataggtgtcctccaaggatctattctggatctttctctcccttctttaacccttttctcttatctcccttttctttctcctgggtagttctgtagcttccactgtcacctccagtgtgttttcccagctcttaccttcatctggagaccagtcttgagttttcatcctttgggcagctatcttccaccagtatctacaattcagtctgcccaaagcacatcttcttcctatgctactctctttctgtgcttatgtgaaaccaccattttctctctggcaacttagcagccaagagaaatggctgagtcttcaaggatgaatgtgacgtggtacccaaggtcatttgatgtttctacccttaacacctgtttgtcacccttcttgcacttgagcaaaactaaactgctggtccctgtacttcccatttttcccatttatttctttcccaatagttccaccaattagaaatgtcctaattcttcccactcccttattcgtcagatacatttttaagtttaggctcaaatgccacctccccagagtttcctctgatacctctttgcagctagaaatgatctgtctttctgggaactcccatagcttcatactcatatctatctatactgcttatggcacttctcactgtctactgtaccttttaactctttatatatgtctcctccgatgcgagtgtaagctccctgagattagttaacgaatcttttaagttcccgtattagatctgtcgcagtgccttgaatatacaagcattcattcagtagatatatgaatgaatggattaatgggtgatttcttatattcagatgattcttaaccagtaagggtcctgaacagcagtgcatattaatgttaactcaaaacttaatggcaaatttataaataaacctgaaacctcttacatagccaaatacaaatgtatcagtctacctaggaaagatggttaggtacttgctcataaacagttatatgtttatgatttaacaaaatgattttactgttcataaattgtgcttttgaaatgaaatgtatcaaatttcttttcaatgatgttttgacttggaatttaaagcaaacagaaagagaataatgacttatctctttgagtattaagctgacttattctcttgctatttttgtgtttcctgtttatccattttctcattctcctttcacttcattgtcatttttattttatttagtgaaaaggatttggtgaaacaggcaaagaccttaaatagtgcagcaaataaactgatcccaaaacatcattaggcatttttaagttggtcacgtcgcaagtccgatatcacaacttaattgtaaaaggaagaaatctgaaagttactacatttaagctctgattctatataaaatgtcaccaaaaagttgactttgaatttgttggacttttaaaaaaccagttggaaatataggttgggtttttttcttattgttttctccccagggttagaaaaattggtataagttcctaattaaaagctgaataaactttgagaaattatttctgagttgaccaataaataaaaataccactttctttaaaaaagcctagggaattgaagctctgtacatatactaatgatgcctttacaacccagtccttgataataccagattctcggtgcattgttcatgtctgtatctgcaagcctgttctgccattgcagtgtgatgaacctagaggtaactaccatgtgaacttgaactcttctaaaatagttctgtgtctcttagaccatgaccccttttcacttttgttatataggtttaatccccaagccaaggatagtacttagtatttcactacacttctattctcagtaaccaagattgcttgcaactttttttgccttggtgacttttgaaaaaaaaagaaaagaaaaagcagcatccttatatttctttaaaatacatagaaataaagttagtaattaggtaacctatgataacataataatgtggacgcctggggaaaccctcctcatgtttgtcatcttctacctctgccgttttcctgcaattccgcttcctacttaggcagttcagagagaacaattctaataaaaacactcctctcctattaacaaaaaatgatgcagtacccatttttcgtatcctgcttttcttatattggagtaaaaaggacagggtatagacatgaatgatgatattctgcctggcctgtcatttcttacctggaaacatttacttaagagtttctgttactttttgttcagatggggatttgctaaaggttctgggaagctaataattgaattattagaaaaacatttcagaataggaagtaaatgataaacttatattctttattattatttagtacaaaaatagattcccagtagatatccacaagcaatattagcagggcttctgtttctaagtgaccacagactaaccctttctaggctttaacattgtaaataatcctataaacagtttgattttttaagatgatttttgatttgaagagacaggctttacataagccttcattccttcaaaaggtcctgacaaaatacttgggtttttttctctttttttcattctggtatgctttgcagcatttcagctgctttggtggggacacagataaccccttcgcttccagctcttaaaattctttatctttttcttggcaaaaccagaattaagagtgtaagatagattccatgtgtgcttatataggtccctgcacagattggacttgaaccaaaattaagtccaaagaacatatgtttagaccaacttcatggaagtggaagatcctgtgctcttgaacttattttaattcttataatttgcacctatataaacaaagctcctactgtattcttctcttcatcaaccttttgtggtgatgggttgccttttctacgagcatttggaaggagtgatcaaataccgaaattgaactttctaaaacctacacatagcatgcgtttaaattctattatataaagccccaagtgctttaccttctaaaacatgcttctctataggtgcaaagttataagatatgtagaagaaaacatccatcagaatcttctggagaatatggtcagagtcttaaacaggcccagtgctgagttctttgtccacttagtcacacatcttttgtgggaatgggaaaggaaggagacagccaaactctgacaaaggcttttccttatagaataacccaaagcctaggtgagggttgatatataatgtcccatgatttaatatatgtggtttgggggaaaggacaagaaaaaactataattccacatataagaaggtagttgcccatttacaagttccagttatgtgtgtaaaacagaaaaattaagtaccaaacctattaggaaatttttttaaaaagtggatttaacttaaattactgtgtacttgaggttggctttggatatggattttctaaaaagtgatgttttattgtttatcatctaatggctgtaaactgtagtactagaataaaaaaaatggaaaatca

SEQ ID NO: 15794 - DNA, 86656 bp, Homo sapiens
agttcattagtcagccattttggtcaacaccctgcttactgcgcacggccaatcctatgagaactcagcatcccagctcatctgagcagatcctggaagtgatttctgcagctcaggattttttttttaagctacattgaaaatataggtttattttttgttcaggtttttcttttatattttttttctgcacaaaggaggaggatttttcacttactcatatcgaggccagatttttaaagccagctaaggcagcatcagctgtgcgggatttaaagcctatagctcagctgaaaaaaaaggtggggggcagggaagggaagataaaaggagaggaagctgggagaagacaagcatcatcttattttgctatgtggtaggaactgtctataagatagtgtagaattgtttatcttgagcagtttgttcttaacctataaggtatttttccttttttttttttttaaacctcccccacccttttcctgaaagctttgtttcagagctttgtattgggtttttttggtgaggaggttgtatttatttttttggtgtgtgtgtgtgagtgtgtgtgtgtctgtgtgtgtgttgtggtcccagctgagtcatcatgtctgctctgacgcctccgaccgatatgccaacccccaccactgacaagatcacacaggctgccatggagaccatctacctttgcaaattccgagtgtccatggatggagaatggctctgcctgcgagagctggatgacatctcacttacacctgacccagagcctacccatgaaggtatggtcagatcctgtccgctagtatttcaccagcatcctcattgttatgggggagggctgggaggatcagggagaggtagaaagaacctacactctcaactgttaacagtcctgaaaaccttgcatccttacttaccacccagctccccttctcttgctcatgggggaaagataattttttttcttgcccctttaggtatcctttcaaaagatgctggatactcgtttagagttctttgtctttaagcctctaaataaaacatttgaggtcacttatcacatctgattctattcaataatgagaaagctattaattttgttcatatatgaaaatgttatagaaattgtagtgatttataacactaagttaagacaacatgactataattataggattgtacatgatgaatacagtagaaacaccagggtatttggtaatggtatcctcaccattatatgaggatacaattttaagcaagttatgacatctaggaaatgtttgataaaacatttttttaacaatatggattattaggttagatgagaaaataacttttcagcatttatttattgaatatggactcctaagaaagcataatgcctggaaaggttaaatatgattaatatggcatccctatagattacaatagaatggtaatattggaatctattggccattgctttttataaattatttgtggtaactattatgatccatttgagatttccactgtcagtacctctgagatctttgtggtctcttgacttgcgacttttttccaggactcttgctaatttatgagaggttttctgcttctaccctttaattctcttaataccacagaaagagagctgatttgaatcatagctacaaatcgttttgtttttaatacagttgcttcttagctaaggtttattctctgtccttatactgatgaaaaaaaacaaaaaacgcttgcatatgaggagaaattctttataaacatctgcctgatagttaggcacatcgacaggacaaagaagaccataggtgaattgtacctagcagatggggttaggaaaggtgattctctgcctttgaccttgagttgaaatcttatcatgactcagaattttcccattgtgtttgataagcattttatcttcccagtcagccttagccttgagaaagttttagggatggttaataacacagaacacaaagcagtcattttgggtgtgtctttaagaacaatgtttaagtggtttttaagaccctttgcatcttttaacaattggtttgttaattagacagctttctttggctgtatgtttcgttatgtgcacaagttataagacatcagctgaaattccatgcaatgccagtactatttattttttattattattttattctatattttcatcaaaacatcgttacatccaacaattccagtactacttaaaacagcctccaaagctttaaaagtctttagggaagaaaaatacagttttagaaggctaccaagaagtcttctggcaactgcctcagtttacatattttgtttgaaaaaaatgtattcccgtccaatttgagagttatacaatatgaaatattccctttatcatgaaatctagtttaccagtgtctcaaaaataatttttaacaattttaacacctcaaatatatgtttttggagcaggattcctatggataagcaaaagtgagctgtttggttcatgtaagcgtttttagcagcgccatttgaattcttcatagagaaatctgtagcaacacatttctcagtatggaaaatgtgtgagagctataatctaagtaataaattgtatgtctgctgattaaagaaatcagataaatacagagtttccaagacctgtaatcaactatagaggatttggaagaaaatagagaaatgccgacagtgcattttagaattttgccttaaattgggcaagaaagctattattttaaattactagaaatgaaaataaagaaagcatagtcccatgaaagcctgtgagtattactgccttgctccattaccaaactctggatatttaaacagtcatttggtcccaagaaatacccacttttatgttaataccactgatagttattagatttaatttagctataagcatttaagtggtggtcaccaggcccatgattatgtgaatctcaccttgttcacaaaatggaactcctgatgtctggacgcgggagtattcagactgctttccgggctgattcacagagggaaaaacatctgaccacccaaatcctagagtgaagtctcctcactcccacaaaagaaaataggcaaacagcataatgttccctcttaaaatgatgtagactgactgtgtgtactcagcaatagaggctctgtggcttccatattttattttcttaaaaccagagttcctggcccttcactgagcagtccgcagtataggcctggacctagagtttctgcctactttaacccttaaataaatgaaaataaaagcattcacttcattatctcaatgcttattggtggtcaatgagggattatctctcttttgtcttatatactcttttttttttttttgagacagagttttgttcttattgcccaggctggagtgcaatggcgcaatcttggctcactgaaaactctgcctaccgggttcaagcgattctcctgcctcagcctcccaaatagctgggattacaggcatgcgccaccacacccagctaatttttgtatttttagtagagacggggtttttgcatgttgatcaggctggtctcgaactcccaacctcaggtgatacaccctccttgacctcccaaagtgctgggattacaggtgtgagccaccatgcccggcttatatactcttattttcaaaagccaacagcaaatctacaacaagtttaattgcaaatagatttcccctaaaggcaagagcctgtgattgactccacaggagaagggtcaggagaggcttcattaagtgagaccttaagagataaacaggtgatcaccagaccgacatagggagggcatttcaaacagtacacagtgagctggcccagccagggaatagcaacaggagcacagagggcttctgtttggcacaacagggagcaagactggaaagataagcaggggcttgactgtagaaatcttattcatactgaaaagcctgcacttgattctgtagtgaaaagctactggtgctttatgtctgggagtaacataaaataagatttgtgtttggaatgatcactctggcaacagtgtagtgaatggatcagaaggatataagctctcagggacccctaactataacttttaaaatggtctgggtaagagatgacaatctcacattaaggtagcaagagtgaacaccaaaggaacaatccctggaaaagcagaatgtacccgatgactgaggggctgggtggctggagaatgaacataaggcagtgcctgggatgactctccaacttctggctgcagaagctaggttccctttaccagtagggaatatagaaggaagagaacatttgagttgttgatgcttaatagattgtgactaacaaaagcactaccatcactcttttttttcttttttttgagacagtttcgctcttattgcccaggctggagtgcaatggcgctatctcagttcactgcaacctccacctcccaggttcaagcaattctccttaactcagactctccagactccccaagtagctgggattacaggcatgcgccaccacgcccagctaattttgtatttttagcagagacagggtttctccatgttggtcaggctggtctcgaactcccgacctcaggtgatcgcccgcctcagcttcccagagtgctgggattacaggcgtgagccaccgtgccccgcccattactctttcagttgagccttctacccgccccacagaagcattaatcagatttatacttttccagattacatatcctggcttaagtctgtaccctaatttacattaagagttggaatcctcacatggaaaggcgggggtgaagataaaaggagtgagacttaaatggacattcagagatgtgagaatgtggcttactttcttactttgcttgtgccatgtcagtgctagaggagcagccttgtttatagaaaattcattttgcattttcttaatttagggaaacatgtaccaccattgaaataacctctcagacttttgtttgtttgtttgttttactttgtgaaagcgtagtgggatttctttccttttttttttttttttttttaaccgaagcaatgttggaagtaagtggaatttcaaagtaaaggaacttttaaagcaccatgaaaattttagagaacatgtgttctctgtttttttcaagaatggaagcagaacgcttcagttagacctttaagcatcattatattaatttcagaaatggtgttattactgagatgaagtggtatattttatttttgcgattttttttaagtcacatgctcatatgtatctgaatttcttggagtaacattctcaaaacaagttacatataattctaggatcaggaaagtaataactttttttttttttttttttgagacagagtctcactctgttgcccaggctggagtgcagtggcgagttcccagctcgctgaaacctctgcctcccaggttcaagcgactctcctgcctcagcctccctagtaactgggattacaggcagacgccaccacgcctgggtaatttttgtatttttagtagagacggggtttcaccatgttggccaggctggtcttgaactcctgacctcaggcgatccacccaccttgccctcccaaagtgctgggattacaaaaaattagctgggcgtggtggcgggtgcctgtaatcccagctactcgggaggctgaggcaggagaatcgcttgaacccaggaggcaggggttgcggtgagccgagatcgtgccactgcactccagcctgggcaacaagagagaaactctgtctcaaaaaaaaaaaaaaagatttttttaaagaaattcaccaatacatgttatgtatacgcatgtccacatacgtgaagggcagggatagtattaccttcagtattattgagtgtttaacaacaaaaccaactatagctatgactcagtttataacacgtttacccttaataagtttacctaattagaaatgtatatgttaataaaaatttttacactttaaagaggatttttaaagaatgaaatcctgactcatttgttgtctcaagtgactacagataccccttgaattaagatggggttatgtcctgagaaactcatcctaagttgaaaataccataaaatgaaaattcacttaacacacctactctactgaacttaatagcttaagtagcttagcctctcttgccttaaacatgcttagaagacttaaattagccaacagttgcgcaaaatcatctggcagcacagtaccctgtagcgtattggttgtttaccctgatctgtggctgatcgtgtggctgactaggatggtgtggctgactgggagctgcggcttgctgccgctgcgcagcatcgtgagagaggatcacctggcgtattgctagctcgggaaaaaatcaaaattcaaaatttgaagtagggtttctactgaacacatatcactttctcatcgttgtaaagttgaaatatcggaagttgaaccctcataagccagggactgtctgtgaattgaaattagcctaaaagacagcagtagtatcatatttcaaaaaagaaaatgttattttgcatatactgcctttactctgtaaagtgtttcagacagatttttttaaaatataatttgtgatctaagtccaattccttgttcttaaactaaatgtccagcttttggtctattttcttttttcttccacattcctactctctgttatcatttttcggatatttatatggtttgagtggcaggcaagttaaaaatcgcaatttaaaataatttttgtgtgcttttcaaagtgaagctaagttggatttttttaaataagacttttttccgattacaaaaggaaatttgttgtggagatttggatatttctttttttttttttttaaatgaggccttgagatttggaaatttctaagtagaattttgacacagaattcaaaatgactgaagaaatctgctggatacctaatgagtctctttagagttgggtggataaattagtcaatggaaaactttattgctgtcaatatggggtatatttgagaacagtaaaggaattagtacaataatggggttgatttggcaattcgtgttttagctactgtgatggtcattaatttagagataatataggatagtggttaaaagtatggattttgtggcttggacctggacctggattcagttccttacccagtactcagtagtcatgtgacgttgcacaagtgatcacttcatgcttgagtttttttgtttttttttgagacagagtctcacagtgtcacctggactggagtgcaatggcacgatctcagctcactgcaacctccacctcctgagttcacacaattctcctgcctcagcctcctgagtagctgggattacaggcgcataccaccacacccagctaattttttgtatttttagtagagacgaggtttccccatgttggccaggctggtctcgaactcctgacctcaagtgatctgcccacctctgtctcccaaagtgctaggattatagatgtgagccatcatgcttgagtttttctctcctcttaactgggaatattaacggtaactacttcagaggttaggaggattaaatgagatacttaatgtaaagcaccctataaatggtagctatttatattagtagttattcatgaagcagtagctgaagccacagcagtttaagccggattcttcaatacattgccattttattttatatttctatttttatatctatctttatagagtagtctgaacaagttatttatcagactaaagatgaacattagtagtagcttaaactcaagttttagcattgtcctttcttggacctctataaataagaaaataattgattaaaaatccacaagttatcagttatccaggaatatgcatttttgtttctttcgttttttttttttttttgagatggagtctcgctcttgtcacccaggctggaacacagtggcgcaatcttggttcactacaacccctgcctccccagttcaagcgattctcctgcctcagcctcccaaatagctgggattacaggcacccaccaccatttctggctaatttctgtatttttagtagagacaggttttcaccatgttggccaggctagtcttgaactccttgaacctgcctcggcctcccaaagtgctgggattacaagcgtgagccactgcacccagccaaaatatgtgcttttctattaaccttcttttagggataaggagtctgacattgagaggtgatgcacagatgatcagttgaatgcaataaaatatacatctggcctgattagttactttccgctaggaattatttactccaagtgttaaaaatgtattctctcatttaatttttacaacaaccttttgagcctaggtacaactattacccccaatttacaaataaactgacatttggccaggcgcggtggctcacacttgtaatcccagcactttgggaggctgaggcgggtggatcacctgaggtcaggagttcaagactagcctggccaacatggtgtactaaaaatacaaaaaaaaaaaaaaagattagctgggcgtggtggcaggtgcctgtaatcccaactacttgggagactgaggcaggagaatcacttgaacctgggagacagaggttgcagtgagccgagattgcaccaccgcactcactccagcctgggcgacaagagtgaaactccatctcaaaaattaaaaaaagtaaaataagctgacattcaagggtgtaataaccggtagaggcaggattcaaactcagactaccaatggttcaacccatacacaacactcctgtcccagaattctagagtgtaagtccaacaataggcctgcgtgtaataagaggagtcttcttcccagtctctgatgacatatttgcagaagttttatacacaattgaacacagcattggcagcttaagtacagtcagcatgcagataaggccaaaagcatcccagctgggacatgcttggtgattgccatctttttttttttttttttgagacggagtctcgctcttgtccaggctggagtgcagctgcgcgatttcggctcactgcaacctccgcctcctgggttcaaacaattctcctgccttaggctcctgagtagctgggattacaggtgcccgccaccatgcccggctaatttttgtactttagtaaagaaggggtttcatcatgttggcctaggcttgtcttgaactcttgacctcaggtgatctgtccaccttggcctcccaaagtgctgggattacaggcgtgagccaccaagcctggccagtgattgccatcttttaaagtggagactgagttttttgtccacatgttttctttttcctcttttcactcacttttataaagtaaatgaaaatatttacataatcgtgcatatactaccaaacagcaaaaatagtacactgctgaaactgacctggctggcaagtgacacctctatatgctaaatttagctttctgaagcagatgtacaaaagcaataagaaaagcagttttgttttgtttttgttttgagacagagtttcgttctgttgcccagtctggagtgcagtggcgcagtctcggctcactgcaacctctgcctcccaggttcaagtgattctcctgcctcagcctcctgagtagctgggactataaatgtgcaccaccatgcccggctaatttttgtatttttagtgcagacagggttttgccatgttggccaggctggtcttgaactcttgggctcaagcgatcacccgcctcagcctctgaaagtactgggattacaggcatgagccaccgcacttagcctgaaaagcagtttgtgatagcagtaatgttcacgattatggattgtttgaaatagtagctacaggtaatcattattcttttagccaagcattctcatgcccttctttggatgattttttcaatgttttttcaaactccttttcaacatacttacctgttccagtcagactgtgcttcagtaaaatcctgattattctttttgttttactattctgacttgtgattcttcatgcccgtgttatatcaggaagggtaatggacccctgactcccttcatctacaagtccttctctaacagatctcacacctttcatgtcctgaatcactggttagcatctgggacatttgtttgaatatgctagaaatcattccccagttatttaattcatgggattccttatttctgaaattatatagaaagttcttcagggcaaaccttttctttggcgttcttcagaaggccccatggtactgtgtactatttatcgtagatatccaacaaacttctggtgaactcagtgattccctattactccataaaatcattttaaaagaaaggatttgcatgttactgtaaagacacatgcacacgtatgtttattgcggcactattcatagtagcaaagacttggaaccaacccagatatccatcaataatacactggataaagaaaatgtggcacatatacaccatggaatactatgcagccataaaacaggatgtgttcatgtcctttgcaaggacatggatgaagctggaaaccatcattctgagcaagctatcacaaggacaaaaaaccaaacaccgcatgttctcactcataagtgggagtcaaacaatgagaacacatggatacagggaagggaacatcacacactggggacctgtcggtgggtagggggctggggggagggatagcattaggagaaatacctaatataaatgacgagttgatgggtgcagcaaaccaacatggcacatgtatacctatgtaacaaacctgcacgttttgcacatgtactccggaacttaaagtattaaaaaaaataaaaagccaggtgcagtggcgggcgcctgtaatcccagctatgtgggaggccgaggcaggagaatcacttgaactcgggaggcggaggttgcagtgagccaagatcgcgccactgcactctaacctgggcaacagagtgagactccatttcaaaagaaagagagagagagagagagagaggagagagagagagagagagagagagggagggagggagggagggagagagagagagagagagagagagagagaaagaaagaaagaaaaatggattttgtcttcctccattacacacaatttaatttatggtttctaatgttttctttatttttaattgtttatctcatattctggaccgactgtatattatttggaaaatataagtttagaataatgtaataatttgttgtttaaatatatcttaataatacgtagtattgataaaaatatgggacgacttggggcctctgctagtgggaatgtgcattggtacatcctttatagaaatcattttatcattgtgaatcaaggaccttaaaaaattaattctcagtaattgtaccagacacctatcctaaggaaataataagagatacaaacaaaaagtttatgtatgtactgtatatttatcacggtattctgacttcctgtaacacactcttgagagcaacttaaatagcctaagaggaaaattattcaataagttgtagaacaccttacactaaaaattattgtggaacaatatttgatgtgtagggtaatgtttggatataactttaaaagctgtctcttaagctgcatatttactatagtcacaatttttttaagtataggtatacataaacacaagtaaaaggaaatgtatcaaaaatataaaaattgattatctctggatagtggaattatgggtgatttttataatattctttatatttctttatatctcccaaatattctacaagaggacatattactctaatatgaaaacaaatgttcctttttcaaaggaaaaatctttatgaaaattaacgggtgtgcaatcatccatccaacagatatttgtattatatatcagtaccttctatgacagtttcacacatctgtgagtgggaacatttgcctcacagcagagctactgctttagattcaatttccattataattttttaatatttctattaggcattttattttgggtttttttcaaacacagacctgtgtttatttactggcatgctctgttttcatagctgtttaaatgctgtttgcagtgtatggggtggcccacagtgtctagatttagaagcatttacagcatttgatttattcctttcctaagtgtttggaaaataaaacctgagtcattgggattctctttttcacagaattgtgttattgttctttgctttcactgtggcacacccccttttgtaattggcccttggtgagattacagaaacatttgttgccaccagtgcagtcagccttagatttacactgtcaggttctctgagctgtgattatgtgttcagaaggcagtctcagtgaacttctcaaagtgagaaggttgtagcttttaatacagtctcagaagcctatgggacaaagttttctggacacggttcatcccttcttgttgctctgccctgaaaataacctggctagtcaccctttcaaggtaagttttacccacttagcttccaggattttgtaaaattctaaatctgggtgagaaatatcagtagctctgtacttgtatgccagttcctatctaaaccacgaaagaggtgcatgctgcctctgatctgaccgtaacatactctgcataaaatcagcttttccttcctgtttcaggactactttcagtttcttcctgtctctttgatactcttgcactagcgttggcttcagtgcactgtcattaaccacagtgccttacagtattttcttctattggtgagccttttctggacctttcgtgaaacagagcttctacttgaatctttaatttgtgcccttcataacagaactcacattaactcttctttgggttatcagcttctgacacccaagagtcatttgtcctaaactaatcactgaaatatgaatcattttccaaaaagaaatgctgtgccagagaagataattgccactcagtgatagagctcagaacggaattcacgttgtcagattcccaagcctgagtaccaaccaagatctggttggaaagagcaagtgctgtcgtctgagaacatccaccatattctgtactcttcagtagctgttctgtgttttgcttttttgatggtgcccctcctgagggggaggtggagagtatataattgggcatgttttttcattgtggttcctctagtccccaccagtcaactgtgactactatgaagtgcttttgagtacagggctgtaaatactaaaatctgttcctttgcaatttttggtatttgagcttttccagagaacaaatagaaggatttgatgagcttagaaatacatgtgtagaggaacagtgaaaaagacttcttcccaaatggctgctaagtaattatatatttttcatcataattaaatattctcaaaattgtatgtcagtgtgttgaaaatagtgttttcaaagaaaatattggctgggcgtggtggctcacacctgtaatcccaacattttgggaggccaaggcaggcggattgcttgagctcaggagttcaaggccagcctgggcaacatggcaaaaccctatatctacaaaaaaaaataaaaattagctgggtgctgctgggcactgtggctcatgtctgtaatcccagcactttcagaggtcgaggcgggtggatcacctgaggtcaggagttcgagaccagcctggccaacctggtgaaaccctgtctctactaaaactacaaaatattagccgggcatggtggcggatacttgcaatctcagctactcaggaggctgaggcaggagaattgcttgaatccaggaggtggaggttgcagtgagatgagatcacatcactgcactccagcctgggcaacaagagcaaaacttcatctcaaaaaaaattagctgggtgtggtggtgcatgcctgtggtcccagctactcaggaggctgacgtgggaggatgggaagattacttgagctcagcaggtcaaggctgctgtgagctgtgattgcgccacagtgctccactgggtggcagagttcagaccctgtctcaaaaaaaaaaaaaaaaagaaaagaaaaggaaagaaagaaatgtctttagcattattatgtacagatatttttaatgaaaacaactttagttatagaggtgatatatttgcattgtaagtcacaagatacagaaaagtataaaaatgcaaaataatagaatgcacctacatttcaaatacctagggataaccactgttaagatttagtatcagattctctttttcaatgtatacactttttcaatgtatacactgaaggttcacttgcaaactcaaaattttatacatgtaagatcataccacacctgtgctgtgtgacctgccttttttcctctgcaatatttttccatatgggtaaattgaaatttttgtcattttgtttaatgtcttcagttattggatgtgctataatttcttttcttttcttttttttttctgagacggagttttgctcttattgtctgggctggagtgcaatggcatggtctcagctcactgcaacctctgcctcccgggttcaagtgattctcttgcctcagcctcccaagtagctgggattacaggcgctttcgaccatgtccggctaatttttgtattttcagtagagacagggtttcaccatgttggccaggctagtctcaaactcctgacctcaggtgatccacccaccctggcctcccaaagtgctggtattacaggcgtgagccactgcgcctggcctggatgtgccataatttctttgactatttctttattacaggcatttaggttgtttctaaatttttctacccaagacagttttagaaaaattgttatgtgtataacttgaatatttaaccaatttttagtttttaatttttatacacattgccaaactactttaaacaattaaaacaaattttgaatagcatggtatcataaactttcatattagctactcatcaaagcttggttttgtctttcctgcttgcagttggttgcgtttttctcatgctgtattaacatctgaagtttccaaaagatacagttgtggttttcaagacagttggttcagcagctgaaaacctcatgatattactttctctactttttttttttaagctaacagtagtgtcctaagcaaaagagagtttttactgttaattgtgcaatgagaaactgcatgtttttctaagattgctagaatttgctttttgggatgaaaaagctgcatgctgggatttcctttttctttcttatacagatataaaactaagagtgtatgtgagatgtactacattttgtctgagaatcccacagtgtccagtcctgtggacagcagcttcccagctaaagtatcttagagacattatctctgccagcatagccattccagcatgagagcaaagggtctactggtcagggctttctttcctcatccgctcaccccccatcaggctcagccctccttagcgttctagtgtcacctagctgctcacctaagaatctgttttatcttcacttatgtcactaatattaattcctcttttttttttttttttttgagatagggtcttgctctgtcaaccaggctggagtgcagtggtaccatctcagctcactgcaatctccacctggattcaagcaattctcctgcctcagcctcctgagtagctgggattgcaggcacacaccaccacgcctggctaatttttgtatttttagtagagacagggttacaccatgttgccaggctggtctcgaactcctgacttcaagtgatctgcctgcttaggcttcccaaagtgctgggattacagacaggagccaccatgcccagcctattaattccttttttttttttttttttgagatagggtttcactctatcacccaggctggagtgcaagtggtacaatctcagctcactccagcctccacctcccaggctcaagcaatcctcctaccttggcctcccaagtagctgggattagaggcatgctgcactaccacacctggctatttcttttgtatttttggcagagacagggtttcgccatgttgtctaggctggtcgccgcctcctggactcaagcgatctgcctgccttggcctcccaaagtgctgggattacaagcatgagctaccacgcccagccttaattccttgtaaagcttatgtcatacttatttagatctcaagggcattgtctatgggtgtttcatcttttttttttttttttttttttttgagacggagttttggtctgtcacccaggctggagtgcagtggcacgatcttggctcactgcagcccccgcctcccgggttgaagcaattatcctgcctcagcctctggagtagctgggactacaggcatgcgccaccacgcccggctaattttttgtatttttggtagagacagggtttcactgtgttggccaggatggtcttgatctcctgacctcatgatctgcccgcctcggcctcccaaagtgctgggattacaggcgtgagccaccgtgcccagccagatgtttcatctttttaacttccattgcattagtaaagtcttttgctcaccataaatgctcaataaattttattttattttatttttattatttatattatttgtttttattttatattactttatttatttttgggtctcactctgtcacccaggctggagtgccgtggcatgatcatagcttattgcagcctcaaactcctggcctcaagagatcctcctgtttcagtctgtcaagtagcctggtctccctatattgagtaggctgttcttgaactcatgggctaggcgatgcacccacctctgccttccaaagtgctgggattacaggcatgaaccaccacacccagcctcagtaaaattaaaatggctgaagtgttgatgacttaatgtgttaccttttctagggctatttgtctttttttttttttttgctgatatttttgtggagaaagtagaccttggcccaaattactggtttattagaacaaaacctcaaagcatttatgaaaattaatatatgacaattgctttgttaccaagctaataatactatggttagtttaatagcacctcagctgttaatttgtcatttggtttatttaggttgactaattttttttcctgtttttaatatttagcttagctggctttttaaaattccattcactctattgtctttgaataattacggcaaatatagagaaatccagttgtaagtgtaaagttgacattgagtacctatgctttgctaagtacttcaaatttattagcttttattttcacaatagcccttcaaggagttatatgtgatgtgtctgggtttggggcttcagaaaggtgttgccttaagaaaccataataaaattctaaaaattaacactaaatcaaagacacttggtctcaaggggacaaaataacccccaggccttgtaaaatctgtcacttggttgcctatagcaatactgctagagaaaggctacctcaagaagagatttcacaaccatggatacataaacaaaggcgaagcattttttagcccattcaagcacttccctgtagaaaaggagcttcattcagccagttgcctcatccagagaaaaaagaagtacaagaggggccaggctcaccttctaccagaccatgtactccagaacttaaagtataaaaaaaaaaaaaaaagccgggtgcagtgggggacgcctataatcccagctactctggaggctgaggcaggataattgcttcaacccaggaggcggaggctgcagtgagctgagatcgtgccactgcactccagcctgggtgacagagaaaaactccgtctcaaaaaaaaaaaaaaaaaaagatgaaacacccatagacctgtttcaggtctaagaatgaaaaaaaatcaatagactaattatgtagctctgaaaagatttaagctggtggcactgtaaacatctacccttaaggtacatagtgactcaaaggaccttgaggtataaaagaatggcatgttacctattgtagtaaagtcctgagcatgccaaggtaaagtggagaacagctttacatggaaaagacagaccttttagtttctgggggagaaaagttctcttaaattaattgcatcactctgatacttaaaactttaatctctgttttaagaagaaaacagaaaatatgtctgtttgtaacagaaaaatgttctagatgggatatgcccaaggaaaagtccgagatccctggtatccaccacgcattcctacctagaaattcactttccagagcctttttctatacaaatcttggaggctcttcatattttgctttactaaggtaggcttttatcttcataggtgacaaatagagtttctaattaaatacaatacaataaagaacaaaatgggaatattccctctattgacttttgcaaggtcacagcaagtctgtaaagtaataatgtggatggtaagagtccattctcatgaatctgtaatcctacataatatagatttgtggcacattatattgtcaaaggattgaacctgaaaatgacttctgcaaatatgtctatatataatgtatttcagcactaatttactataaaataatagtagccaactcacagtatttttttttctgtatgagacactttccatttgctttacatatatagacacataattccaaaattaaaaaaacctctggaaatgaaaagcatttttcacaaatttgcctgaacttatttggtgttacaacatgatgtgaatttacttgaggctatttatagtctttattctacttaatctgaatattcatttcctgcagaaatattaatgtgcttgattgtaggttactgcctcagatcctgctagttctgtatggtgaataaacatctggctttattgaattatatgtgatttattttgtgtatcttcaaagtagcctcctttatttttgttttggggaaggagaattgggggagggggagttggaaaaagtatttggattttttttttttttaagaaaagtcactagtttgcatcataatatttgtcctgaatctaaaagaaatatatcgcacatacttttcaattccctgaagtgatcaaaataatagttgagttagattaatgtcgcctacacttagaatacaaagagcctttgattttcaatagaaaaataaatctgtgttgctttttaataggatatgcatctttgtttccctttatttgaaactttgaaattgctaatcttagctttgaaacatatttaataaccgtagttgctatctctgcttatttggttgtactcccagcccttgtcactgttaatcgctgtgataagtagaaagaatcctaggaacctccctttcagttatccctttggaaatcttgtttttaatagcacttttctttctgggcttgcatgacattttatctttcttttcctttctttttgccgtttgcaaagactcttgggaggatttgacagatttggtggagcaaatgcgcgatgatacagaaggtgcgtgccacaccaacatctttcagctttttctccttgctttttaaaattttctaaccaccttttaattgttttccgtaagaggaaatgtcagctttaggttttatttcccatggcaataagtggaaatcttaatgttttggttccaagtaaaatagtgtcaatgtatgtttatgttgcttttgaaagatatttgctgaataacgtgtttaaaagggacattatttcaagattatatcaagtttttgccatggctgttttttcacttgtttgttgagaaagtgtaaattttattactcatgcaaatacatgtatatatatttctgtgaatttcacagcagccaaaagcaaacagatcccaggaatctagtggttggcctggaatgttgctctgatttgtagatttccataacattacacacttaagctttgtcatgtcatagcattcttttctggtgtaattattttttgttaattttttcttcttcatacaagagactgaaacatggaatggtgtgattatctttttaaagtagcacacatgttctaatgtggaaaggttccccaaaccaatcagtgtttcttctgtatcaaggcagctaactatagggagctcagagcgatttacacattttatactaaaaatagaaaaattgagatttgaatctactttatcattttacatgttcccgctttgctgtagcacacacccctgacacacacacatccaccactctgtccagactgacctttcctgcccacctcctcctctcctactttgttcctgtgacatctcatgtatttatacccttccccctccgcctgtgccacctgcgaacccttcagtccttatgggatttccacaatttactctttgacagctttggcccacattcttttctccattcacttgctgctgcagaacttggagcttaaggaaggctttttacttattctctaattcttgtgtgtttatcaacctagttaaagggtaaactccttgagaacagagattgtcttaaacttcttggtatccttaatcagacctgggacgagtactgccctcagtagatctggtcattaccaaacaaaatcaaggcagctttaccctctctgttgatgcccaagagtatcttctgtttcagcccttgcctttgaatgtgtgaattctgaaatcctgagtgtcatctcttttcctttggtcaaactatttttatgccatctttgattctgcttttaatataactgattacatatagttcagtgaaagaacaaatcagtattgtctagttgattgacagttcacagacaagaaaaaagagaaggatgttgattcatttagtgtgtaatgtttactattgtgttagctgctattattattattattatatttatttatttattttgaaatggaatctcactccatcgtccaggctgcggtgcagtggagcgatctcatctcactgcaacttctgcctcctggggttcaagcaattctcctgcctcagcttcctaagtagctgggattataggtgcataccaccatccctggctaatttttttgtgtttttagtagagacggggtttcaacatgttggccaggctggtctcgaactcctgacctcaagtgatccacctgcctcagcctctcaaagtgctgggattacaagtgtgaaccactgtgcctggcctattatcattattattaattattggctaggcaccaccaggtttaaggctttaattcctttgatagactagatattaaaggaaaatgctacataaagtttatccccttcttgagaactttaccatgactcatcacaggcaagattctatttctttaatacaaagtattaataatgcaagagtcaagcttactgtgagagtcagactccttttttttaattttgtttttgctgggatttttgtcgatggttattataggtgaactccaaaagggagagaagatgaactttaacagtatagtacataaaatatccagaaaatgttgattatgtcagtaccttcatgatcttaatagatttccagtcaagtgatatatggtaatgttgatcaagatcctctttacagaaaagtctttctgaaaagtagttaaaaaaaaaaatgagaatggggagagggagatggcttcactttaactcttttgataatttcattcttcttgatatccttctctgcttttcttgcctcatggtctcaatcacagttatgtaaaattccagcatttcacacaactgtattacgtaacttggagatgttataaataagtgctagtactaagaagaaataagttatggagtattacctgcacataacacacaatagcaattcagggtctgggaagaatcctcatttcagactcagaaaaagctgatgatatatgcaggctcagatcttttctggagaccttcaactgctaagctgttttcaatgctgtttctcatctgttattgcagatgggccataacagttggcttttttaaaattttattttattttattttatttttttgagacgaggtatcactctgttgcccaggctggagtgcagtggcatgatcatagcttcctgcagcctcgaactcccaggctccttcctcagcctcctgagtagctgggactacaggcatgtgccatcacacctggctaatttttatgtatgtatgtatgtatgtatgtagagacagggtctcactttgttgcccaggctggtctcaaactcctaggctcaaacgatcctcccacttcagcctcccaacgcactaggattgcaggcttgagccaccgaacccggctatagtttgctttttaatagatagagtgttaacactggcttctggcctcctaaaaatttttaaaataacagactctagtgggttgcagatttgaactggtcgttgtttttgttttttgtttcagttctgtcacaattgaagcttcttattttgaatttttttttttttttttgagatggagtttcgctcttgttgcccaggctggagtgcaatgctatgatatcagctcactgcaacctccacctcccagattgaagcaattctcctgcctcagcctcctgagtagctgggactacaggcacatgccaccacatctggctaatttttgcatttttagtagagacagggtctcaccatgttggctaggctggtctcgaactcctggcctcaggtgatgcgcccgcctcaggctcccaaagtgctgggattacagacatgagccactgtgcccagcccttttgaatttttttagaagatgggagtcttgctgtgttgcccaggctggagtgctgtggtgcaatctcggctcactgcagcctctgctagtgattcttcttgcctcagcctcctgagtagctgggactacaggtgcacaccaccatgcctagctaatttttgcattttttagtagagatggagtttcaccatgtttgccaggatggtctcaatctcctgacctcgtggtccacccgccttggcctcccaaagtgctgggattacaagtgtgagccaccgcgcccggcctgaactattttttacagtgatgattagtttcatattctatgtgtttgtaacttatatctactagaatatgaagtgtcttcttagggtacaattgtatgatgtacaacacctattatattgcatctcctttccttatatgctagtaatttgtgtctaaaatgttttgaaactcactagggaaattatgaacattaaattaaataatgaaaggcacatagcttattacctttagtttttcaataaatatcggatttctgtctgtactcattacaagccttttgaacagattttgtaaatttgcagtggcccagattactgcccgtctctctgaggattaaaatagtcaggacagtacttgaatttaggcaataatatacctgtgtaaaatattacctaccaaaattgcatactggttccttggcatttgggggcagagggtgttaagacttgatgcatgttgaaaaacagaagaaacatatcttaagagattttattagcttctagcactgtgccacatcgtcattcaataagcttattaagttaaacaaaattgttataatggcttagagtggtggttcacttctataatcccagtactttgcggggccgaggcaggcagattacttgacgtcaggagttcaagaccagcctggccaacatgacaaaacccgtctctactaaaaatacaaaaaattgctgaggcgaggaattgcttgaaactgggaggcagaggttgcggtgagctgagatcacgccactgcactccagcctgggcaatagagtgagtctccctctcaaaacacaacaacaaaaaaattggcggggcgtggtggctcacgcctgtaatcctagcactttgggatgccaaggtgggcggatcacttgatgccaggagttcaaggccagcctgggcaacatggtgaaaccctgtctctactaaaaatacaaaaagttagccaggtatggtggcaggcgcctgtaatcccagttcctgggagtctgaggcacgagaatcgcttgagcccgggaggcggaggttgcagtgagtcaagatcatgccactgcactcaagcctggttgacagagcaagactccttaaaaaaaaaaaaaaaaattagccaggcatggtggcgggtgcctgtagtcccagctactcagaaggctgaggcaagaaaatcacttgaagctgtgagttggaggttgcagtgagccgagattgcaccattgcattccagcctgggtgactgagcaagactgtctcaaaaaaaaaaaaaaaaaaaagttatgtacatggaagaccataataattgcagtagctaacaacttttttccttagtatattccaagcacttctaaatggttacgtataagaacttgtttactcttcagaaccctgtcaccattttatagataaggaaagtgacacatacagaggttaagaaagtttcccagcaaaatactactcagttgtaaaaaggaagagaccactgatacatgcaacaacctgaatgattcttcggagaattatgctgaataacaaaaagtcaattttaatggttgcatactatatgattctatttacataacagtcttgaagtgatgaaagtatagaaatgaagaacagattagtggttggcatgggttgaggatggagtaggggcaaggagagatgtgggcatggctataaaacatcaatatgggggatccttgtcgtgatggaaatgttcagtgtcttgactgtaattcaacatcagtatactggttgtgataatgtactacagttttgcaagatacccttgggagaactaggttaaaagtacatggtatctctcgatattatttcttacaatttcatgtgattcctcaattatctcaaaacagaaaatgcaacaagagaaaaaacttttcccaaggtcacacagctagggaagagtttgaatagagttcaaactcccacagaccagctttagagcttgtgctgttaaccactacaccaaaattgtttaaacttatttgacacaagaacaactgtaaaaatacatcttcatcagaactcagtacacacatcatttatttgtatgtatcttaaaacaaaagtttcatgaaacaatacatagccttactatataggacattaaattgattttgtgacccactaaagggttgtgacctttgtttgaaagacactccagtatcctgtgctgcctctctggtatatacatccatttgtacggtagccactgtctaggtgtgtgcaaaaaaaaaaaaacaaattcctgaaaggactgttttggctctgtttccagcctgtaatcgtgggcatactttaaaggctgggctagtaaccttgcatccttctatttctctttaaaacatctccttgtgaaagcatcttttctcataactgctattattgtcctatgctgatgactctctaagtccaaacttccatttgcatttacaactaggtgatcaaaaatatcttgaaagctgggcatggtggttgcattcctggagacccatctattcaggaggctgaggtgggaggattgcttgagcccatgagtccaagtccagcctgggcaacatagtgagaccttgtctttaaaaataatatgttgagaatccttccacataaatatcctttatgatatccaaaaccaagtttattttgccctttatctccataacagttactcaactttttcatttccctttatagcacactcttccagtctctcagggcaaaaatgttggtgttattcttgaccccttcatttcctttatcttttctatgactatctgaacttgaatcactacagttcttcgtggcagaccattttgattctcttccctcaaattcattttgcgtaatcttctcagattagtcatctccaaacaaaattttaggcacgctgattctctgctcaaaactacagtggttcccattgcttcctccattaatatccaagtctagtttcagagacctctttatctgactctaccctacctgtgttttccagttctccccagtaagaactccctcttccactcttattttctccacctgacttcacacacccattccaaccacttggaataccgtccttcatgtgttctgtgataccacgacatttaggatctacctcaagtactgcagtatattgagatttatcacacttttattcatattacttttggtgttatctcatttgaagtacaaatgtacaatattccagggagttaaactaaggacagtggttattcctggtttttgtcaggtctgaggtttacctgctttaacaaattaataaagcctcttgctgtttcttggatgctggcaaaagacacaagactcctaggtcagagataaaggactttattactcatgacagtgcaagcagcctgagcatctgcatatctgtgccagttcttcttggaccagagtcccatggggtgacactggatggctcagtgacatgcttcacacgtggtaggtttgtgttgcagatgaagaaggccaagttgggagaacccattgtttttataggaagcagtaggaaagcttcgtctctcattatcaggttcataaatggcccaggaaagagtggtcagggccgtatagtcttgacataacccagtaaagaaatgtaggtgcccaagaggtccaaggaggattgtcttccccaacattttacagatgaaacagaagaatgaggatttcccccaacatcactcagggaatatgagagagacagatctaacccttctagatcatagatctaactgcgattgccctctcacatccatttacattgtttttcttttcttttcttttcttttttttatacctaggtaaagcccaaaacatttaaattatttctatgcaataaattgagcaaaccaaggaattcttgggttgtatttaccacctaaatttcttatgttgtatcaaaacaacgaaggtttgtcctaacttctaaatgtttccagaaatcttctaggtattcttctgcagcatggaattctcaggtaaaggtaactgaagaagtctgggaaactttccaaaactaaaattgattatattatgatatgggagcccaatgaagaagaaatcagtgtgtttcctagggaactcttgtgcaagctaatatatttttttttaatctattaaagattagagaaatgtatacctaaccaagaatgagtaagagtatatgaaaataatggttttggttaagtaagctgactcatttcaatgctaaagcccatcaaaagggtttttttttttttttggttatatacggaggtagaagaaactacactagtttcttcttaccttcttacaggaggccagcagctaaaccttgacctggagtaagagaaagcagaattacttttttcttgtcttgtcttttttttttttttttgagacaggatctcactctgttgcccaggctagaaggtggtggcacagctcactgtagcttacactttccaggctcaagccatcctcccacctcagcttcccaaggagctgggactacaggtttgcaccaccacacccagctaattttttgtgtgttttttatggagagggggtctcaccttgttgcctagcctggtcttgactcctgaggtcaagctatccatctgccagcctcagcctcccaaagtgctgggattacaggtgtgagccactgtgcccagccagaattttacttttactttaaattttttacttttaattatgaaacttttttttttttttaaagagacagggtctcaaccctgttgcccaggccagagtacagtagcatgatcatagctctcgtagctctctgtaactttgaactcttggttcaagtgaccttcctgccttacctcagccccgagtagctagggctatgggtgcgtaccaccaagtccagcttaattacacaactttttatagtacgtaaaaagaatagcttaatgaacttaaatatctccatcaccagcttcagtaattattgccaatcttatttaatctaatacctccatttttgtttctggagcattttaaagcaaactccaaacattacatctcagcacctgtaaatccttcagtgtcagagctaacaaaattaacaacaaagtcttatagtgtctcagcccattttcaaagtctgttgattgtctcaaatatgtctttttatagttggtttatttgaatcaagaaacatacaagttatatattattattatgtctaaaaactttagtggtttttttctaataatagccttattgaggtacaattcacataccataaaggtcaccactttaaagtgtacaattcagtggtggttagtatagtcacaaagctgtgcatccatcaccactctctaatcgaagaatattttcatcaccttttctaaaaagaaactctgtacccattaataaccactctctattcttcctcctcccagccgctggcaaccactagtctattttctgtctctgcagtttttttttgaggggcttcttcaagtatttacatatgtctctctccatagatttgcctattctgggcattttatataaacaaaaataaaatatgtggtcttttgtgtcaggcttctttcacttagtatatgttttcaagggttatccatgttgtagcatgtatcgtaacttcatttctttttatggattaataatattgtatgggcatatcatattttgtctattggttggtggacatttggcttgtttcactttggggcaaattatgaataatactgtgaacattaatgcatacattttgtgtggatatattttttaaataatttcagctcttgttttagattcaggggctacatgcgcaggtttgttacatgggtatactgtgtgatgctgagatttggggtatgatggatcctgtcacccaggtagtgagcatagtacccaacagttagtttttctgcttccctcccaccaccctctagtagtcttcagtgtctattgttggcatttttatgatgtgtggacatgttttcatattgaaaatgttgaattgctgggtcaaataactcatatgtttaattttttggagaattgccagactgccaaagcagctggaccattttacactcctacaagcaaggcacaaaagtttccagttttccacattcttgctaataccatttgcttcaatgaataattattattgttatcctagtgagtgtgaaaaggtatctcatcttgatttgtatttctctaattagcatcttttcatatgctttctggccatttgtctatcttctctgcagaaatgtatatttcaagcctttgcccattcttttttactaggattatttctcttctgttgttaaatcataataattatttatacattctggatattggatctgatttgcaaatattttctgccattctgtgggttgtcttttcactttcttgatgatgtcgtttgaaacacaaatgtttttatttttgatgaagtccaccttacctattttttcttttgttgctaaaccattgcctagcctatggttataaaatatttagacctgtgtttccttctaagagttttatagttttagctcttacactttggtctcagatctattttgagctttttaaaaaattattttgcatttggatatccaattatcctaccaccatttgttgcaaataataatttttgtaattttagtagagatggggtttcaccatgttggccaggctggtcttgaactcctgacctcaagtgatccacccacttaggtctcccaaagtgctgggattacagacgtgagataccgcgcccagcctgatcttttaaaatttcttgcagcaaagttttatagttttccatgtacaagtcttgtacttcttttgttaagtttattggtaaatatttttctggtgctattgtaaatggaattgtttttaaatttctttttcgaattgtttgttgctaatgtatacaaatataattaatttttgtgtattgatcttgtaccttacaaccttgccaaactcattttatgtacatactttgtgtgtgtgtgtgtggattccttaggattttttatatacaagatcatgtcatctgcaaatatagttttacttcttccttttcaaactggatgcctttcatttccttttcttgcctacttgccctggcaagactcgcctatacaatttggttagaagtagcaaaagtgggcatccttgtcttgttcctgatctttgagaaagccttcagtcttttgccatcaagtttgttagctgtgagttttttgtagatgccctttgtcaagctaaggaagttctttctcttcctagtttgttgaatgtttttatcattaatggatattggaacttgtcaagtactttgtctgcttctaatgaaatgaccatgtgatgtctttctttactctgttaatttggtgtattacactgattgagttttgtgtgttggaccgaccttgcattctgtgattaatcccacttggtccagttatataatccttcttatatgtttctggatttggtttaccagtattttgttaaggatttttgtgtctgtattcataaggagtattgatctatagttttcttatgatatctttatctgatttggtctcaaggtaatattagtgtcatagaatgagttcggaagttctctcttctaatttttggaatagtctgtcaaggattggtgtcaattccttaaatgactggtagattttaacaacgagactatctggtcctggcctcctctgtatgctatttttttattattattactaattcaggatctttacttgtaggtctgttcagatttcctatttcttcttatgtcagttttggtagtttgtgtctaagaaattgtccattttgtctagattatctaatatgttgacatacagttgtccgtagtattcccttataatccttgtttctgtaatgtcaatactactgtcccctctttcattcccgattttagtaatttgaatcttctcccttttctactgatcagtctagctaaatgtcagtattgttaatcttgtcaaagagccaactttggattttattgatttttctcagtagttgtttttgctttttaatttatttctgatctaatctttattatttccttcctcctagggctttctacttatatacatgtatgttggttgcccttgatgaagccaactgtgaaatcatggaattataatatgctagctaggagagtgatctaggccagtgcttctcaaactttaatgcacatacagattgcttggggatctagttaaagtgcaaaacctgattcagtggtagtgttgaagtctacagcttcccttgtctaaaagctttcctggttatgccagtgttgatgttctgagaccagagagtagaaaggatctagttcatttggtatcaatcatttgtgggattttccaaacagaacatgtcatttctctggttccaggtatattaatatgtctctccctttgagaatcagtgctgctatatgtcattatgactattatgaatgtgcatggtttccaagggaaaaaactgaacaagcccaaccctctcattttactgatgaggaaattgaagcttcaaaggggtgagatttcttgcctgaagtcatataataggttaattggctccatggatgagtatattaatcctttctgatgacaagtcctaactcagtgaagttcatcattgattatactgttaccaagaaaaggtagcaatgaggacaagtaaatttatggttaatttttttttttttttcgagatggagttttgctgttgtcgcccaggctggatggagtgcaatggcacaatcttggctcactgcagtttctgcctgccgggttcaagtgattctcctgcctcagcctcctgagtagctgggattacaggtgcctggcaccacacccagctaacttttgtacttttagtagagatggggcttccccatgttggccaggctggtctcgaactcctgacctcaggtaatccacctgcctcggcctcccaaagtgctgggattacaggtgtgagccaccaagcctggctggttaatttttttgactaacccctttaacagatttcaatccagagaaaatgttacttaagtaaattttcttattattgagtagaaatatgatacctgagacgccattaagaatagatagatatagttatggatatagatatatagatattctaagggtcctaagactctattataatttttttttttttttgtaaatgaggatagaataaaagttcatgattgtctcatacaaataagtgtcatcaggctaactaaatggtgttttattacaaggtctttttcagtactttcacttctttctttcacaattaaggactcattttctgtccagttttatacgctaaggtctttttagtactttcacttctttctttcacaatcaaggactcattttctgtccagttttatactctaagaacaattattgcaaaagttcaaaatagatttatttaaaattattgttcttcagtcattcccaacatagagtaagcttttctttctatatgtttctgttagtttgttgtttttaatctcatattaaagcttttttttttttctttttttcttgagacgggggtatcactctatctcccaggctggaatgcagtggtgtgatcttggctcactgcaacctccgcttcccgggttgaagcgattctcctgcctcagtctccctagtagctgggattacaggcgcctgccaccatgcccagctaatttttgtatttttagtaaagacgaggtttcactgtgttggctaggctggtctcaaacttttgacctcagatgatcctccctgagccaccgcgtgagccaccagcgtgagccactgcgcccagccaaaagcttttacacatctttgaaaagtcttctgtgtgataaccattttgtttcttatataagataaaagctttaatctgttagataataagaaaattctgaagaataactatgattgtgctacatattaatatcaattattctctgccaagaattgcatataacatacttaatactaatattaaatatatctttcttttccttcaattatttagaaaacatttcaagattttgctgtatgaacattagtcattgcattataagaagataaaatggcaccttggtgacatgatttgttttcagaacaatatgactcactgtcactgttagctatatgacttcagatcacttttatcatcactattaactaaatgagctacatgactctgtaaagtttattaaaatacccttatatggaaattagcagtcttgaagagatacagtgaagaatcacatgctttttgaaagaacattgaggtcgggtacggtggctcatgcctgtaatcccagcactttgggacactgaggcgggcggatcacgaggtcaggagatcaagaccatcctggctaacacagtgaaactccgtatctactaaaaatacaaaaagttagccgggcgtggcagcaggtgcctgtagtcccagctactcaggaggctgaggcaggagaatggcgtgaacctgggaggcggaacttgcagtgagctgagatcacgcctctgcactccatcccgggtgacagagcgagattctgtctcgaaaaaaaaaaaaaggaaaaaaagaacattgatttgagaaccagtcaacataatgtattattttaactatagtcacttccacatgatttctttagtccagtgctcttgctgtattccccaccaatgtgatctgcaccatcgtccatctaatcgccaaaactacaaatagggaagttactctccattctccttgactatgtccagatagtcaagctatgaaatgctaacgttctaccccagaatgtctctccatgctgactccctcttctccatacagccccactgctctagttctaccctttattatttattttcctctgccattgcagtagacccttacttgcccctcagctttgagttcatgcacccttccaatcatcttccaaaaggatgcaagaatggcttctctaaaattcaaatttgtgacatcacatcccacgttaaagtcttcactgactttaaggtgaaatctgtactccttaaacaaggtccttagcagtctgcccttgtctctttctcttgtctcatctctaatacttaaacccctggcattttttcagtgttgtttttcttctgtgtatgttatgttcttccatacttctgtacctttacctaagctattccttccatcctgttcccttcacatctctactgctaccccttccttacgtgactcctttctttttatcctttaagattgaactcaaaagtctcatcctctgaggatttatagaaacacacggggcccctaaaattgaaggaaaaatagggagccaggtcagatacctttctcctatgcatattcccctggtatcctgtatataccattgttggagttcttactgcagtgtagttgcagtacttctcagtcttctccacagaagtgcacccaatgtcagaggaaattgtattatgcttacagcctgcctgaaaccctaaattaatgacatcaattatcttagttttaagaaatgtagaaaactaacatttccatagaataggtttatgtcatttaacaaaaaaaaaatttttttaattagctgggcatggcgacccatgcctgtaatctcattactttgggaggctgaggtgagaggatcacttgatcttaggagtttgggaccagctgggcaacatagggagaccctgtctctacaaaaaataaaaaaaaaattagccgggcatggttgcacacacctgtttattatcccaggtactcaggaggctgagatgggagaatcacttgagcctgggagattgggactacagtgagttgtgatcgtgccactgcactccagcctgggtgatagagcaagatcctgcctcaaaaatcaaaacaaaacaaatggaacatttaaaattatttgttctgggccgggcgcggtggttcatgcctgtaatcccagcactttgggaggccgaggcaggtggatcacctgaggtcaggagtttgagaccagcctgaccaatatggtgagaccctgtctctactaaaaatacaaaactagccgcacgtggtggcacatgcctgtaatcccagatacttgggaggctgagacaggaaaatcacttgaacccaggaagacgaggttgcagtgagccaagatcgcgccattgcactccagcctgggcaacaagagtgaaactccatctgaaaaattaaaaaattaaaataaaataaaatatttgtcctggaataaaattgatctttgttaaatatgattatgtttatcctgaaatttcaggtgtttgctgtacactgccctatttgttctctataagtttgtattaaccaactgcgataaatagtaagcactttgatggcagggactaagtctattattacctctgtatttctagcattaaaacaatatctaacacatagtagatgttcaatatgtattgaaaaaaataattgcatgaaagttctctattggaatgatagtgttaaatgccagtgttgtgaacattttaaaattttaaatcatttttctcataggaaaagcttgactgatgatatcatgaaagtcatgcatgttttaaaatggctttctggcttatacaatataacagaatctttttttactttatatagttaaaagtacaaaatacacagaaaagaatcctatattataagtattcagctcagtacaatgttacacacacaacatgcttgcataataaacacccataccaacaaacagaaattcacctgccctcagaagcccctccatactctgtcaggtcattgcagccctttttaacaggataggttagttttgcaaaatcattttacacttgaatagtatttaagacaagtaatgttgaatagaaaatattctgtgacaaatcaggttaatgatttaatattcattattagcagccaacattatttgtaggccaggtgtagtggcttatacctttaatcccagcacttcgggaggccaacatgggaggatggcttgaggccaggagttcaagaccagtttgagcaacatagcaagactaaatagccatacttttgtatactattcagcacaaaaatgttaataataagaattaaataatactcattttagcttttgtgttcatttacaatgagcaatatattctttttaaaatttttgatgtgtaataattatacatatttagggatacagactgacattttggctcatgtatacaatgtaatgatcaaatcagggtaattagcatatctcttgcctcaaacacttatttattaattttgggaatattcaaaatcctctcttctagctatttgaaaatataaaaaaaaaaaaattattgccaggcgtggtggctcacacctgtaatcccagcacttgtgggaggccgaggcaggtagatcacgaggtcaggagatcaagaccatcctggttaacacagtggaaccccatctctactaaaaatacaaaaaattagcccagcgtggtgtgggtgcctgtagtcccagctactcgggaggccgaggcaggagaatgacatgaacccgggaggcggagcttgcagtgagccgagatcgtgccactgcactccagcctgggcgacagcaagactctgtctcaaaaaaaaaaaagaaaattattgactatagtcaccatacaatgctacagaacactagaacttactcatcttatctagttgtagctttgcatctgttaaccaacctctccctatcttcccctcctccatactcttttcattttctaataatcacaattctactctctacttctatgagctcaacttttttagcttccacatatgagtgagaacatgtggtatttatctttctgtcccagacttatttcacttaacataatgtcctttaggctcatccatgttgccatgaatcataggatttcattctttttatggctgaatttgtgtgtgtgtgtgtatgtgtgtgtgtgtgtgtgtgtgtgtgtgtataccacatttctttattcatgttgatgacacttaggttgatttcatatcttggttattgtgaatagtgctgaattaaacatgggaatgcagctatctctttgttatatcgatttcctttcctttggataaatatctggtagtgggattgctgaatcatatggtagttctacttttagttttttgaggaacctccgtacagttttccataaaggctatactaattgacattcccaccaacagtgtataagaattcccttttttctgcatccacaccagcattttttattttttgtcttgttagtaatagccattctgagtgaattgttacttttaagctcttatctctaacaatcaaattactataacagatttttgtttcactttcatttgtttagattagtagttctcaatgtggaaggacctgatttaatctcccaaagaatatttggcagtgtctggagacatttttggttgtcttaacccaccaaaaacagttgtcagtgctactgacatctagtgttacccactactgggttgctgtgaaaattagttttcagaacagagccccataaaaatgaattatctagcttaaaatgtcaacagtgccaaggttgagagtagtgttttttaaagaatgggtaggttgtttatgtttgatggaagttagtttaaatagattgtagcaccttactaatggagtccatgatatcagaaatttaattcccatagacgctagttaacctgtctgtagttcatgcactccagacctcagccagatgtcttaaacatttctgctgcagattataagaagaacaagatgagaaaatgtagatgggttggtataaatctatcactacttctggaaaaatgtctcaatatgatattttttacttaacccaagtctatctctcaccacatgactagttctcactacgttggaatcagcttgtaaactttgactagcagcattgtttaatcttgttataagttcctgaattaatggtctacaggcttgaggcagagtgaatgcctcaaagttatgggcaggcagttatctagtaccaaccatagtctcctgccatctattgggaggtgtcaggtgggaaggctagtagccctctacacatattcatacccacaccccagctctattttttttttttgagtaattataggaggtcagaaacactagaatgtacatacatgctggtaataaatggaaattaatatctgatagttttcttcatggctgtctttcagggcatagttttccatgtattttgctgtcctcttgtgagaatactacccttgacaagttgatctacatttaagctatggccacatttaaactatggccctaaaacatttgttgttatgcaagaaagaattaatggtgatatataccaattctgactctcacataaagtgtttctccaaaagtaacctcagacaacataacaacaaaccaagatttatatagttggaattgcaaatccgtaagtccttaaacttaatgagaagattaatttggaatttgaccatttgactctgctcatttaactttgaaagcagatataaataaaaaccttgtatgaagaaaattgcttgggataatttgcattaaacagtctgttttttgctaagtggcttatttgtattatggaagcatagccttattagtatttttagtcttcctaagaagaaatggaatacatcatagagctctaggccttctttagttttcagtacaaatttggtatatttggtgtttgggaggatatacatggcataaggtaaagagagcattagctttcacgtcagatccaggtccagattctgccacttataaactgttacaccttggaccacctagctattatgggcctgctttagcaccggaaagaagggagaatacctaaatatgatgagagaataagtaggtaaaataatcatgtaaaagaatggtcaggaggagtctggcctctggctctgtcatttattattgtctgtgcccatgggccggctgcaactatttgattgacctaaaatgggatggtgacttgcccgaggtcatacagtgagtcagggcagagcagctgaagctttactctctaagtctcattttccttccctgtaaaattgttgtattggtgactgtctcacagcatgttgtaaggagagatggagatcataattgtaagaggtagcccacagtgctggcacagtgtaagcaccaataaatgaaggtaatgagtacaataaaatgtgtcacttagcccctttccccaaatagtttatccatctggttgatgagagccatacactgtatgctaagacttaaaaatgtgggagttgattaagttctagtactgcattatactaataatgctagtgcatagtttaaagaataataaaataccataatgcaaagtttgtttaagccctttaccctttttttcctacattggggctttatttttagagcacttcacaaattatgcagagaaaagaggggtaggcaagaatggaagcagagagagcagtgtgaaggtagtacagtagggagttatgacagatgcttaggttagggtgatagcagaggtggtggtgagactattaaaagactactcagccaggcatggtggctcacgcgtattatcccaacactctgggaggtcgaagtgggaatatcgcttcagctcaagagctcaagaccagcctgggcaacaaagtgagaccatgtctctacagaaaatacaaaaattagccagtgtgatggcgtgcgcctatagttccagctacttgggaggcagagacagaagggttacttgagcccagaaggttgaggctacagtgagctatgatcatgccactgcattccagtttgggcaacagagcaagaccctgtctcaaagaaaaaaagaaagaaaagactactcaaggcttgagatttgataaaatagttcattttactgcttcattgaggatattcttaaaggaaactggcattttttttcacagtgagtacatggtggagaagaatacaactaatactgaattttaaaatgtgctatttctagtaaccagccttcatcttcttcccctttggctgcagatcctaattatctcatggctaatgaacgcatgaacctcatgaacatggccaagctgagtatcaagggcttgattgaatcagctctgaacctggggaggactcttgactctgactatgcacctctccagcaattctttgtggtgatggagcactgtctgaaacatggcttgaaaggtaggccatcaccccaaaatgcaaatatgcatgcagctgttttctagcaatgcatactatagaagaaagcattctttgtggagccaaagaataagaggcttgaattaataatattaatccattggaatgcagtcttttataggagcagggttatggttgactcaatggacttatagggctttaaaaatacagatcattaaatgttacagttggaggggccattataagtaatcaagtacagtacagtagttctgtttgacaggtggaaataggcctgcccagaatgagacatgacttggtcaaggtcacacattgagttgtggcagagtaggtgctagaactcaggtctcccgactcttgggtcagtgttctttccacttaactataagcttttgagggcagtaactggtcttgttcacccttgtttcctttcttcttgccttctcaatattcttttcttgttgttttttgtttgattgttttttttaaatctgtatgcctatgcttaccaacttcccaatattccatagcctatttctggattacatattcttttctattgagctgttttcttcattaataccacacaattttaggcactaaattgttaaaatgttttattatattatagggctaggccacaaactgtttgtgaaagaagaagggctgagtcttgggaagtagagaatttttttattttcacaaaatattatctattctaaaagcatgaatgaatccaaaaccatcttataacctaggattggtttcctgaaaagttgtgtgtgtatgtgtgtgtgtattgagagtgcgcttatgttgtaaagaatattaaaatactgctttatttttgttgccttagctaaaaaaacttttctcggacaaaataaatccttctgggggcctctagaactggtagaaaagcttgttccagaagccgcagagataacagcaagtgttaaagatcttccaggacttaagtaagtctaaggttgaattccatttctcaggaacagcattcttattaactatcccttgaagagcaagactaaagacaattatgtacgaataatttattttataacaatccaaaatgcatgatgtcatgaataggtgctgacaggagagaattggtatacagaatattgagaaaaatgtgctcttgagggataattattcatctaagagagattgtctttttgttgaaatgccaaacatttgcttattttttaaagcacttgggagaatcatatctaagggggtggcatgctgtacttgacttagggaaaaaaggtattcagtgggtttgagagtcaagattaaaacagctgtcaaattaacctgaagagctagtgactgtagcctgccttagaactataaagtagtgaccaccttcccaaatgagactggtttaattttaatcagacagaggcctagattgcctgtgtccacattcatgctttggacatttatataatccacactgaatttataaggatttgctattattgatctgatggaacatttttagttgggtctcccagaggctgtgtcttcaaattgtagttacattcagtaattctttttgaaagcatttgttccgggtcacattagcccacacacaaaaattccttgcatgggaatgtactgggagaggtcctgaggagcacctcagtgtgcttgttacactggaataccattagcaagaataagtgaactgattctactgtagcctttgcttctggtgcttatgttttcagttgtttgatttctgtgtttttgtaggacaccagtaggtagaggaagagcctggcttcgtttggcattaatgcaaaagaaactttcagaatatatgaaagctttgatcaataagaaagaacttctcaggtatgaacaccttcttgaactttcttctttccttggtatgttctacatcgtataaagtcaaaccatataagttcactatttttgtagatcagaaacatttgattcataacagcttcactgatactttctctcatacctcacacacatatcctcccaaatggatgatttatgttatgtgtgttctgtctgtcactgtggcatatattggtcctttccaaggcaggccaagacttacctctagaaaacagaaggcaccttagcatgtgcccaggctcaataagacaagaacttgacatgtagcattaaattcaaatatagcacaaaattggacgggtgcagtggttcacgcctgtaatcccagcatttcgggaggccaaggtgggcagaccacttgaggccaggagtctgagaccagcctggtcaatatgtcgaaaccctatctctactaaaaaaatataaaaattagccgggcgtggcggtggacacctgtaatcccagctacttgggcggctgaggcacgagaatcgcttggacctgggaagtagaagctgcagtgatccgagagcgtgccaccactcttcagcccgggcgacagagtgagactctgtctcaaaaaaaaaaaaaaaaaatgtgtatatatatatatatatttgtaaaatcacaaaatcttccagtagatcatagatacaactgggagaggcaaaacaacattattttatccgtctttattatatgattccattgtataaaggtcaaaactaggtaaaatcaatctatggtgatagaaatcaggataatagttaccttgaagaggtgggggtagagattggaagagagaaagaatccgatttctaggatttcagtactgttctctttcctgatcatgatagtgattacacagatagatgtgttttttgtgaaagttcatggaactaacagttagctgagatttggaaatgtgtgaatgttggaattcagccatattccacttctgaacagttcataaggttaggcttttgggacaataaactgtcaaagaaccttgttcattccagttctactcagtttccttcagaggctatcaaagaacaaaaatagcatgtgatcagtttttgagagaaacagtaaatttgcagctcattcacttgctgtttttgtgctattttgtcatttgttaatatcttttttttttttttttgagacagagtctcactctgtcaccaggctgtaggctgtagtgcagtggcgctatctccactcactgccacctccgcctcccgggttcaagcgattctcctgccacagcctcctgagtagctgggactacaggcgcacaccaccacacccagctaatttttgtatttttagtagagacggggtttcaccgtgttggccaggatggtctcgatctcttgatctcgtgatccacccaccttggcctcccaaagtgctgggattacaggcgtgagcccagcctattaatatcttttatagtgaatcagaaaagaaataaggaactaatatcagtgaattatattgattgttaacagtgattgaggttgacctttacccccaggtaacttgttgaaaacaaattgattgcagtgttgttttaatcatgatgtcaaattgactgaaaatgaataattcaggtcactgggttttcgtgttttgttttgttttgctttaagagactcgcgctctgtcacccaggttggagtgcagtggtgcaatcacggctcactgcagcttccacctcccaggttcaatcgattctcctgcctcagcctcccgagtagatgggactataggcatgcaccaccacacctggctaatttttgtatttttagtacagacagggtttcaccacgttggccaggctggtcttcaactcctgacctcaagtgatccacctgcctcagcctcccaaagtgtggggtttacaggcgtgagccaccgcacccgcctgtttccatttttttaaaaaatctaaaagactattttttagagtggttttaaatttatagcaatattgagtagaaggtacagatatttttcatacatacccttcccccctgtacaacctccctcattatcaacatcccacaggagtggtacatttgttacaattgatgaacctacattgacacatcattatctcccaaagttcatagttcacattaaggtttactcttggtattgtatgttttatggattttgacagatgtataatgatatgtatccatatgtcattatagtaccatacaaaatagtttcatggccctaaaaaatcctctgtgctccacctattcatctctctgtcctccaacccctaataaccactgatcgtactgtgattgtactgttgttaccaggggtttactgtctctgtggtttttccttttccagaatgtcatgtagtgggaatcatagagtatatggccttttcagactggcacctttcacttagtaatatgcatttaagtttcctctgtggcttgatagctccctttttttttgttctttgagacagagtttcactcttgttgcccaggctggagtgcagtggcacgatctcagctcaccgcaatctccgcctcccaggttcaagtgattgtcctgcctcagcctcctgagtagctgggattacaggcgtgtgccaccatgcccggctaattttgtattttttttttttttttttttttttttttttagtagagacagggtttctacatgttggtcaggctggtctcgaacttccgacctcaggtgatccacccgccttgacctcccaaagtgctgggattgcaggcgtgagccactgcgcctggcgatagctccctttttttagtgctaagtcatatgccattgtccattcatttactgaaggacatcttggttgctcccaaattttggcaattaagagtaaaactgctataaacacatgtatgcaggtttttgtgtggacgtaagtttttaactcagttgggtaaataccaaggaatgcaatagttagatcatatgaattacatcactggtttttttgtgtgtgtattagtaatttaggtgcattataagcagtatttaattatctatgggtcttcacgaatttttttttttgagacagagtgttgctctgtcacccaggctggagtgcagtggcacaatctcagctcactgcaacctccgcctcctgtgttcaagcgattctcctgcctcagcctcctgagtagctgggattacaggtgtgcaccaccacacccagctaatttttgtatttttagtagagatggggtttcaccatgttggccaggctggtcttgaactcctgacctcaagtgatccacccgcctcggcctcccaaagtgctgggattacaagcgtgagccaccgtgcccagccaataatttttatccattcagatttttttttgtttttagtagagatggggtcttactatgttgctcactctggtctcaaagtcctgggctcaagcagtcctcccgccttggtctccccaagtgctgggattacaggtgcgaaccaccatgccgagctaccaaacaaatgttttaagatgcataaaagattgcaaaattatctgatggtgcatcacaagtacaaatatgtcagaaaagtctgaatacctgcttcaaccacaatactgttcagtcacgtctttctgccagcctattatttaaagaatctattcatgcgcctattatttttttcttttaaaaaattttttctccagtgccacttgccaacatccacctattattctaaaagtaaaatatttactaaagcctttctttttgtagttttttttttactatttttgtagatggctataatcaaccatgatgactatgattcaaccatgaatcaaccatttttgtccttgtctctggatttttgagatttttgttacaataaggaattctgtggatttctcttacagtgaattctacgaacccaatgccctcatgatggaagaagaaggagccataattgctggtctgttggtgggtctgaatgtcattgatgccaatttctgtatgaaaggagaagacttggactctcaggtatgggaaagagactcattcccatgggtgtcactctgagttctgctatctcagaagtggatttgattaggttataccaaccaaattaggccatattctatgagtcataaacaggatttccttccattttgatgggaatataaaaaaaagattgtttttccttccagtttggctcatttatacgttacgaatgttttttagattcttgtcttggctgtactctctgttaaacatacatatacacacacacacatacacatttacatacacatacatacacacacaaacacaggtatacccagagatattgcaggtttggtttcagatcacaacaataaagcaaatatcataataaagcaagtcacatgcattttttggtttcccagtacatgtaaaagtttgtttatactaggccaggtgcgattgttcacacctgtaatccctgcactttggggcaggagtatcacttgaacccagaagtttgagaccagcctgggcaacatagtgagaccccgtctctacaaaaaataaaaaattagctggttgtgtagctacttgggaggctgaggcaggaggatcacttaagcttgggaagtcgaggctatagttagccataattgtgcattccagcctgggtgacagtgagaccctgtctcaaaataaaactctaaaaaaaattttttaaataaaaagtttgtttgcattatactgtagtctattaagtatgtgatagtgtaagtgtaaaaaataatgtacataccttaacttaaaaatactttattgctaaaaaaatgctaacaatcacctgagccttcagtgagttgtaatctttttgctggtagagggtcttacctcagtgttaatggctgctgactgatcttggcagttgctgaaagttgaggtggctgtggcaatttcttaaaataagacaacaatgaagtttaccacattaattggcttcctttacaaaagatttctctgtagcataccacgctgtttgacagcattttacccacagtagaatttctttcaaaattggagtcagtcctctcaaatcttgctgctgctttatcaactaagtttatgtaatactctagtaaaccatgctgtaaacagatgtgctgtctttgttgtaccctttatttttgttttgtttttgtttttgttttttgttttttagagacagagtcttaatgtgtctcccaggctggaatgcagtggcaccatctcagctcactgcaacctccgcctcctgggctcaagcaatcctcatgcctcatcctcctgagtagctggactacaggcatgcaccaccacacctagctaatttttttatttatagtagagatggggttttgccatattgcccaggctgatctcaaactcatggcctcaagtgatctgcctgccttggcttcccaaagtgctgggattacaggcatgaaccaccatgcccagcccactattccatttataaagcataggcagagtagatttagcatcattcttaagggccctaggattttcagaatggtaaatgagcactggcttcaacttagagtcaccagctgtattagcctctaacaagagagtcagtctgtcctttgcagctttgaagccaggcattgacttctcatctatagctatgaaagtcctagatggcattgtctaatagaaggctgttttgactacagtgaaaatctgttgttgagtgtatccaccttcatcaattatcttaattagatcttctggataacttgctacagcttctattatttacatcagtgcttgctgcttcaacttgtacttttatgttatggagacactttccttaaacctcgtaaaccagtggctgctaacttcaggcttttcctctgcagcttttttacctctcaatctccatagaattcaagagcattagggccttgctctgaattaggtgttggcttaagggaatgttgtggctggtttgatcttctatacagaccactcaaactttattcctgtcagcaataaggctgttttgctttcttgtcattcatttgttcatgagtagcacttaattcccttcaagcacttctcctttgctttcacaacctggctgtttggcccaaaaagcctaccttttggcctgtcttctctttcgacatgccttcttcactgagcttaattttttctggcttttgatttaaaataagaaatgtgcaattcttcctttcacttgaacacttagtggccattgcagggttattaattggcctaatttcagtattgttgtgtcttagggaatagggaggccaaggagaagggagagagatgggggaacggccagtaagtagagcagtgagaacatacacatttatggattgcttgccatcttatatgggcgtagttcatggagccccaaaataattttgatagtaacatcaaagatcactgattacaggttatcatagcagatgtaataataaagaaaaagtttaaagtactgtgagagttaccaaaatgtgaaaccgagacatgaagcgagcacatgctgttggaaaaatggcactaatatacttgcatgacgcagggttgccacaaaccttcaatttgtaaaaaatgcaatatctgtgaagcaaagtgcaataaaatgaggtatgtgtgtgtgtgcgtgtgtgtgtatactaaaatatatgcagttgactcttgaacaacagagtaaggcattccacatggtagaaacatcccacatagaaaattcacctaaaacttttcattccctaaaaacgttaagtactaatagcatacgattaaccagaggccttactagtaacataaacagtcaattaacacatattttgtatattataaatagttatatttatatttattttattttatttttgagacaaagtctcactgtcatccaggccggagtgccgtggagtgaactcagctcagtgcaacctctgcctcccaggcttaattgatccttccacttcagccttcagagtagctgggactataggaacatgctaccacacccagctaatttttttgttttgtggagacagagtttcgctatgttgcctaagctggtcttgaactcctgagctcaagtgatcctcctgcctcggcctcccaaagtgctgggattacaggcatgagccatggcgcctggcctattgtatatttcatatgctgtattcttacaataaagtaagctagagacaagaaaatattataggaaaattataaagatgagaaaatatatttactattcatttaaatgaatggattatcataaaggaaccagatcatcataaaggtcttcacactaaccagattgatgaggaggaggaggaagaggaggcggttggtcttgctgtctcaggagtggcagagatggaggaaaaccttttttttttctgcctggatgacagagtgagactttgtctcagaaataaaataatataatataaatatatattttatattgtgtatatatatagtatataggtggactcgcacaattcaaagtcgtgttgttcaagaatcaactgtacagttgtccttcagtgtccaaaggagattatttccagcacctccatgaataccaacactcacaatgctcaagcccttacagtcagccctctgcgtccttggattttaggacttgctgagaatgagagcgaactgtactaaaggccattaaagcacggtagttaagagtaaaggctctgaagctaactgcctaggtttggattctggcttcctcattttctagctgaatatattttataattacttagtttcttgttgtttcagatttcttgatgtaatgcagttagaacagggcctagtacacattaattgcccaataaataatgttttcactttaattacttctcaccctttctgtatgaaatactatgacaaacttctgttatgttttattctggtaaaataggaagggaagtaagattttttggtgtggattttttttttatttttttatttttattttttttgagacggagttttgctcttgttgcccaggctggagtgcaatggtgagatcctggcttaccgcaacctccacctcctggattcaagcaattctcctgcctcagcctcccgagtagctgggattacaggcatgtgccaccacacccagctaatttttgtatttttagtagagacagggtttctccatgttgttcagtctggtctcgaactcctgacctcaggtgatccacccgcttcggcctcccaaagtgctgggattataggcaagagccactgcgcccggcctttggtgtggatttttaaaaagaaataagctaaataataaaatggcaatcttgaaaaatgaagacgtgtacatcaatgaaagtttggaggaacagacaccaaaatattagcaatggtcatcttcagtggttgggattatgagtgtttaatattacttccccttttttttagctgtattttctgaaacttctacaggggaaatgtgctaatttttaaaaagttatttctaaaaatgaacagggattcagtagcagaatacccgaaataagcaaaagagaaagaaactttagaccttatttatattaagtattctgttgactgtgttagttgtgatctagtcttctagtcttattgacataatcttgattctttacttccaactcttgttaattcttgattaaactgaaagtaaaacagtacatttttaatcgtaaatttctagtaagtgtcatgactgtattactgttttgagtgcctagaaggagacattgtgttatgccttgtaaagaatatctaattttatattaaaacctgaaaattctctctgtaggttggagttatagatttttcaatgtatctcaaggacgggaacagcagtaaaggtactgaagggtacgtacaaagaaaattagatttcttttctcctgatgtagcattttttttcctttggtggtacttaaagtttacaacaatactgttttaacagacgtgctgaaagaatttctgatcatatagctttaataaagtcttgccagaaatatctgactattacgcctacctctaaaccctaaaaggatttttttgtttgtttgtttaatgattttcctgctatgtggttcaggggcaaagaaaatacaaattttctaaaggattccaattctccatgtcttatagtagggtttaaaaacatggtcattttgaccagaggagtcgcattctcagtttgcttaaaattggcaatatgaaatatgcactgtgaggttatgtaaaatattgacattaggggaaactgattgaaggtacatgggaactctgtgctgcgtttatacctcttcttgtatatctaaaattgtgttaaacacttttaaaatattcattatggtacttagtaattagagatcagaagcacatctattctttttataaatttagccattgaaagcataattagtctgatttttaatttttgacattgagctaagattatctcactgttcttttagtaattgtataggtttggggccttaattttatcttacagctgaaaaatctggctgtttatcttttgtctactacagattagttggttgtagacgtgaaccttctttatccacagtttaatttttcatgtaataataaacatttgggccgggcatggtggctcatgcttgtaatcccagcactttgggaggccgaggcaggcagatgacctgaggtcaggagtttgagaccagcctggccaacatggtgaaaccccatctctacaataatacaaaaaaaaaaaaatagccaggcattatggcgggtgcctgtaatcccagctacttgggaggctgaggccggagaattgcttgaacccgggaggtggaggttgcagtgagccgaaatcacaccattgcactccggcctgggtgacaaagcaggactctgcctcaaaaaaaaaaaaaaaaaaaaaaaaaaaaaaatatatatatatatatatatatatataaaataaacattcaatcttcgtgaaaccctttttaaccattcactttaaatgttaaatagcacttacagacaaatatttagcccttgagaacagctatattacatcagagtgagcttaattcaagtcctatgacaattggaaagttgttactataaatactactagtgaagctgaaaaacctattaacaagaaaatttttatcctttaaatgcgtctaatagattgcaacatcatacctgtgacctaaattattaatactgaggtttgtaagctataacaagagctttattagtgaggggttttgtcatttttaaactcctgactctttcttgttgctatgtcaagagggttttacatcaaatctgtcttatggttcagtgtatctgtgccacaatttttttctcatgttttatgaaaagatggggtggggtggggttgggatcttggtatttcttatgttatttattttatttctattttcttccccttcccccagagacggtcagattactgcaattctggaccagaagaactatgtagaagaactgaacagacatttgaagtaaataatgaataaatatattactttactggggaattgttgaaggagaagggaagagtaagatgatgcgcagtgaggataaattcagacagtgttcaacaaatatatgtagaattcctgtttgccaggcactgagttaggcactagataaataaatggcatttaacagttttggtgacctttagtgaaaggcagtatataatgttatatataatatataataacatagtatataatattacgtatgtaattataactctagtgattaaatagataaatacgtaaatacattcagttaagaattttaaaatatgtgacatatacagttgaaattggtagctttttcagtttagtagagatagctgcatatttcagaactgatcttgggtaaaccactcattacattagtacctttaaattaatcatatcgtccaggtgtgctgggccaaagcctgtagtcccaacactttgggaggccaaggcaggaggattgctttagctcaggagttcaagatgagctagggtaacatagcaagaccttgtctctattaaaaaactcaaaactagccgggcatgtgcctgtagtcccagctacttgtggggctgagacaggaggaggatcacttgagcctgggaagctgaggctgcagtgaaccctggtcttgccattacaccccaccctgggttacagagcgagacactgtcttaaacaaaaaaaaaaaaacgaaaaaaaagatacatgctttgttttcctgcatttctcatttatacattgaattaatagcattaatttaatatataaattgaatttctttgccattattacagttaattcaccaagtattcacaaagtacagtagttcccccttatgtggaggggatacattctaagacccccaaaggatatctgaaaccacagatagtaccaaaccctatatatgctatgttttttcctatacatatgtacctatgataaagtttaatttataaattaggcaaggtaggagattagcaacaataataaaataaaacaactttaacaatagactataataaaagtaatgtgaatgtagtgtctccctcaaaatcaacacatccttttattttgttttcattgaacttcttcttcctagttttctcaggtttttttcccccttcagttttctgtatttatatttcttattgtccttaaatgactatggctattctatatctgagcacagtgaataaaacattaaagtttaattaaaaattaaagaggccgggagcagtggctcacgcctataatcccagcactttgggaggccgaggcaggcggatcacaaggtcaggatatggagatcatcctggctaacacggtgaaaccccatctctactaaaaatacaaaaaaaattagccgggcgtggtaccaggcgcctgtagtcccagctgctcgggaggctgaggcaggagaacggcgtgaacccgggaggcagagcttacagtaagccgagatcgcgccactgcactccagcatgggcaaccgagcgagactccgtctcaaaacaaaacaaaacaaaacaaaaattagagaaagaaagcattagaaataccagtttcaagattttgtgcattgagaaatcattatttccaaaagattttctaagggccactgtccttacgacaattcagtgttgtatatatgttcacagtttatttttttatcttaggagaagtaaaaatccttactggataatccttatttatttgtgttttttaaacatactcatacttccctctattgtttgtgtcatagagagcacaaatcagatttggacatcttatgtgggatttaaacaaatacgtttatacatgagtctatcaaaatccttatttacatgtaagaaaaaaatacatgcccagctttgcccaaggaagtcccagagggagaacagtatcttattgtactattcttacctatttttgaaccacagttgagtgcaggtaactgaaaccacagaaaacaaaactatagataagagaggactactgtattttcagaattttccagaacataaaacagtttcctctctcctgagaagagctatccaaaagctattggtattctcaagtactttgatgttcttgttatgttaagactactgaataattttgaagaataattaatatattcattaattatcttgtttgtagttctcttatgaaaaatagacatttttaatttaagtaaaacttataatatgattatactactgtcagtaaaattttaagtagtcttggttccacctagcaaattcaaaacaatttaagtacattttctctggggaccaagaactaatataatgactttaatgaactatggagatgttagccaagcaaagatatggttacagttaacaatgaaatataaacaatggcactattatttactctttctatgccttagtttctttatctgtaaatgagaatacctaacataaagggttgttgaaaggaataaatgcaataacgcaaataacgtaatttagaagagggtttggtgcatgtaagtatttaattcatatagactgttattatcatatgtagataaacaaagtttattctgtagggaatgaactcttttatttcattgaataaatacttactgaattaaaactcaaatgccaaagataatagccttttgtaagcctagaggtcaagatttgtgagcattaaggcctggcgcagtggctcatgcctgtaatcccagcactctgggaggccgaggcaggtgggtcacttgaggtcaacagtttgagacctgcctgggcaacatggtgcaaccccatctccaccaaaaaatacaaaaattagctggatttggtggtgcatgtctgtagtctccagctacttgggagactgaggcaagagaatcacttgaacccaggaggcagaggttgcagggagccgagaatcgcaccactgcactccagtctcagcgacacaacgagactccgtctaaaaataataataataataaaataaaaaattatgaacattagacaatgaaggataagtgtgaagggtttaaaaaggaaggtacagagtattgtctgtttttcaaaagtgacttttttttcttctctatattatagtgctactgtaaacaaccttcaggcaaaagtagatgcattagaaaaatccaacactaaactgacagaggaggtaagttttggaaatgctttgattgacttatagaatttaatatgcattagtagaaccaataattttaatgtaaccttggaaagaaagaacttgacttttcaaataatattgactgtagtacataacttcttattctttttttttttttttttttttttgagatggagtttcgcttttgttgcccaggctggagtgcagtggcgcgatcttggctcaccgcaacctccgtctcccaagttcaagcgatgctcctgcctcagcctcccgagtagctgggattacaggcatacaccaccaccccggctaattttgtatttttttagtagagacggggtttctccatgttagtcaggctggtcttgaactcctgacctcaggtgatccacccgcctcagcctcccaaagtgctgggattacaggcgtgagccacctcgcctggcccataactccttattctgactagaacggcccagttggcttattgcagggatctcatttacccaattagactgtgtaggggcatgttgccaggttgatggagtatcttggtttctttcgtgtgcatgttttgtctgggctagcctagattaaatgtttagcatatagcatattcatcatttattcagtaagcgtttcacacagtttatgtgcaagagctagacaaatatttatatgtgccaggcattgatttatgttccagattggcaaactccccaccacttatgtccttgttttcttcctgggacagttacatagataaggtgaagagtactggtcagaagatcagtaatccctgcctacaaatcatgcttatgtaactcatgtgctcctgagtaagtcagccacttgacctccaagaggctgagttccgtcactggaaaatgagagtgtttacaatacacttccttttcggcctcacaattaactctgaagatcagataagaatatgaaaactcttagaaaagtccctaaaataagaacagaaaaataacctcatgttttacttctaataaaaatattttttccttaacttgccaagccttagctacagatattttttctttaaatagcattagatggttttatgaaaaatactaaataacattgtccagatggcaaagagtttaccttccttatttctttttctttttttttttttttttctgagatagggtatcattctgttgtccaggctggaatgcagtgacacaagggcttactgtaacccccgccccccgggctcaagtgatctcccaccctcagcctcccaagtagctgggatcacaggcacacaccaccacacctggctatttttagtagagagggggtcttgccatgttgcccatgctggtcctgaactgctgagctcaagtgacccgcctgcctcggccttccaaagtgctagaataataggcatagccactgcgcctggcccaccttctttatttctaattgtaatgatgcccttacaccccatgggatgaatttagtttaaataaaatcaaattaaagcactagtcaggaagatgcttttaatcagtttttctttagaatgaacattttcattattatagttttaaaataccttttttattactcaactctgtgaccttcactttcggacaaaaatttttaaattttatatatcttaaaactttatgcttagggtccttagaatcttatcacataggcttttggaatgttcagcacagattttttactgttattctgctgctactatgttgaagcagtacagcatagcaattaagcatgatctctaaagttaggctacttgggttcatgtcctggctctggcacttgctagttttttgtttttttgttttgttttgttttgttttttgttttttgttttttgagacagagtattgctttgtcgcccaggttgaagtgcagtggtgccatcttggctcactttaacctccacctcccggttcaagcaattctcctgcctcagcctccgagtagccgggaccacaggcatgcaccatcacagctggctaatatttgtatttttatagaaacagagtttcaccaggttggccaggctggtcttgagctcccggcctcaggtgatccacccgcctcggcctcccaaagtgctgggattacaggcatgagccgccgtacccagccacttgctagtcttctaatcctgggccaattacttaagcttctattccttgatttatttatctataacatggaaatagcaataataacattttatgagattgctgtgtgaatgaaatgatttaatacatgattagggcttagaacagtacctaacacatcataagcactcaataaatatagttgttaattttattccctcagtcataagacttgtcttccttagagtcatattaatactaacaatatttattcattgacttatttattttaccagtagcacttattttcttaaagaaaatatgctctaagagagtagacgaggctcattagttctgccttttttcatttccattttgggtttaagaaagccagtaaggccaggcacagtggctcatgcctgtaatcccaacacttgggacatcaaggtgggtggatcgcttgaggccaggattccaaaaccagcgtgggcaacatagcaaaaccccatctcacaaaaaaaaaaaaaagggccagtaaaaaagatagcagacctcttttcccctcctgggttttgaatctgaatgacaaactaagaagaattaagcagatgaagatataaatatccacttcaggcctggcacagtgactcacacctgtaatcccagccctttggaagccaaggcaggaggatcgtttgaggccaagagttcaagattaggctgggaaacatagtgagaccccatctctacaccaaaaaaattagccggctgttgtggtgcacacctgtagtcccagctactcggcatgctgaggagggaggattgcttgagcctgggagaccaaggctgcagtagccaagattgtgccaccacactccaacctgggcaacagagggagaccctgtctcaaataaataaatagataaataaatgtctacttcattattggtaaagctgaattggaaagcctcctgtgatctgcagccataatcaggtttcccaatagtttctcttaaatcaagattttggaatgacctgcctgagggcatacttgaatctagagaggagacctacttgcccagaattggtttcgtgcacatttttaggccacaggatctgagagagaattggacttccaggcctgcccccagaaagcatgagcttctctgtgcttaccatgttaggacaggaactgagcagagcctgcacccactgctaatgaggagataataattgaggagactagcctggctgagaggagcctgcttggttattcctctcggcctcatacaggcaccttcacattctccgggagtttagtagatgcagagaagaaaaaagtgtttccaccttactttttccttctaagaaagagatataaatgtttccctgtagcagttgactgctaataacgttacctgatctttttaggtgttgaaatgaaaaatctcctcaatgcttaatgggatcttttagcatgagaactttggagttcatgtctttaatcttttaagaaatcatctataaaagatcttatagagcgtttgtcacatgggttccatggtgtgacaggacccctttattaaacattttagaaatagacattattaataaataatttttttcttactaaatatgtgtacatctataagaacacccttgagataatcttaagttaaaacttttcatataaaagtagcagtaaggtgatattttatttcttttttttttttttttgagaccgagtttcactctcaccaggctggagtgcagtggcgcgatcttgatctcgggtcactgcaacctctggttcaagctattctcctgcctcagcctcccgagtagctgggattacaggcacacaccactacgcccagctaatttttgtatttttagtagagatggggtttcaccatgttggccaggatggtctcgatctcctgacctcgtgatccgctcgcatcagcctcctaaagtgctgggattacaggcatgagccactgcacctggccaaggagatattttttatttttatttagactgctctaaaaatatttcttggtcgggcgcagtggctcatgcctataatcccagcactttgggaggccgaggtgggcagatctcttgaaggcagaagttcaacaccagcctggccaacatggtgaaaccttgtctctactaaaaatacaaaaattagttgggcgtggtggtgcatgcctatagtcccagctacttgggaggctaaggcatgagaatcacttgaaccaggaggcagaggttacagtgacccgagattatgccactgcactccaggctgggcaatagagtgaggccctgtctcagaaaaataaagaaaaatatttctcttgagttcttataagaacatttttattgggttatagcttccttgctttctaagaatatccaagcctgagaattacatcctagcagatcgtgaattatcttatactatgttaattttaaaaagataaaagattatttttaaaattttatccacagcttgcagttgcaaacaacaggatcattaccttacaagaagaaatggaacgagttaaagaggaaagttcctacatactggaatccaatcggaaggttaatcttactggatttataaaatattcactgagagcatatcaacttgttagtggtaaaggggagtctctaaaggactattttaagcagctggcctgtatcaagcacactttttatttagactccatgcataattgtgtgatgaaggttgtgggagggttatgcgcctttttctacaagatgcttcgtggcttcacagccacctacatctgtttagagacttcaagaaacagtctaattcagtttcttgtttttatgtactaatggttcaaacagtatttaataatttgttatgttaaacatactattacttttatagcatgttactgttttgtaagaagtgacaccttatttatatatcactgggaaagagctaccatataaatgtattttctacataacttaattccttaaagtatcaaactttttatacatgtctaattagaattttgtaaacctttatgttttgtacaattccaagccttcttaattaaggacataatttaatacatttagccctttacgatgactgaggatcattaattaccaacattgacaattccctactaaattataatagtgccactttaggaggctattgaaattgatagagcttctgacacctacacttaaatattccccgatttctgtggatggttttttttcctgtcttttacgtattcaatagcatctcttactttttactgatgctcggtgttatctttaggatgatctctactttcttttatcttcatgcttctaatctactctccctaggaattcaaatccatagttattaaaattgttcttaaagagttactaggctctgcgaggggacaaaagcagttttccatgagtaaagtgattgactttaataatgcatggacttcatgactgctcagaataatttttttatgacctgcttgtttttatctgtgatcttgctggatagttgaagataaccagttgcgaattctctggagattgaatgtattaacatttaaacctatagcccctgggctgggtgcagtggctcacgcctgtaatcccagcactttgggaggccaaggaggcagatcacttgaggtcgggagttcgagaccagcctggccaacgtggtgaaaccccgtctctactaaaaatacaaaaattagccgggcgtggtggcgcacgcctataatcccagctactcgggaagctgagacaggagaatcgcttgaacccaggaggtggaggttgcagtgagcagagattgagccactgcagtccagcctgggcgacagagtgagactccgtctcaaaaaagaaaaaaaaaaaacctataacccaactcatattttgaaatgaatgctatgttatttttagaggctgatttttaaaacttctaccatctggtttggaaacctattttaggattttaaataaagtgtcaggaagcccccaattcagcttaacctttaaaaatgtactagacttcaatttctttgttgtgtttgttcattattatacctgcttcagtatgatctttttttcttgctaagtagcagtgttagtgtctaattctgtatagattaaatccttaaatatgtacaatgttatttatcttttcaagggtcccaagcaagacagaactgcagaagggcaagcactaagtgaagcaagaaagcatttaaaagaagagacacaattacgattggtaaactatgcttaatttctaatagttcaggaatatattaaaaggtaactgcccacttagaggttttatcatacagaccaagattaggaatatcagtagtgttctgaaaaattctagatcctataaaatggttcatctctttttaacccacattccttatcatactttctcaatctttttctgagtattctcaacaagattttgttaatctttatttttttgcttttatagtttgtattacaagaatattaagtatacagaacctacttttttaaactatgccgtctcactcctacctaagtcctcatccctgcaaagattcttggaggtggtggctcctcttttctttacaaagaatcattaatgtaggattactctattttatttttagctgttatttctgatttattattggtcttagatataaatggaaaatttatcatccagtattagtcttaagatttttttagaaattaaaaaaaatacatatcaatatatagatagagagtatatcatctcactctaatcagaatggcaactatcaaaaaattgaaggataagtgttgacaaggatgtagagaaagagaacctttacacactgctggtgaaaatataaattagtatagccactatggaaaacatagttgtcttaaaaaattaaaaatcgggccaggcacagtggctcacacctgtaatcccagcactttgggaggctgaggcggatggatcacgtaaggtcgggagttcgagaccagcatgaccagcatggtgaaaccccatctctactaaaaatacaaaaaaaaaaaaatcagccgggcatggtggcatgcacctgtaatcccagctacttgggaggctgaccaggagaattgcttgaacctgggaagcggaggctgcagtgagccaagattgtatcactgcactccatcctaggcaacagagccagactccgtctcaaaaaataaaaaataaattaattaaaaatcagtctagcaaaagatccagcaatcccactactggggatatatccaaaggaaatgaaatcagtatgtcagagagaatctgtactcctatgtttattgcagcactattcacagtagccaagatagggaatcaacctaagtgttcatcaacacttgaatggataaagaaagcatggtatatatacacaatgggatgctattcagcgataaaaaggaatgaaatcctgtcatttgtggcaacatgggtgaacctggaggacattatgtgaagtgtagtaagccaaacacagaaagagaaatgccatatgataacactcatacgtggaatctaaaacgttgttctcataaaagtagagagtaaggtggggttaccagagggagaggaggcaggggatagtaagagattggtcaacaggtacaaagctatagttagataggaggaataagttctggtcctctgttgcatagtgtggggtgactagagttaacaataatacacattttaatatagttagaagaaaggtttttttttttctttttttttattgatgcataatagatatacatagctctggggttcatatgataatttaatatactcatgtagtaaagaccaaatcagtgttcttggtatacccatcaccttaaatatttgtcttttctttatgctggaaaaaaaagaggcttttgaatgttctcatcacaaatgataaatgtttaagatgatagatacattcatttctctgatttggtcattacacaatttttatattatcaaaacatcatgttctataccataaattactatgtgtcagtcatactttttttaaaaagaatttataataagggatactattcctgtactagattttatccaggtgctagtgttattatattaataacccctggtattcacatactaactcttcctggagtttagatagtataacaaacacaaggacctccccagaatgtctttaagaataaggaggagcctgaaaataaggggtgacttaacttgtactaaaaaattattacaggccaagcgccatggctcacacctgtaattccagcactttgggaggatcgcttgagcttaggagtttgagcccagcctgggcaacatagggacaccctatctctacaaaaattacaaaattaaccatgcttgatagtacatgcctgtattcccagctacttgggaagctgaggagggagatcacctgagcccaaggaggttaaggctgcagtgagccaagatcacactgcactccagcctgggtgacaaagtgagaccctgtctcagaaaaaaaaaaaaaaaaaaaatatatatatatatatatatatatataaaaacaaattgacagtatataacataattttagatttatttatttgtttttttttttttttgagatggagtcttgctctgccacccaggctgaagtgcagtggtgtagtctcagctcactgcaacctccgcctcccaggttcaagagattctcctgcctcagcctcctgaatggctggaattacaggcgcctgccaccacacccagctaatttttgtattttagtagagatggggtttcaccatgttggccaggctggtctcaaactcctgaccttgtaattgtgatccgcctgcctcagactcccaaagtgctgggattacaggtgtgagccatcacacccggccagaatttcagattttttgaaaacaaagcgatattattttgacatccttaaaatagttagcatttgccttctatgtatttgtgaatgagatctcaaaatataatacttttcataagaaaggtcgcagaaataatatatgtcagcattttaagaaggggtatgattcgttttctataatgctaatcaagtaaaatgagaatctcagtgaagtggcacataataaaaatcttaaaatttttcatatccttttatcacagtaagacaaatgtttgttaagaaggaaagaaactaagaaagtatttgaggtcctaggtgagcccaaggcacaaggcagatgcagaagatcctcaggtctttgtatcttcgatcacccacataatgttgcagtaataatggttgaaacaaaaagaggtttcatgttaagtgaactaaaaattctgttagcggccgagtgtggtggctcacacctgtaatcccagcactttgggaggctgaggcgggcagatcacgaggtcaggaattcacaccagcctggtcaacatggtgaaaccccgtctctactaaacatacaaaaaattagccaggcatggtggcatgcacccgtagtcccagctactcaggaggctgaggcaggagaatcgcttgaacccgggaggtggaggttgcagtgagccaagactgagcccctgcactccagcctgagcgacagagcgagactctgtctcaaaaaaaaaaaaaaaatctgttcgcctcgtaaccatactagtcatcatcctcagtaattgcgatgttaccccagggacccagatggtcctctgggttccctgggctcttgaatatatcaacaacattcacatttaggaggactgcaactgcttcattttgtgctgactgctgtaaccctgtaggtatatttctataataagatatgaccatcagttgtcgtaatatctactgaagtgtctcaaatatgtatatattttagatgtattaaataacactatctttggcttagcaggtttttcagatttgtacattattgggcaaatgttattgtatatcctaattattattgttaattattaattaattattgttaatgtctctgaaaatgaatggtagcttaagctattttgccagaatattcagacctgagagttttggtgtactttttcctgtgaaatattatggtttgtacttagttgaaggaacagagtgtaagcaatttacttacctttgggggcaggatgttgagaaagaactggagatgcagatcagcatgaggcaggagatggaattggctatgaagatgctggagaaggatgtctgtgagaagcaggatgccctggtatctcttcggcagcagctggatgacctcagagctctcaagcatgaacttgcctttaagctgcaggtaggggaaatatgaggaatagactcactggctctctaaaatcctggggcttccctcctcccatctgatcctccagaatcacactttaattacaagaggaaagaatcacatctcattttgatgctagctgccagtaaactactttcagaatcagacaaccatgggatcctgtattgctgttctagaaaaccatggccacttttcacattatagtagaggatgagggtcttttttatcctatagggtaatttctactctgcagtctaccgtgccagctaagttatatattctattagcttttacactggaatgtgatacattgatgaactattactgtgatcacactgcatataacaatactaactttagataaattgcttttttttccatttcaggattaactgatattgaaatatatgaacatttctgttttcccacttaccattagattcaaaaggcatgtgtggttgtattttaggatttatgttatacaggttgtttatcgttattttccataacagagttcagacttaggagtaaaacagaaaagtgaactaaacagtcgcttggaagagaagactaatcagatggctgctaccattaaacaacttgaacaaaggtaaaagtcctgtttctttaatgaaacactttggattgtcagtgctgaagtgaaaagaatgtgctgtacattcggcaaatagaaaatacatgaaattcttccaaattagcatcagacattctggtagaaaaaagccagttgaatgttatgtgtgttttctaaggtatgactgaaatgtttttaggaaatgtcaatcacttgactagcctttaaaaaaaaaaaagaaaggtcagccttttatgactgttttgaacatcagaactcttaatccatgtcagagtcatgtgttagaggaaggatacttaaaagcatggaaggactcttaaatgtatgtatgtaattctgtgattttattgttcatcactgaagtctttgaatacttggatgctaggggatatagaggcactgagagataggtgtcctccaaggatctattctggatctttctctcccttctttaacccttttctcttatctcccttttctttctcctgggtagttctgtagcttccactgtcacctccagtgtgttttcccagctcttaccttcatctggagaccagtcttgagttttcatcctttgggcagctatcttccaccagtatctacaattcagtctgcccaaagcacatcttcttcctatgctactctctttctgtgcttatgtgaaaccaccattttctctctggcaacttagcagccaagagaaatggctgagtcttcaaggatgaatgtgacgtggtacccaaggtcatttgatgtttctacccttaacacctgtttgtcacccttcttgcacttgagcaaaactaaactgctggtccctgtacttcccatttttcccatttatttctttcccaatagttccaccaattagaaatgtcctaattcttcccactcccttattcgtcagatacatttttaagtttaggctcaaatgccacctccccagagtttcctctgatacctctttgcagctagaaatgatctgtctttctgggaactcccatagcttcatactcatatctatctatactgcttatggcacttctcactgtctactgtaccttttaactctttatatatgtctcctccgatgcgagtgtaagctccctgagattagttaacgaatcttttaagttcccgtattagatctgtcgcagtgccttgaatatacaagcattcattcagtagatatatgaatgaatggattaatgggtgatttcttatattcagatgattcttaaccagtaagggtcctgaacagcagtgcatattaatgttaactcaaaacttaatggcaaatttataaataaacctgaaacctcttacatagccaaatacaaatgtatcagtctacctaggaaagatggttaggtacttgctcataaacagttatatgtttatgatttaacaaaatgattttactgttcataaattgtgcttttgaaatgaaatgtatcaaatttcttttcaatgatgttttgacttggaatttaaagcaaacagaaagagaataatgacttatctctttgagtattaagctgacttattctcttgctatttttgtgtttcctgtttatccattttctcattctcctttcacttcattgtcatttttattttatttagtgaaaaggatttggtgaaacaggcaaagaccttaaatagtgcagcaaataaactgatcccaaaacatcattaggcatttttaagttggtcacgtcgcaagtccgatatcacaacttaattgtaaaaggaagaaatctgaaagttactacatttaagctctgattctatataaaatgtcaccaaaaagttgactttgaatttgttggacttttaaaaaaccagttggaaatataggttgggtttttttcttattgttttctccccagggttagaaaaattggtataagttcctaattaaaagctgaataaactttgagaaattatttctgagttgaccaataaataaaaataccactttctttaaaaaagcctagggaattgaagctctgtacatatactaatgatgcctttacaacccagtccttgataataccagattctcggtgcattgttcatgtctgtatctgcaagcctgttctgccattgcagtgtgatgaacctagaggtaactaccatgtgaacttgaactcttctaaaatagttctgtgtctcttagaccatgaccccttttcacttttgttatataggtttaatccccaagccaaggatagtacttagtatttcactacacttctattctcagtaaccaagattgcttgcaactttttttgccttggtgacttttgaaaaaaaaagaaaagaaaaagcagcatccttatatttctttaaaatacatagaaataaagttagtaattaggtaacctatgataacataataatgtggacgcctggggaaaccctcctcatgtttgtcatcttctacctctgccgttttcctgcaattccgcttcctacttaggcagttcagagagaacaattctaataaaaacactcctctcctattaacaaaaaatgatgcagtacccatttttcgtatcctgcttttcttatattggagtaaaaaggacagggtatagacatgaatgatgatattctgcctggcctgtcatttcttacctggaaacatttacttaagagtttctgttactttttgttcagatggggatttgctaaaggttctgggaagctaataattgaattattagaaaaacatttcagaataggaagtaaatgataaacttatattctttattattatttagtacaaaaatagattcccagtagatatccacaagcaatattagcagggcttctgtttctaagtgaccacagactaaccctttctaggctttaacattgtaaataatcctataaacagtttgattttttaagatgatttttgatttgaagagacaggctttacataagccttcattccttcaaaaggtcctgacaaaatacttgggtttttttctctttttttcattctggtatgctttgcagcatttcagctgctttggtggggacacagataaccccttcgcttccagctcttaaaattctttatctttttcttggcaaaaccagaattaagagtgtaagatagattccatgtgtgcttatataggtccctgcacagattggacttgaaccaaaattaagtccaaagaacatatgtttagaccaacttcatggaagtggaagatcctgtgctcttgaacttattttaattcttataatttgcacctatataaacaaagctcctactgtattcttctcttcatcaaccttttgtggtgatgggttgccttttctacgagcatttggaaggagtgatcaaataccgaaattgaactttctaaaacctacacatagcatgcgtttaaattctattatataaagccccaagtgctttaccttctaaaacatgcttctctataggtgcaaagttataagatatgtagaagaaaacatccatcagaatcttctggagaatatggtcagagtcttaaacaggcccagtgctgagttctttgtccacttagtcacacatcttttgtgggaatgggaaaggaaggagacagccaaactctgacaaaggcttttccttatagaataacccaaagcctaggtgagggttgatatataatgtcccatgatttaatatatgtggtttgggggaaaggacaagaaaaaactataattccacatataagaaggtagttgcccatttacaagttccagttatgtgtgtaaaacagaaaaattaagtaccaaacctattaggaaatttttttaaaaagtggatttaacttaaattactgtgtacttgaggttggctttggatatggattttctaaaaagtgatgttttattgtttatcatctaatggctgtaaactgtagtactagaataaaaaaaatggaaaatcagcttttcctctgcctggttcaccttcatcttacttttctttagaatttgtttcttctccatcttttcccccccataatttcttcacctgtgtcctgcaaagtttttttcctctctctgtctctctgtgcattcttccttgggttattttattttgtgttgtgaacttggtcttcttccccaccatggcttttgttttttatcacaagttcatgtggctcacatccagattgcgccaggctgagcgaagccgccaatctgctgagttggacaaccggctcttcaaacaggactttggagacaagatcaacagtctgcagctggaagtcgaggagctcaccaggcagcggtgaagagggggtagcttgagctgacagggtggtcatgggtaattcttagggtagacagcaagaaaaggggtctcatgacttccagccaggttggctctgtctttgcaatgtcctttctctggaattggaattcagaaagcttcacgtacttcaacattccccaaatccgatcaacatgctttgtgatcaaagaattaggaaattagagcccaagatcccagataaatagtaattattagccaaaataacactaataataatatgtaatatttcctgaattcttactgtgtgccagatactttaggcacttcacatgcaaactctcctaatatcttcatatcaaccctattagtgatattattgcctccactttcagattaaagtagagcttaaggctgggcgcagtggttcatgcctgtaatcccagcactttgggaggccaaggcaggtgtatcacctgaggtcaggagttccagaccagcctggccaagatggtgaaaccccatctctactaaaaatacaaaaatttgccagacatagtggtgggtgccagtaatcccagctactcgggaggctgaggcaggagaattgcttgaacctaggaaatggaggttacggtgacctgagatcatgccactgcactccagcctggcaacagaacaagactccatctcaaaaaaaggtagagattagacaggttaaatgtgtccagattcacacagttaagcttagaagtagcaacattatcatttaaaaacctgtctctctgacagcaagcccttaaccattcgtaattactgcactttaagacaaggggttggcattctttagagaatatgtctgtatagaattccaatttttcatccttttcctctccaacttacctcaggaaccagcttgagttagaactaaaacaggaaaaagaaagaagattacaaaacgacaggagcatcccaggaaggggttcccagaagtcagaatccaagatggtaatatttgctattcccttgttcttttacttaatttcagtttaaattttagaggctaccttgatagtcctgtcagttttcctttacagatcacatacttagtggctgtgtcctcaagtatgtagatagcaaactagtaattatgtgaacaaatgaaagcttgattctgagtctgcctctaggatactttctccaacttgatttcatttggaaagggggattttaataatcacagtgaccctatttcccttttaataattttttaagtaagattattttggtgtcttaacaaaaatatatgtttcttggatttctgctaaataataattttaataaaatagtataataatccctctccaaccctgaattcccctttaacagaattttcctcaatgtggatttgcttctgtatacctttttcaaatcatgaggatttcattttgagtatccttaaggaacttctcgtgggaataattagggaattaggcttgaggaaaggaaggtaatacagaataaagagcaaaagtagaaatttctacataataatcttagaaggagacccctccagcacctccagtgatgaaggagctacaattgggtaagatcatctctggggcccaggaaataatgaaatcagaaaaacataaaataactttttctgtaaaagacagtgaaaaaattgccttctgtgtgtacatattatacaaggcgacttcaaaaagatcatgggaaatggaattaaaaggtaaagatatataaactttatttctcaacctaagttccatcaagttcaagagactttagtaagtgatgatactagtcatgtaggccatccctgaagaactgagggtcctaggaatttaatcatatcaatacaatcttttttacattattaactgaagaaaaattggtgcactttaatgatgttttaagattaggaaacaaaaagaaatcagaggcaccaaatcaggactgtaaagtggatgcctaatgatttcccatcataactctcacagaattgccattgtctgatgagaggaatgagttaggagcatatttctggtggaatagcactctctgttgaagctttcctgggcatttttgtgctaaaactttggctaactttctcaaaacattcatcacaagtattagccaggtgtggtggcacatgcctctagtctctagtcccagctacttgggaggctgaggcatgagaatcacttgaacctgggaggtagaggttgcagtgagccaagatcacaccactgcactccagcctgggtgacagagcaacactctgtccccaaaaataaaaaaaattaaaaacactctcacaataagcagatgttggcattctctggccttccagaaagtcaacaagcaaaatgccttcagcatccctaaaaactgttgccatgacctttgcttttgacccgtctgcttttgctttgattgcaccacttccacctcttcatagccattgctttgattgtgctttgtcttcaggattgtactatgaagttgttacatctcctgttacaatttctcaaacaaatgcttcaggttcttgatcccacttgtttataatttccattgaaagctatacttttgtctgcagctgatacgggcacaacagttttggcacccatcaagtagaaagtttactcaactttaatttttcaaccagaattgtataagcctaaccaattgagatatctgtggtgttggctattgtttctactgttaattgttggtcctcttcaattagagcatgaacaagatcctcacaaattgatgtggatagtctgctactgcaggcttcatcttcaacatcatctggccccttcttaaagtgagttatccttttgtaaactgcccacttctttggggacaatcctaaagcattgtccccaaaagctttttgtaaagcatcaataatttcacaattcttccatccatgcttcaccaccaatttgatgtttgttcttgcttcaattttagcagaattcatattactctgataggggctcttttttcttttcttttcttttcttttttttttttttgaaacagagtctcattctcacctagaactgagtacagtggcacaatcatgcctcactgcagcctcgatttcccaggctcaggtgatcctcctgcctcagcctcctgagtagctgggactgtaggcacacaccacaaaactcagctaatttttgtatttttttggtagagtcagggttttgccatgttgtccaggctggtcttcaactcctgggctcaagcgatatgcctgcctcagcctcccaaagtgctaggatgacaggcatgagccaccgtgcccagcccggggttcttttcaaactgatgtcttatcctttttagtgactcaaaccaaatcctgattagatatattaaaataagttaatacaagtttattttggtgcgaaatatttttgaagtccatgcacagtcttttcgtaatacgcgttttccatgaactttttgaatacctctagtatataacaaagcaggaagagttcataaactatttaaaatttctagagagtgagctgctaatttactggcaaatagaaaacaatggtatgtggaaatttattaaatagtaccactactaataatttaaagtgtacaaagaaccactctaggccaggcacggtggctcacacctgtaatcccagcactttgggaggccaaggtgggcagatcatgaggtcaagagttcaagaccagcctggacaacatggtgaaaccctgtctctactaaaaatacaaaaataagccgggcatggtggtagtctcctataatcccagctactcgggaggctgaggcaggagaattggttgaacccgggaggcggaggttgcagtgagccaagactgagccactgcactccagcctgggtgacagatcaagactccatctcaaaaaaataaaaaaataataaaaaaaaacactctgtgtagcatgctatctttattattttagtttagtgaacataaaatctaaaaggcttacaaaagtttacttaaaatcttggcctacctcaccctatttttccaatgaggttttaagtttttcagtcttcagttgttgcctgcagtggcatttccaggaggataagtattgacctctcttccttgattcttgagtggtgtaagaacacacatctcagctgggtggctcacacctgtaatcctaacactttgggaggccgttggcatgaagattgcttgatcccaggagtaagagactagcctgggcaacataggaagacctcatctctacaaaaaaatttaaaaattatctcggtgtggtggctcgtgcctatagtcccagctgctcaggaggctgaggtaggaggatcacttgagcccaggaggttgaggctgcagtgagctgtgatcatgccactgcactccagcctgggcaatagcatgagaccttgtctcaaaaaacaaacaaaaagaaaacacattccacttttggatgcacatgggcagcagtcgaaggcgggcagcagtcgaaggcaagcagcagtggttgtgtgtgcctcagaaaaaaatgtagcccttagaactgcccagcaccttgccaggcacagtggctcatgcctgaactttgtgaggccaaggcgggtggattgcctgagcccaggagtttgagacaagcctgggcaacatggtgaaaccccatctctactaaaatacaaaaaagtatctgggccttgctgcgtgcacctataatcccagctactcctgatgctgaggccagagaatcgcttgaaaccaggaggcagaggttgcatgaaaccaggaggcagaggttgcagcgagccaagatcgtaccacagcactccagcctgggtgccagagtgagagtctgtctccaaaacaaacaaacaaaatttgcccaggcagggcttaagagtattggtagaaatgcagtttgaggctgggcgtggtggcttacgcctgtaatcccagcactttgggaggccaaggtgggcagactacctgggtcgggagttcaagaccatcctggccaacatggtgaaaccctgtctctactaaaatacaaaaattagccatcaatggtgggcgcctgtaatcccagctactcaggggctgaggcaggagactcgcttgaaaccaggaggcagaggctgcagtgagccgagatcatgccactgcactccagcctgggcgacagagcaagactccgtctcaaaaaaaaaaaaaaaaagagaaaagaaaaaagaaatgcagtttgaaactttacatctgtcctgccaagtagaaaattccttgagttgaacaggctatagagatggtggcactgggccgggtgcgatggctcacgcctgtactcccagcactttgggaggccgagacgggtggataatttgaggtcaggacttcgagaccagcctggccaacgtggtgaaaccccatctctactaaaaatacaaaaattagctgggcatggtggcgtgtgcctgtaatcccagctactctggaggctgaggcacaagaatcacttgaatccaagtggatcacttaaggtgaagagttcgagaccagcctggccaacatggtgaaacctcgtctctagtaaaaatacaaaaataagccaggcacggtgatgcacgcctataatcccagctactcaggaggctgagacacaagaatcgcttgaacccgggaggcagaggctgcagtgagacgagatggcaccagtgcactccagcctgggcgacagagcgagactctgtctccaaaaagaaagaaaaatattgtggcactggggcatcaacttgattgaacgtccagaggattatagtctgctgtatatggccatccttggttttaccagtttttcagagctcagtctggggaaaagaaaaaaaaaattatacttcccctaagaagtaactgatatctggagccaactttgcaagtaagtagaatacattctgaattttatttgaatctcaagaattaaaatattactttgaaaatcatttgtcacaaactgtcagaataattaagaaactacttagagcaaagaatgaggaaacatagcttgaaagttagatcccttccctaataaaaaaagctacttagctttatacccaaactaaggcattgcagaagaaaatatttgcaatatcattatttagcattctgaataattaataaattgggctgttttcttttggcaggatgggaagcacaaaatgcaagaggaaaatgttaaactaaaaaagcccctggaagaaagccacaggtgtttgttaatcaagtattaactaagatgtaaagttattctggggtggtgggaaggagggagttctttatatacattggcattgacaccgaccagacactgacttataatattaatatgccaggaagacatttgaagtggaagttaataataaaacgtataacatgtattaaaccaaacccattaggccatttcagaggaaagaaggatgatcaggctgtcctctcttccctgattaattcccaagctcagattatcacttaagaggttatttcccacctttactgaattggtatcccaggaaaataaagtataagtcatacatagcatttcttaacttcttaaatatatttgagtatgacttgtttctacctctgtgctaaatttcaaataagtggctgggcgcagtggctcacgcctgtaatcccagtactttgggaggccgaggcaggtggatcacctgagattagaagttcgagaccagcctgccaacatggtgaaacccggtctctactaacgatacaaaattagtcgggtctggtggtacctgcctgtaatcccaactacttgggaggccgaggcaggagaatcacttgaactcaggaggcagaggttgcagtgagccaagatagcgccactgcactccagcctgggcaatacagtgagactctgtctcaaataaaaaaaaaagttcaaataagtactctgatttctcttatgtctcatctctcatttttcctttatcttgagaatctcaaacagcttaacttcattcctttatcctaactctgtctgatttgctcatgatgaagagcataggatagtttcaaggaagctgactttttatagttattttagcaggttagaaatataattaaatattacatagtgccactgcattaaaaagtgaaggaggtccagttacatgacattctggaaaagacaaaactatggagacaaaaaaaaaaaaaaaaaatcagtggttgccagtggtaagagaaggaaggaacgaaccggtggagcacagaggatttttagggcagtggactactctgtatgatactatgatggtggatacatgtcattatacatttgaccacactatagactagacaccaccaagagtgaaccttaatgtaaactatagactctgggtgatgatgttgtgtcagtgtaggctcatcagttgtaacaaatgtaccactctggtgcagcatgttgacaaagaggccagggatggggcaggaagcatgtgggaagtctctgtactttctactcaatttgactgtgaacctaactgctctaaacataaaggtctactttaaaaggtggaggaagaggttagtgatgaggaatgataccacagtgaggttttgagagaactatacagctgtccctagccaggcttcgtcaccttaagaatgaggtagtgtgtcatctggagcaaaagtagctgctggagaagagaaaacacacagtccaatagtaagctaattatgcaggtgcttggcctaaatgtccctttctggccttgctcccaaagagcatggtttgatccagagctaactttaaactatcacccatctcacattacagaatggcataagcaaagagaagggaactagaagggccataaaattaacctgggcttccaggtgcctttcagggtcagcctcgttccaaactaaaatcaaatcatttacttgagcaaccaggagtgtcttaaatgccaacttctgatttaggtcctgagaatatggaacagtgcttccttatatctgaattgtgctctgcaacttagaatttgtttcacatttattatctccttatgattcagtattccttacaaaagtacctaatgcaactttacagatgagaaaactgagaagcagagaggctgggtgacttatccaagttgcctctgtttatcatgtctactgtttttaagtcctttggctctgcactacctattagcaacttccaggacttattctggccatagctgcaatcgttagacataccaggcttcctgggattatgatggcaaggaacatcggaaaacctggtcaccccatggtgtatgtctggtggtcacactgctactcaagtgaaaagaataagaaccattgcaatctgtagtgcattttccctgtaaccgagagcgggctttgcttcacctctcatttaggctctagtccatgctggaacatcggagttagctcagcttagtccctcatgaagaaatatttcaacctgaatgggttttctggtgacagtctcattcatttccccttcttgggttaatttgctaaagctcacatcttaagaatatttgggactgatacacaacatgtgataatggataatggatagatttccataatatcaaatagaaaaaaagctactaaaatatatggccagtgaaccattggagttttacacattgggaaacataaatgctaactattttgatagcaaaaaggaatgtaaaatataacttcaaatctatttttaaatgggaacccttatataataagtcaagggtcagattctagtgattcattttaagaagcaaagtttcctctccttggaggtcaaaattaataattatgttgttctaagtaatataaaagacctacagtatttcttgtttgaaaaaaatgtttgtattctgagctttttattgaaatgatataaatgaaaatacatgaagttcctatttgtcacaattttttacttctccattgtaggctgcaaccccaccctatggatgaacaggtaacagagcctcctgtttcaaaacatcttgtatgaattatgaagttggttgtaccgtgcctagccagcaaataaggtagcatgggcggaagatgagtgaatacagtgtgccatccttctaacaataccctgaacaaatatgtattgcctgaagctcacacaggaagtagcacagctttgagcagtttactaagtaaacatcagttctcacctattttaaattatccctgacataagatctaggagagctcactttatgtccctttcctctagtttttccttacataaaatggagagaaaaaagatgttttgatcacttagaaataagctaacataaatgattgtaaaacactttgttaatctaatagtatatgataagcccatgagaaagacagtgaatgctactgtgtctgagtcaccctgtcatttacctcttaggttataaaataaaataagtcctactgctttcctttttttttttttaaatggagataaggtcttactcacattgcccaagctggggtgcagtggacgatctcagctcactgaagcctcaacttcccgagcttaggcagtcctcccacttctgcctcccgagtagctagggctgcagagattaggtttcaccgtgttgcccaggctggtctcaaactcctgggctcaagtgatcttcccgccttggcctcccaaagtgctgggattacaggtgtgagcttccatgccctatgcttgccattctttttttccttttttttttgagacagagtctcactctgtcacccagggtggagtgttgtggcacaatctcagctcactgcaacctccgcctcccaggttcaagtgattcccctgcctcagcctcccgagtagctgggattacaggcgcccaccaccatgtccaactttttttttttttaatatatatatttttggtagagatggagttttgccatgttggccaggctggtcttgaactcctgacctcaagtgatctacctgccttggcctcccaaagtgctggcattacaggcgtgagccaccaggcccagtccccagtgctttccattcttgatggtagagtgaacaagaggaatgggatagtgttaaaactttttactctatacttgcatgtgtttgaattttctttttagaaatcatgttattataaaaattaagagctggaagcataatgataggattatccgagttgtattatggtggtaggactacctatttataattggtttagtttccagatagtctatagtgtgattatattaatattgtaggtaaaaaatgcatattctgaaagtactaatatttctggcactaagaaaaactaaccagctccctgtgtggtttaggatcagctgctgctctctgaaaagccacagttgtgtcagctatgccaggaagacggcagcctaacaaaggtaactgtgatgagaaacggacaggcttttcatagggatgtctacagcagcccccagtccctccccaggagtaacagggactttcccgcatagagtgcagagtgcatgcagagtgctgggagtggggtgaaaagcaaaaggggcaagcatttactgggtacctgttttttcagtcataataattcatgtcagaaaattcccattaaaataaacataaatagccaggcgcggtgactcacgcctgtaatcccagcattttgggaggccgaggcgggccgatcacaaggtcaggagttcaagaccagcctgatcaacatggtaaaaccccgtctgtactaaaaatacaaaaaaaaaaaaaaaaaaaaatagccgggcgtggtggcctgtaatcccagctactcaggttgctgaggcaggagaatcgcttgaacccgggaggcggaggttgcagtgagccaagatcacaccattgcactccagcctgggcaacagagcgagactctgtctaaaaataagtaaataaataaacaaacaaaaataattatgtaataaagcaaataagcagatagaaatgtataagtaaatattgagtgcctgctgtgtagaatgtgctggagaaagagtaatgaacaaagtagaccaagtctctgttcttgtcaagcttatgtccttcatagctgtcattttatagatgaagaacgttgaacatctaatgctaactacatttcccaaaattaagtcataagtgatgaagcccagcttccaacctagctttcgctccaaagtccacagtcctttcagcactttatcctgctcagaacaggatatgagctctccctgctagaccacttgttttccacccgatcctcaagggtgcctgcctgagcatcttcccagtttgttatcctagagtaggcagagttaaggaagtattcagaaagaatgagtgcccttgatagctggaactgtgtcttgttcacagaatcccccagcatctaatatggtacccaatccatagtagatcctcaagaaaagttatgtacaaatgagtgtatgaaacacatgcttggaagagatacaggaaacaggctcaaattctggatcacaacctgcatagcaccatctgtgatcatgcaaaattttaataaattataatatgacctagtcttaaattcacagaatcagataacaaatgaactgcccttatagaactggaagttacaattatagaaatatgttacaaagtagaacaaactgttaattctggctttcctcttctaagccatgcaatattagcttctgtatgtcagacaaaaattcttcttaggctttcagataaaagcaaccccctactcctctcaacctcaggaagatgaattatttgggatgaaggtagcacttcatgggagaaattattctttacagctttttatataggacccttggagctttgtgtataccaccctatcacagccttactgctgacattgctatagtgacttcttgctctctgtgcttgaccattaaagatgcaaaacatttaggaaaacaaaataatttccctatgaacaagatgcaggaagctgtgctcctgctgcattgataacccagtggatgtgcttacagagcaccagagaccacaggaaagcataaagcacatcagtgtatttattaggaattatactttcagttcatactctggacatttttaaatcttagcctgttcactcaatccattgctctttcactgccttatttggagtatgcgcaggtacttgcaaactaattttaaaactaacctacctcaaagtgagtatggggaacagatgtgtgaaggatattctaaagataagtgacttgtatgttacctgtttttatttttaactctatggcactgcttcttttcatttaaatctaaaaactagacggtgaacttttttgtagattgggcctgtgttcagatactacctggcacatagtaaacattcagtcattgtttgattaggcattgagcatttgccatatttggctttttatatcccatgaatccttatgccttgctcatcttctattccccgcctaacctcctcttctcatagaatgtgtgtaagaactgcagcggaaccttctgtgatgcctgttcaacaaatgaactgcctcttccttcaagtatcaagcttgagcgagtttgcaatccctgtcacaagcatctgatgaagcaatattctaccagcccatcataagactggaggccaagacctggaccaaaacgtttatgcaggctcctctgtacctgtgttttagctgtcaggatctcatagagcccagttcttagagtcaactaaagagttgataggaatttactaggtccagggagaaaaggcagtggttggggttactggaaattttgctcattttctctaatgactgtatgaataaaagtgaacttacttgagcctttctcttctaaatctaaacaacctgatattgaaggtttgctttatagcatatctttggaaaggcaactcatttttatgattagtgatactggggtggatttaataggagagagaatccaggcagataagaataaaaaggaaaatgatcatctccttctatagcatttgcagattcaagggggagaggtagatgctgagatcaaaatgacagttgttacttatttttccaggtgctgttagtataaacattgtttcctcttcacccctgctaactacctctttaaagtatttctaccaaactgtgaacccaatctcagggaaaagaaattaaaaagtaatataaattctgcatatattaaaaacaatattgtaatatgttataatttcaggaccagaattttctggtctttacctacaagggttttcattatcaaaaaaaagaacatttgtttttctactttatgacttcaaagtaaataactgcccttttcagaatctccttccacaaaacaagccaactcttccccattccctccatcttcctttccaagtcataatggaaattgtaaggagttttaaaaatagggtttggcttttgcaaatagaagatattgattaaagcaaagtcaaatatagagtaaaataagtttaatttgttttcttaagacagggtcttgctctgttgcacaagctggagggcagtagtgcaatcacagctcactgaatccctgttctcccgggcctcaagcaatcttcccaccttagcctcccaagtagctgggactggctttttttttttttttttggccggggagggggtctcattggttgctcagcctggtctcaaactcctgggcttaagcagtcctcccaccttgacttccacagtgccgagattacaggcatgagccaccacacctggccaagtttaatttgttcatggctgagaacagttagctcggaatacttacattgttttttgaataaggaattccttattctgagtgagtcacgaatgagagctgatagatgctttcttgaaaagggcaatacagtcatcccttggtatccatgggggattggttccaggaacccaacttgatatcagaatccatgggtgctcaagtcccattatagagaatgggttatatggtatttgcatataacctacatacatcctcctgtgtactttaaatcatctgaagatgattacttatacctaataaaatacctacacatcacttcatttgcatggattcaacatagtgcttggtgttcagtaaattcaagttttgcttttttggaactttgtggaatttttctttttctgaatatttttgattggcagttggttgaagccatggatgcagaacccatggatatggagggctgactgtacttacttacatatctatctatctttgagtaacaaactctttgggggaaaagagggaagtgtattgagcaagagaaggcaaaaaacattacataatattttgattctgttacgtgtgtctatagattgtttcattctaatcaagacctaagaaggtatgattctgtgactgatttagaattctggggtggaaatatcctggaaccatgttttttaataaattctgtctcttggaaagagttaacaacagcctgggaaagagttgttattccaaaagtcagcctgttacttggtgaagctgaagtttaagagttctggggaaaaataaaatctagtaattccagccta

SEQ ID NO: 15795 - DNA, 85282 bp, Homo sapiens
gtggccgagaagaaaggtggcggtggcggcggcggcgcagcggacgggacggggcggcggctcctcgccctgaccctctgctcccccgcccaggcccgggcgcgaatcggaggctgcggcgaaggaaggagtgagcatggctgagaccccgccgccgcccaccgctggtgccgaaagttgcagcgaggagccggcgaggggcggggagtggcggccggaggagccgcgccgcgctcccgccgggggcacggaccgagagggcgaggcggggccgccgccggcctcccccgccgggcagtcggagcccgactcgccggtggccgcccccttcttcctgctgtaccccggcgatggaggcgccggcttcggagtgcgcccgccgccgcagcagcagcgctcctggaggaccccgccgtcccccggctcaccgctgcccttcctgctgctgagctacccgagcggcggcggcggcagcagcggcagcggcaagcaccgtgagtggcggaggggcatggggacgcccgcggggaagggagcattcggctggggagggccggcccggcccccgcggagctccgcctcccgcggggtgacccgagccgggtggccgggaggcgggggctttaggggctaccctcgggaagctgttctcccgaggcgcccggtgaggaggcagcgggacgaccgcggttcgggcgccggattctacctccgcgtctccccaggccgcggctcctgcctggcctggtctctctcccgtcttgggctgggcgctggtcttcgccggcctcccacgtgcttgggcgggggcgagaagcggcctgcctgcccccctccacccggggcgccctggccctgtcccgggtcccgggctgggaaccttccccgaaggagtctaagagggggcggcgcccggagaccccgtggcccctctgacccgcctttttcgggctcccggcgccgcggcagctgagtaggtgtggctgctgcgccgccgccgccgccagtgcggccttagtaatactagtaactaattttttacgagcgttccttccatgccggtaaatatgacagatccgtcccccggattggaaagagaaatcggagcggtgcatgagaagacaagaagggaatgtgtggctttggaaggctacctcccagggttatatcggttgtcgggaagaggcctccacttttaaagccactggcacacgcgagcgctctgaatgcagctgacccacactccgtgctgtattttttattagtgaactgtttactgtgctggcaaacgagtagggccctagagtcgtcaatgaatataaggactcttagaggaatgttaaatctgattttcaaatacaagctcttacagtatgaaaatgtggctgacgatacaaggcatgctgtaagcgccaaatactttgctgtatgagttctggaaagggagacagaaacttgcctgaagcgatgagggaaggacctttcccaccatacaccctatatttttaaagcacaagtacaaatcttttagctgctctgccctgccaagaaaccctgactcaccttttctgccccgatccatctcctaggaaaagataatatttattgattatttcctatgtgcatgtgttgtgataatcatggttaataagtttgtgtgcgccaaactgaatgccactttttcagatgcggaagctcgatttatcccaagtaacagcttaagagaaggaatgcagttgacccagattgcttttctgctaaacccatgctctttaaatctaacaagagatccaaaactgtgatggtgggtgacaggttaacaggaagggtctatgtgattcagctggaggttgcccagtgttcacacctccttattacttactgagtaataagtcagtgggcagacactgaccattgactgtcttagtgaagccatagtttgtgtgttggagtggtctgcactaatgtgcagatggattgtcagctcatggcagaagtgagtcttcctatacagaggaggcaaagataagaatcttctcaaggagactttgcttttgttttctgaggaatccttctactttgtactttaaacaccgcctctttttttgtttgcaccaaaaatgttttctttctgtgtaatctacatattaagcatgctactatagaaagaagactgtcatttctctgtaacagttatggtacaaggtttgatgtagaggaacttttcaactattgaacagtatcaattgtgggaattacctgaatttcagttgactggactccctcattgttaaaggttatctttatgttattaattattgtagaaaataacagtattttgttactcttatcagttaatactgttgcttaagcatgatcaagatcgggactagaggacttaaagctaaagtttcatgagcgtgatctcagtctctaccttaggatactagcaaatgtatggtgtttttttgtttttgagacggagtctcgctctgtcgcccaggctggagtgcagtggcatgacctctgctcactgcaacctccgcctcccgatttcaaacgattctcctgcctcagcctcctgagtagctgggattacaggcacctaccatttttagtatttttagtagagacgaggtttcaccatgttggccaggctgttatcgaactcctgacctcaaatgatccacttacctcagcctcccaaagtgctgggattacaggggtgagccgccgtgcccaggcggtatggtgttttttgttaccacgtaagttctaatatttcctcatggtctttatttttgaaatagtttattgatgtgtatgtgttcagaaaagttactgggaatatatacgtgtcccacttcctctgcttttaaagattagtcactgagaacatttcatattagcaaaaaaaaaaaaatcactattacatgttttatttaaatataaaattgattcaaaatagttttttgttttggactgagtttttgtttttacctgttacatttatatgtgctttagaacgtaagcatacttacagaaaggaacactctagatatgaataaaaagttccttgttaccctgcagagtcaatggaatattgctttctgtaatgtatctggatatcagaactttgattctcttgactactcatttaagaaattagagaccaggccaggtgctggtggctcacacctgtaatcccagccctttgggagactaaggtgaaggatcacttgagtccagaagttcagggctgcagtaagctgtgactgcaccattgcactcctgcctgagcaacagaacgaaaccctgtttttaaaaaaataaaaataaaatacatgaacacttgagaccaaacagtttttgtttttttattttgtgtttttgagacagtctcactctgtgctcaggctagagtgcagcagtacaatctgggctgactgcaacctcttccttccaggttcaagagattctcctgcctcagcctcccaagtagttgggattacaggtgcgcaccaccaccccagctatttttttttttgtattttagtagagaccatgttggccaggctgctctcgaactagactcaagtgatccaccctcctcggcctcacaagtgatgggattacaggtgtaagccaccacacctggccccaaacagtttttaaaagacttcttaattacgagaatggtacatggactcaacctcaatgcctagtgaatattacgatgactggcatctgcctctttagcaacccaatttttaactctcagtaatgtatttgctaaaagtatataaaatattatagctttgaaagactgtgtattaaggtggtattatctttttattttagaaatcttgagtgtacttagaggttttaaaaattaaattttacatttgagttcagaagctctgtttttaaataacagtgctgaagaatagcaaaaatgtgtgagactggaacggtggctcaagcctgcaatcccagcactttgggaggcctaggcaggagtatcacttgagcccaggaattggagaccagcctgtacataagcagactctgtctctacaaaaaaaaaattttttaaattaaaaataagttagctgggtatggtggcacatgcctctggtgccaactactcaggagtctgaggtgggaggatggcatgagtctgggaagttgaggatgcagtgagtcgtgatcacaccactgtattccagtcatggtaatagagcgagatgctgtttcaaaaaaaagtttgtaaatagaaggtagcctaaacttttcagggtttgtcacatgaattgttttgttccaaaatcttgcaggatataatatccatgaaatcaatctgcttcaatgcagtgtgaaaggagacttctgatgtgccttgttgaggattatgtctctttctgagtctttgagtgctggtaatctgctaggtttttatacttctaactttaaatctcataaaactctctgccatgccttttaaaatttgattttataaatgtacaagtaatacatgaatctatgctcattgtttaaatgtttcataatacataagtacagttacaaagtgaactttcctctttgtggacctccagcaccctctccccggttccttattggaggatgcccacttttgagtttggggagttttcatcctgaactttttcatgcatttacagacatgtatgtttttatatttcgtggtggctttatcctcttggtgtatgtatgaccttccatgccagtttctcagcaactacaatttgtaaggaggatctgcttgcaggccatggtgtaatacttttaatgctttccttttccatcctgccgttagagatcgtcttgtgaatggacaggatagacaaaagatggcttccctttagtgttggttggaagagtcaccctgctgtttgcacagttaacagcttctatttagttattcttttctccttccaactcccacaactacggcaaacattgttcaaggcaatgctatgcaaatagcccacatccttgcccttgtcttttctctcccagttaaggcagtgtccaaaaaagtgtcccactcaccaagtagcagctttctgtatttttaagtgctgttttgagataggaggaaggctagaagaggaatagaagaaaaagaatcttgaaaaggactggcagcgttactatgactacccactacaaagttgagtatacttaacagcgagtgccatgattaagccccggatagtgcagagaatgaggtacctagaagcctttgtctctgacagatgcacttgaaaaatccattgtatggggaaggaggttcgaaatatacatgtaaacccaggaattagtgtttaaggggagaaaatttatgcttgcagtttcattaacatatatacacacacaagtatacagatatgtatatatcatatatattgcatgcatgcatgtatgtatgtgtagattgtatatgtgtttgtgtaaaatatatatattttagtttttcctctgtggacatttctgttattgtctctcttcttttttaattgtttagtagtactctagaaaacagtaaaggtcgggtgcggtggctcacgcctgtaatcccatcactttgggaggccaaggcaggcggatcacctgaggtcgggagttcgagaccaacctgaccaacatggagaaaccctgtctctactaaaaatacaaaattagctgggcatggtgacgcacacctgtgatcccagctactcaggagtttgaggcaggagaatcacttgaacccgggaggtagaggttgtggtgagccgagattgcgccattgtactccagcctgggcaacaagagtgaaactccatctcaaaaaacaaaaaaaaagaaaaagaaaacagtatacctggtcaggaattgaacacatgttttttgttttatttattaaaatttttaatttatataaagagatatgtcaatgggccaggcatggtggctcatgcctgtaatcccagcactttgggaggccaaggcaggcggatcacttgaggtcaggagttcaagaccagcctggccaacatggtgaaaccccgtctctactaaaaatacaaaaaaattagccaggtatggtagtgcacgcctgtaatcccagctactggggaagctgaggcaggagaaccgcttgaacccaggaggcagaggttacagtgagccaagatccgccactacactccagcctgggccacagagcaagactccgtctggaaaaaaaaaaaaaaaaaaaaaaaaaaagaagtatgtcaaagaagagccaaagtgaaaataaacaatttttttaaaaaagagatgaggtctcactgtgttgcccaggctggtcttggactcctgggctcaggtgatcctcctgcctcggccttccaaagtgctgggattacaggcatgaaccaccatgtccggcctcaagcacgtgttaatcagttcacctgctgtatgcttctttaaactttgaaaaggcaaaagtactttattgtgttttgtaaacatagaggcgtctgcccaggctggaacatatgagggaaatggtcaaactttcagaaccccaaaagattgggcatggttaccttcatactagtagttttggaaacagcagagtgatgtgtgactttttaaaacacagattttcggtattttcaatgtagatcagtgtcctcatttaccattctgtgattcataaatctgttagccctctgctcttttccaaccctgttaagaaggcagagagccattttctgatccattaagtgccttttgtcaaatagtagataaaaagcacccacccacatacaaacctcagaaatgtagcatctttccaaggatgtgtaactgccagagatctggagtttaggtgttcagtgtcttggtgcagttggctccttccacacacagctgacatgaccttggacctcctgagctactgagggacaggtagctgggtcatgcccccgtttccttcctcacgactaaacactctgcttgccttcctgattctgcctttgtgagcagggctccctgaactctcacagtttgtcttcccagccaattctccccttcttttctgccaccacctttttgttgcacctattcttctggcctggcattatcaaaaagtcaaatcacgctttttattgacagaacaacaatttcagaatatcagatgtaatctttgagtctttctttggttgctccccttctgataatcatagactcattctttgtagacagagttttcttttttcttcccatcttagttttattctggacactagagagtcctaaaaggctcttcattatataacaatttttttttgtagttctgaaacccaaacaattaccaataaaagatgtgactgtaagataatactactactagtggccaccatttgtgggatatttttgtgtgccgtgcagagagctagaaacttcacatgtaatagtacttagcacttttttgaactgaagccagggaatgaattcatattcctcaatagtcagccttcaaagcgcatgttcttaatcactgtacgttccctcaccaccaaggtcttaaagaagctggtttgagtggagagcagtaaaggttgctgggtaggagggatagcagaggaaaggtggcaaagaaagcaactttggggactaaaagacaagtattggcctcaaaacatattcacttgactatattctgtcttgtatcttttcccttttttaaaatttttcatagaaatctacatgtttaagaggtaggattttatcaagaagctaagagaccatatttttctagtatgggctatagatagtaaaaagtctagatgtatgatgatggaagtgtagcagaataaactggatgaaataatttttttgttggcaatatttttcaaaattccttaaataattaaaagaactaactaaaaaatgggctgcccctttatcattgcacaataggcaacctgtagccaacataaataaaagtagaatcccatttttgatgaattttacaggacatcacacctattacatgtctactcaatccttactaattttgaaacacactccctactttgtgaagtggctcaggttatgagctgtagaatttgttgtgggaagtcagtagcacaccgtaagcattaaaaaattggtttgaaattgtgtgaaaggaaatttttttttgttttgtttgcttttttgagatggagtttcacttttgttgcccagtttggagtgcgatggggcaatcttgcctcacagcaacctctgcttcccgggtttagctgattctcctgcctcagtctcctgagtagcagggactatgggcatgcaccaccacacccacctaatttttgtattttagtagagacggggttttgccatgttggccaggctggtcttgaattcctgacctcaagggatccgcccgccccaacctcccaaagtgttgggattacaggcgtgagccaccatgcctggccaggaaatgtttttagagttacaaagcaaagcagtggtacttgagaaggtaagtagcaatatggccatgccccctactgtatttgaataattgtgaaaaggttcatagtctccctaaaacttctcaaggctgctggccaaggtggcattccctctctttgcaaagccttttttatctgacatgctccctaccgaccggacaagatactcagctttgtcagagggagtggtggggcgggggtgggaaagtttggaagaaaggtgtgggaaccttatgatgtgtaggaaaggagagcctggcaggccaagacagcaaaaagcaggtggaaagctgaagtcgttgtagcatgtcgccttttagagtgtgattcttctaacttcagagtctgtttagggactctccacagacatttatctacttctgctgtcttttttatgaacttaggaaatctgatcacttgaggtgagaatgcttggtaaaattctgacccatctctcttccttcctcaaaatctgagagataccactgtaaccctctgctcacatctcctttttactttcctttgcctctgtcccataaacgtttatccttactgactttcattttatgtgttgatagggtttttccagaactctcaaaggagaagcacttatcatagtgcagttatggtgacatttacttactgcttactttgtgccaagtgccatgctaagcatttaactccgaaatggttaatattattatccccattttgttaatgtagaaatgggcacagagaagtaacttgccaaggttactcagcagctaggtggtggacctaggattcactgtgagcatgctgactccagagtccacatgctatgtcacactctttcatcacctcccgtaactggaatcaggtcctagattagaggcacgtcttcaggcaaccagccctctggttccatattctactcactaatgccctatttactaaaaatgagtaaattaatgaaactcaagagtcaccaatctgatagaaaaaatggttgtatatgtaaaaaacgctgaataggtccatttataacagacattaagactttcctaaacacctaaaattgtctgtttcttgtctattgccttgttctttcttctgcatccctagcatatgggaggtaccctgtacatgttgagtgaatgaatctgttatgtacatgtaatgaagccagtgttagactgacctgtttgttggggcataaatatggtttgattttatagaatttgggggttttcacaattgaagtgaaacatgagggtggaaaaatgccattgcaaggctatatacatatctataccagcaagtatctattgagagtctggtatttggtaggtactattttgagtagatacgtaagaggtatgcaaaatgcatatttctttggtggagcttctggtctttgtggagctagttatttagtttcattttacaactgagtaaattgaggcaagaggaggataaatttcccaaggtcacctactaagtttttgatagctttacgtctgtgtaaattattgcctacagccactgagccatgaaatcagttttacttttcagggtagaggttatttttaatcttatgctggttaattttaacaagtgaaaagatgatgcattataatactcctggtagtgtttgtttctaacaaagtaatgataaatcaactttctgagtatatcagtttatagttgttgtcaactttggttaatatctataaagtgacactgagcctatgaagtgtataaacttaaaattgaagaaatcttggaatcagaggtagacataatagattgtggttctgggaaaggaggtgggagggtgtactggagcatgtgaaataatcatgatcattgagttgaataatcatataatttaacagaaacatctgggctttccaccaatgtcatcatgatgatgattcatcaaagataccctttcatggctggatgcggtggctcatgcctgtaatcccccagcactttgggaggccgaggcacgtggatctctcgaggtcaggagttcaagaccaggctggccaacatggcgaaaccctgtctctactaaaaaaacaaaagttagccaggtccggtggtgtgtgcccataatcccagctacttgggagtctgaggcagtgaggcagaagaatcgcttgaacccgggaggcagaggttgcagtgagccgagatcgtgccactgcaccctaacccgggtgagagtaacactatctccaaaaaaaaaaaaaaaaaaaaaaaaagctaccctttcatgctaacagcaactagtgaaatagggggaaaatgagatttttcttcttaaattatgaaactgtgattcaggaagctgccaaacagaactttgtgagctttacaaatttagttgcacaacttgacaaattttaggaagaagtttctattctgcattatgaaaatcagaaataacccagatgcctaccaacatgaaaatgaatcagaagaccaggcacagtggccaatgcctgtaatcccagcactttgggaggccaaggcgggcagatcacgaggtcaggagatcaagaccatcctggctaacctggtgaaaccccatctgtactaaaaatataaaaaattagccaggcatgaatggcatacacctgtagtcccagctacttgggaggctgaggcaggagaatcacttgaacccggcaggtggaggttgcaatgagccgagatcgtgccactgcactccagcctgggtgacagagtgagactccatctcaaaaaaaaaaaagaaaataaatcagaatgtgtttttgttattgtttttttgagacggagtctctctctcttgcccaggctggagtgtggtggcatgacgtcggctcactgtaacctccgcctcctggcttcaagcaattctcctgcttcagtcccctgagtagctgggattacaggcacgtaccacattgcctggctaatttttgtatttttactagagacggggtttcaccatgttggccaggcaggacttgatctcctgacctcaagtggtccacctgcctcagcctcccgaagtgctgggattacagacgtgagccgccgcgccctgccgaatcagaaattttttgtacatgcattggaacactaccttgtaatacagcagccaaaaggataaactacatatgcacactacggtttggatgaatcttagaaaatacagcattgaaggccaggtgcggtggctcatgcctgtaattccagcactttaggaggccgagatgggcagatcacctgagttcaggaattcaagaccagcctggccaagatggtgaaaccccatctctactaaaaatacaaaaattagctgggcatggtggcaggtgcctgtaatcccagctactcgggagtctgagacaggagaattgcttgaacctgggaggggacaggttgcagtgagccaagatcatgccactgcactccagcctgtatgacaagaacaaaactctgtctcaaaaaaaaaaaaaaaagaaaagaaaagaaaaaatacgcattgagtgaaaggcttagaaagttttatagagcatgaaacactttctataagaaagttgaaaaaaactgaaactaaacatattgcttagaccttcatatatttgtgacaatatttttgaaataagataatgatttacacgaaattcagaaggttaccttgaaatgagaggcaggagtttagaagcaagaaggagcacataagtacatatgttggtccatttctccagttgagcaagggtttcagggatattggttatattctttaaggacttaaaattatacattaagtttgctatttttaaaaagcgtacaatgcatcattttagaaagtgattccccccttcatttatctttttctattttggaatttatcaggtgttcttaatgtgtccaactagtatgtaaatgtggagggaactcagagacagagtggtagtagggtgaaccaagtacatagtggaagcattttatctaccctttgtgagcccatgacagaaaagtccatactgggttctcagtttgtcagaatgtgcccacttactaaaagcctgaacttaatatgtaagttggggggcctagaggaaggtatgggttgtgcagcattaaggtgtaaagtatggaggctgataaaaaaaatttcttcaaatcttaaatttgttgaaactcatctttaggaaatttcatgaagagactttgcgtgtgtgtgtgtgtgtttgtgtgtgtgtgttttaaatgtctttttattttctctgaataaaatttaacatccggggatgaggaagagttaggatagagtgctgaagttgcagagtgtagaaggaacatggactttggaggtatctagacagaagtagcttggagtaacagatctgctactcgctaattgtgtgattctgggccagttacgtggctgaactttggtttcattgtgtataaagagaaggtatcaatctctgttttgcagtgcttttgtgaagacttgacatggtatttttttttttttttttttttttttttgagacagagtcttacactgttgcccaggctggagtgcagtggcgcgatcttggcttactgcaacctccgcctcccgggttcacgccattctcctgcctcagcctcctgagtagctgggattacaggcacccaccaccatgcccagctaatttttttgtatttttagtagagacggggtttcaccgtgttagccaggatggtctcaatctcctgacctcgtgatctacctgcctcggcctcccaaagtgctgggattacaggcgtgagccaccgcacccagccctttacatggcatttgtaaagcacctaacagaaaatagaaatttaataaatgatagctattttaggtaatttttccacaatatataacagagacattgagcctgtcaagttaacctttgtcttatagtagcagccgagtacaaatatcctttaagaggaatgtaacttctgactttgaagtgtgactcttatttgctttgaatccatcataatgtggaaaatacagactgtttaagcagctagaacgtagtattttttggatcttcattttggatttgaacttcacacaggcctattcttttagggccacagactgaactcccacccgcctcacaaccatcttacaaataggtgccattactcacaaatgggatcaaatgagaaaatagttcaatacagctcatacagtaattactctgtatgtgagaaaaaaaatcaaggtttgaatatcttactgatggcttaactttaacttcatattcaaagctaagatgtttacttagtaaagaccaaaatgtaaaaacggtactaagcaatatctaaaatcttttttttttttctttgagacggagtttcacaggctggagtgcagtggtgcaatctcacctcactgcaacccccgcctcccaggttcaagcgattctcctgcctcagcctccagagtagcagattacaggcatgtgccaccacgcccagctaattttgtatttttagtaaagatggcgtttctccatgttggtcaggctggtcttgaactcccgacttcaggtgacccgcctgcctcagcctcccacagtactgggatgacaggcatgagccaccgtgcccggccgtagaattgtttttataagtttctacaaatagcactgttttcatagtaacttctttgcctgtgaacaatggataactgttcgtgctgaagactcaatggtgtttacctaaagaacagcgtagaagtacagtttttcttgcccacccccgggtcttatttctgaaatggctgccaacacctcaaactggtagatctgggaaattcaaggataccaatacaggcatgtttttctttccttgccaaaaactttagttgttttgggcttgcctctctgtgtcctctacctggagagaggcagggtgggatggatcttccgaaggaatgttaatcaagtttcttgctcactaaccttgatgttcctgttgtgttggtatgttgcaatcaatctagatctgttcaagttagtaaatgcttactggggtgaagagattgttgtggtttgtgacaaggccaaattcaggttttggaccccagacaatcacatggcattcggatttattcatgtattccttgttctgttttaagaacatatcagtgatctagagttttgatatcacacatacagatagctagggctgtttggagttgtggttccaggaatgtcccatgtaatttgaaggttttaatgactacttactatgttttgaagtattgcatgatataaagtgaatctataaactgtccccttattaatatataatatgggaatatttttggctagaaaggaattgaactgaattaaatgagaatgtgttaaatgaaggcttgtgttcagtatttggatatgaaaattctgtttcctggaaaaggtgtttctgtcttactgctgcgtgcctagtgcctggatcactacctggcatgtggagcacctcttagtgaatatctgttgaatgaatgaatgaatgaatggctctgagtctagatgtagggtaatgatgagagagaatgagatagaaataaaaccaggagtattttgctttccttagtaacttactgattttccccaattataaataagcctatatatatgccttcttacattgtaccagtataccctccttcttttttttattttgagacagggtagagtgcagtggtatgatctcggctcactgcagcctctgcctcctggcctcacgtgattcttccacctcagtctcccaagtagctaggaccacatgtgcgcgcaaccataccttgctaatttttgtttttgtagagatggagttttgccatgttgcccaggctggtttcaaactcctgagctcaagccattcacctgcctcagcctcccaaagtgctgggattacaggcacatgccaccacatctgactaatttttgtatttttagtagagatgaggtttcaccatgttggccaggctggtctcgaactcctgacctcaggtgatttgcccgccttggcctcccaaagtgctggtattataggcatgagccaccgcgcccagccatccgccctgtcttcgtaacaatatgaaaatgccagtttctctacagaatttgattattagcatttttttctttcagttcagtctcaaattatgatgaagcatttgagattttaacaatattcaaggagaatttttttagttttcagaaattaggtaaatcaagatgtccctctgataacaatccctagaaaggaatagtctcaggtcatatttcttgaatttgtatgttcctccttaaaattggaacccttcaatacaaaaacaaacaaacactttctttcaattgtccaaaacattttcaaagaaaattcttattcttctctttgtaatttatgtagttcataaagcaagtacctgcccttttgctaccaaggtataaatgcctcattggataatatagggccgtgtgtgtgtgtgtgtgtgtgtgtgtgtgtgtgtgtgtgtgtgtgtattaagaaaatataattgtcttcagtatcttatcgaatgggaggattttaaaaatataacatggtttaatctgcttagaaacatatttcatgcttaaggctgggcatggtggctcacgcctgtaatcccagcactttgggaggctgaggtgggaggatcatgaggtcagaagttcaagaccagcctggccaagatggtgaaaccccgtctctactaaaaatacaaaaattagctgggcgtggtggtgggtgcctgtaatcccagctactcgggaggctgaggcagagaattgcttggacctgggagctgagatcacgccactgcactccagcctgggctacagagcaagactctgtctcaaaaaagaaaaaagaaaaaaaaagaaacgtattttatgcttaatacagaaacttgataaatacaacaaaatcaaaaaggggggaaattgccattaattgggaaagattttacttttttaacttgaagttttttttttgcatttctgcctaacctaaaaggtcaggtttttgtaccttggagaaggaaattataaatgcccaagaataagatatttaaattgaaaatctactttagcttttctttttatctttttgttttttttccctctgagaacctcaattttttatgctttagcttttcttaaaacataacatttagcatagtaaagaattttaatagctatgtagataagaatgaaagaggtgaattatatgcttgttaaattaatctaactgcctcttttaccatctttactatagattattatccggtattaattgtcatccttttattcagtccttgatcccaaagtaagaagaattgatgaggatatgtgcattgtgttatgtctgatcacagtttgactagcacagtctggaagtgggttgtacaggatgagagagagaagcctaattgctctcccagcatcagcagcatctataaagcatcctgggaattgcttgccctacgttcagagcagctggtcacatgagcctgaattttcagttcagttcattagtcagccattttggtcaacaccctgcttactgcgcacggccaatcctatgagaactcagcatcccagctcatctgagcagatcctggaagtgatttctgcagctcaggattttttttttaagctacattgaaaatataggtttattttttgttcaggtttttcttttatattttttttctgcacaaaggaggaggatttttcacttactcatatcgaggccagatttttaaagccagctaaggcagcatcagctgtgcgggatttaaagcctatagctcagctgaaaaaaaaggtggggggcagggaagggaagataaaaggagaggaagctgggagaagacaagcatcatcttattttgctatgtggtaggaactgtctataagatagtgtagaattgtttatcttgagcagtttgttcttaacctataaggtatttttccttttttttttttttaaacctcccccacccttttcctgaaagctttgtttcagagctttgtattgggtttttttggtgaggaggttgtatttatttttttggtgtgtgtgtgtgagtgtgtgtgtgtctgtgtgtgtgttgtggtcccagctgagtcatcatgtctgctctgacgcctccgaccgatatgccaacccccaccactgacaagatcacacaggctgccatggagaccatctacctttgcaaattccgagtgtccatggatggagaatggctctgcctgcgagagctggatgacatctcacttacacctgacccagagcctacccatgaaggtatggtcagatcctgtccgctagtatttcaccagcatcctcattgttatgggggagggctgggaggatcagggagaggtagaaagaacctacactctcaactgttaacagtcctgaaaaccttgcatccttacttaccacccagctccccttctcttgctcatgggggaaagataattttttttcttgcccctttaggtatcctttcaaaagatgctggatactcgtttagagttctttgtctttaagcctctaaataaaacatttgaggtcacttatcacatctgattctattcaataatgagaaagctattaattttgttcatatatgaaaatgttatagaaattgtagtgatttataacactaagttaagacaacatgactataattataggattgtacatgatgaatacagtagaaacaccagggtatttggtaatggtatcctcaccattatatgaggatacaattttaagcaagttatgacatctaggaaatgtttgataaaacatttttttaacaatatggattattaggttagatgagaaaataacttttcagcatttatttattgaatatggactcctaagaaagcataatgcctggaaaggttaaatatgattaatatggcatccctatagattacaatagaatggtaatattggaatctattggccattgctttttataaattatttgtggtaactattatgatccatttgagatttccactgtcagtacctctgagatctttgtggtctcttgacttgcgacttttttccaggactcttgctaatttatgagaggttttctgcttctaccctttaattctcttaataccacagaaagagagctgatttgaatcatagctacaaatcgttttgtttttaatacagttgcttcttagctaaggtttattctctgtccttatactgatgaaaaaaaacaaaaaacgcttgcatatgaggagaaattctttataaacatctgcctgatagttaggcacatcgacaggacaaagaagaccataggtgaattgtacctagcagatggggttaggaaaggtgattctctgcctttgaccttgagttgaaatcttatcatgactcagaattttcccattgtgtttgataagcattttatcttcccagtcagccttagccttgagaaagttttagggatggttaataacacagaacacaaagcagtcattttgggtgtgtctttaagaacaatgtttaagtggtttttaagaccctttgcatcttttaacaattggtttgttaattagacagctttctttggctgtatgtttcgttatgtgcacaagttataagacatcagctgaaattccatgcaatgccagtactatttattttttattattattttattctatattttcatcaaaacatcgttacatccaacaattccagtactacttaaaacagcctccaaagctttaaaagtctttagggaagaaaaatacagttttagaaggctaccaagaagtcttctggcaactgcctcagtttacatattttgtttgaaaaaaatgtattcccgtccaatttgagagttatacaatatgaaatattccctttatcatgaaatctagtttaccagtgtctcaaaaataatttttaacaattttaacacctcaaatatatgtttttggagcaggattcctatggataagcaaaagtgagctgtttggttcatgtaagcgtttttagcagcgccatttgaattcttcatagagaaatctgtagcaacacatttctcagtatggaaaatgtgtgagagctataatctaagtaataaattgtatgtctgctgattaaagaaatcagataaatacagagtttccaagacctgtaatcaactatagaggatttggaagaaaatagagaaatgccgacagtgcattttagaattttgccttaaattgggcaagaaagctattattttaaattactagaaatgaaaataaagaaagcatagtcccatgaaagcctgtgagtattactgccttgctccattaccaaactctggatatttaaacagtcatttggtcccaagaaatacccacttttatgttaataccactgatagttattagatttaatttagctataagcatttaagtggtggtcaccaggcccatgattatgtgaatctcaccttgttcacaaaatggaactcctgatgtctggacgcgggagtattcagactgctttccgggctgattcacagagggaaaaacatctgaccacccaaatcctagagtgaagtctcctcactcccacaaaagaaaataggcaaacagcataatgttccctcttaaaatgatgtagactgactgtgtgtactcagcaatagaggctctgtggcttccatattttattttcttaaaaccagagttcctggcccttcactgagcagtccgcagtataggcctggacctagagtttctgcctactttaacccttaaataaatgaaaataaaagcattcacttcattatctcaatgcttattggtggtcaatgagggattatctctcttttgtcttatatactcttttttttttttttgagacagagttttgttcttattgcccaggctggagtgcaatggcgcaatcttggctcactgaaaactctgcctaccgggttcaagcgattctcctgcctcagcctcccaaatagctgggattacaggcatgcgccaccacacccagctaatttttgtatttttagtagagacggggtttttgcatgttgatcaggctggtctcgaactcccaacctcaggtgatacaccctccttgacctcccaaagtgctgggattacaggtgtgagccaccatgcccggcttatatactcttattttcaaaagccaacagcaaatctacaacaagtttaattgcaaatagatttcccctaaaggcaagagcctgtgattgactccacaggagaagggtcaggagaggcttcattaagtgagaccttaagagataaacaggtgatcaccagaccgacatagggagggcatttcaaacagtacacagtgagctggcccagccagggaatagcaacaggagcacagagggcttctgtttggcacaacagggagcaagactggaaagataagcaggggcttgactgtagaaatcttattcatactgaaaagcctgcacttgattctgtagtgaaaagctactggtgctttatgtctgggagtaacataaaataagatttgtgtttggaatgatcactctggcaacagtgtagtgaatggatcagaaggatataagctctcagggacccctaactataacttttaaaatggtctgggtaagagatgacaatctcacattaaggtagcaagagtgaacaccaaaggaacaatccctggaaaagcagaatgtacccgatgactgaggggctgggtggctggagaatgaacataaggcagtgcctgggatgactctccaacttctggctgcagaagctaggttccctttaccagtagggaatatagaaggaagagaacatttgagttgttgatgcttaatagattgtgactaacaaaagcactaccatcactcttttttttcttttttttgagacagtttcgctcttattgcccaggctggagtgcaatggcgctatctcagttcactgcaacctccacctcccaggttcaagcaattctccttaactcagactctccagactccccaagtagctgggattacaggcatgcgccaccacgcccagctaattttgtatttttagcagagacagggtttctccatgttggtcaggctggtctcgaactcccgacctcaggtgatcgcccgcctcagcttcccagagtgctgggattacaggcgtgagccaccgtgccccgcccattactctttcagttgagccttctacccgccccacagaagcattaatcagatttatacttttccagattacatatcctggcttaagtctgtaccctaatttacattaagagttggaatcctcacatggaaaggcgggggtgaagataaaaggagtgagacttaaatggacattcagagatgtgagaatgtggcttactttcttactttgcttgtgccatgtcagtgctagaggagcagccttgtttatagaaaattcattttgcattttcttaatttagggaaacatgtaccaccattgaaataacctctcagacttttgtttgtttgtttgttttactttgtgaaagcgtagtgggatttctttccttttttttttttttttttttaaccgaagcaatgttggaagtaagtggaatttcaaagtaaaggaacttttaaagcaccatgaaaattttagagaacatgtgttctctgtttttttcaagaatggaagcagaacgcttcagttagacctttaagcatcattatattaatttcagaaatggtgttattactgagatgaagtggtatattttatttttgcgattttttttaagtcacatgctcatatgtatctgaatttcttggagtaacattctcaaaacaagttacatataattctaggatcaggaaagtaataactttttttttttttttttttgagacagagtctcactctgttgcccaggctggagtgcagtggcgagttcccagctcgctgaaacctctgcctcccaggttcaagcgactctcctgcctcagcctccctagtaactgggattacaggcagacgccaccacgcctgggtaatttttgtatttttagtagagacggggtttcaccatgttggccaggctggtcttgaactcctgacctcaggcgatccacccaccttgccctcccaaagtgctgggattacaaaaaattagctgggcgtggtggcgggtgcctgtaatcccagctactcgggaggctgaggcaggagaatcgcttgaacccaggaggcaggggttgcggtgagccgagatcgtgccactgcactccagcctgggcaacaagagagaaactctgtctcaaaaaaaaaaaaaaagatttttttaaagaaattcaccaatacatgttatgtatacgcatgtccacatacgtgaagggcagggatagtattaccttcagtattattgagtgtttaacaacaaaaccaactatagctatgactcagtttataacacgtttacccttaataagtttacctaattagaaatgtatatgttaataaaaatttttacactttaaagaggatttttaaagaatgaaatcctgactcatttgttgtctcaagtgactacagataccccttgaattaagatggggttatgtcctgagaaactcatcctaagttgaaaataccataaaatgaaaattcacttaacacacctactctactgaacttaatagcttaagtagcttagcctctcttgccttaaacatgcttagaagacttaaattagccaacagttgcgcaaaatcatctggcagcacagtaccctgtagcgtattggttgtttaccctgatctgtggctgatcgtgtggctgactaggatggtgtggctgactgggagctgcggcttgctgccgctgcgcagcatcgtgagagaggatcacctggcgtattgctagctcgggaaaaaatcaaaattcaaaatttgaagtagggtttctactgaacacatatcactttctcatcgttgtaaagttgaaatatcggaagttgaaccctcataagccagggactgtctgtgaattgaaattagcctaaaagacagcagtagtatcatatttcaaaaaagaaaatgttattttgcatatactgcctttactctgtaaagtgtttcagacagatttttttaaaatataatttgtgatctaagtccaattccttgttcttaaactaaatgtccagcttttggtctattttcttttttcttccacattcctactctctgttatcatttttcggatatttatatggtttgagtggcaggcaagttaaaaatcgcaatttaaaataatttttgtgtgcttttcaaagtgaagctaagttggatttttttaaataagacttttttccgattacaaaaggaaatttgttgtggagatttggatatttctttttttttttttttaaatgaggccttgagatttggaaatttctaagtagaattttgacacagaattcaaaatgactgaagaaatctgctggatacctaatgagtctctttagagttgggtggataaattagtcaatggaaaactttattgctgtcaatatggggtatatttgagaacagtaaaggaattagtacaataatggggttgatttggcaattcgtgttttagctactgtgatggtcattaatttagagataatataggatagtggttaaaagtatggattttgtggcttggacctggacctggattcagttccttacccagtactcagtagtcatgtgacgttgcacaagtgatcacttcatgcttgagtttttttgtttttttttgagacagagtctcacagtgtcacctggactggagtgcaatggcacgatctcagctcactgcaacctccacctcctgagttcacacaattctcctgcctcagcctcctgagtagctgggattacaggcgcataccaccacacccagctaattttttgtatttttagtagagacgaggtttccccatgttggccaggctggtctcgaactcctgacctcaagtgatctgcccacctctgtctcccaaagtgctaggattatagatgtgagccatcatgcttgagtttttctctcctcttaactgggaatattaacggtaactacttcagaggttaggaggattaaatgagatacttaatgtaaagcaccctataaatggtagctatttatattagtagttattcatgaagcagtagctgaagccacagcagtttaagccggattcttcaatacattgccattttattttatatttctatttttatatctatctttatagagtagtctgaacaagttatttatcagactaaagatgaacattagtagtagcttaaactcaagttttagcattgtcctttcttggacctctataaataagaaaataattgattaaaaatccacaagttatcagttatccaggaatatgcatttttgtttctttcgttttttttttttttttgagatggagtctcgctcttgtcacccaggctggaacacagtggcgcaatcttggttcactacaacccctgcctccccagttcaagcgattctcctgcctcagcctcccaaatagctgggattacaggcacccaccaccatttctggctaatttctgtatttttagtagagacaggttttcaccatgttggccaggctagtcttgaactccttgaacctgcctcggcctcccaaagtgctgggattacaagcgtgagccactgcacccagccaaaatatgtgcttttctattaaccttcttttagggataaggagtctgacattgagaggtgatgcacagatgatcagttgaatgcaataaaatatacatctggcctgattagttactttccgctaggaattatttactccaagtgttaaaaatgtattctctcatttaatttttacaacaaccttttgagcctaggtacaactattacccccaatttacaaataaactgacatttggccaggcgcggtggctcacacttgtaatcccagcactttgggaggctgaggcgggtggatcacctgaggtcaggagttcaagactagcctggccaacatggtgtactaaaaatacaaaaaaaaaaaaaaagattagctgggcgtggtggcaggtgcctgtaatcccaactacttgggagactgaggcaggagaatcacttgaacctgggagacagaggttgcagtgagccgagattgcaccaccgcactcactccagcctgggcgacaagagtgaaactccatctcaaaaattaaaaaaagtaaaataagctgacattcaagggtgtaataaccggtagaggcaggattcaaactcagactaccaatggttcaacccatacacaacactcctgtcccagaattctagagtgtaagtccaacaataggcctgcgtgtaataagaggagtcttcttcccagtctctgatgacatatttgcagaagttttatacacaattgaacacagcattggcagcttaagtacagtcagcatgcagataaggccaaaagcatcccagctgggacatgcttggtgattgccatctttttttttttttttttgagacggagtctcgctcttgtccaggctggagtgcagctgcgcgatttcggctcactgcaacctccgcctcctgggttcaaacaattctcctgccttaggctcctgagtagctgggattacaggtgcccgccaccatgcccggctaatttttgtactttagtaaagaaggggtttcatcatgttggcctaggcttgtcttgaactcttgacctcaggtgatctgtccaccttggcctcccaaagtgctgggattacaggcgtgagccaccaagcctggccagtgattgccatcttttaaagtggagactgagttttttgtccacatgttttctttttcctcttttcactcacttttataaagtaaatgaaaatatttacataatcgtgcatatactaccaaacagcaaaaatagtacactgctgaaactgacctggctggcaagtgacacctctatatgctaaatttagctttctgaagcagatgtacaaaagcaataagaaaagcagttttgttttgtttttgttttgagacagagtttcgttctgttgcccagtctggagtgcagtggcgcagtctcggctcactgcaacctctgcctcccaggttcaagtgattctcctgcctcagcctcctgagtagctgggactataaatgtgcaccaccatgcccggctaatttttgtatttttagtgcagacagggttttgccatgttggccaggctggtcttgaactcttgggctcaagcgatcacccgcctcagcctctgaaagtactgggattacaggcatgagccaccgcacttagcctgaaaagcagtttgtgatagcagtaatgttcacgattatggattgtttgaaatagtagctacaggtaatcattattcttttagccaagcattctcatgcccttctttggatgattttttcaatgttttttcaaactccttttcaacatacttacctgttccagtcagactgtgcttcagtaaaatcctgattattctttttgttttactattctgacttgtgattcttcatgcccgtgttatatcaggaagggtaatggacccctgactcccttcatctacaagtccttctctaacagatctcacacctttcatgtcctgaatcactggttagcatctgggacatttgtttgaatatgctagaaatcattccccagttatttaattcatgggattccttatttctgaaattatatagaaagttcttcagggcaaaccttttctttggcgttcttcagaaggccccatggtactgtgtactatttatcgtagatatccaacaaacttctggtgaactcagtgattccctattactccataaaatcattttaaaagaaaggatttgcatgttactgtaaagacacatgcacacgtatgtttattgcggcactattcatagtagcaaagacttggaaccaacccagatatccatcaataatacactggataaagaaaatgtggcacatatacaccatggaatactatgcagccataaaacaggatgtgttcatgtcctttgcaaggacatggatgaagctggaaaccatcattctgagcaagctatcacaaggacaaaaaaccaaacaccgcatgttctcactcataagtgggagtcaaacaatgagaacacatggatacagggaagggaacatcacacactggggacctgtcggtgggtagggggctggggggagggatagcattaggagaaatacctaatataaatgacgagttgatgggtgcagcaaaccaacatggcacatgtatacctatgtaacaaacctgcacgttttgcacatgtactccggaacttaaagtattaaaaaaaataaaaagccaggtgcagtggcgggcgcctgtaatcccagctatgtgggaggccgaggcaggagaatcacttgaactcgggaggcggaggttgcagtgagccaagatcgcgccactgcactctaacctgggcaacagagtgagactccatttcaaaagaaagagagagagagagagagagaggagagagagagagagagagagagagggagggagggagggagggagagagagagagagagagagagagagagaaagaaagaaagaaaaatggattttgtcttcctccattacacacaatttaatttatggtttctaatgttttctttatttttaattgtttatctcatattctggaccgactgtatattatttggaaaatataagtttagaataatgtaataatttgttgtttaaatatatcttaataatacgtagtattgataaaaatatgggacgacttggggcctctgctagtgggaatgtgcattggtacatcctttatagaaatcattttatcattgtgaatcaaggaccttaaaaaattaattctcagtaattgtaccagacacctatcctaaggaaataataagagatacaaacaaaaagtttatgtatgtactgtatatttatcacggtattctgacttcctgtaacacactcttgagagcaacttaaatagcctaagaggaaaattattcaataagttgtagaacaccttacactaaaaattattgtggaacaatatttgatgtgtagggtaatgtttggatataactttaaaagctgtctcttaagctgcatatttactatagtcacaatttttttaagtataggtatacataaacacaagtaaaaggaaatgtatcaaaaatataaaaattgattatctctggatagtggaattatgggtgatttttataatattctttatatttctttatatctcccaaatattctacaagaggacatattactctaatatgaaaacaaatgttcctttttcaaaggaaaaatctttatgaaaattaacgggtgtgcaatcatccatccaacagatatttgtattatatatcagtaccttctatgacagtttcacacatctgtgagtgggaacatttgcctcacagcagagctactgctttagattcaatttccattataattttttaatatttctattaggcattttattttgggtttttttcaaacacagacctgtgtttatttactggcatgctctgttttcatagctgtttaaatgctgtttgcagtgtatggggtggcccacagtgtctagatttagaagcatttacagcatttgatttattcctttcctaagtgtttggaaaataaaacctgagtcattgggattctctttttcacagaattgtgttattgttctttgctttcactgtggcacacccccttttgtaattggcccttggtgagattacagaaacatttgttgccaccagtgcagtcagccttagatttacactgtcaggttctctgagctgtgattatgtgttcagaaggcagtctcagtgaacttctcaaagtgagaaggttgtagcttttaatacagtctcagaagcctatgggacaaagttttctggacacggttcatcccttcttgttgctctgccctgaaaataacctggctagtcaccctttcaaggtaagttttacccacttagcttccaggattttgtaaaattctaaatctgggtgagaaatatcagtagctctgtacttgtatgccagttcctatctaaaccacgaaagaggtgcatgctgcctctgatctgaccgtaacatactctgcataaaatcagcttttccttcctgtttcaggactactttcagtttcttcctgtctctttgatactcttgcactagcgttggcttcagtgcactgtcattaaccacagtgccttacagtattttcttctattggtgagccttttctggacctttcgtgaaacagagcttctacttgaatctttaatttgtgcccttcataacagaactcacattaactcttctttgggttatcagcttctgacacccaagagtcatttgtcctaaactaatcactgaaatatgaatcattttccaaaaagaaatgctgtgccagagaagataattgccactcagtgatagagctcagaacggaattcacgttgtcagattcccaagcctgagtaccaaccaagatctggttggaaagagcaagtgctgtcgtctgagaacatccaccatattctgtactcttcagtagctgttctgtgttttgcttttttgatggtgcccctcctgagggggaggtggagagtatataattgggcatgttttttcattgtggttcctctagtccccaccagtcaactgtgactactatgaagtgcttttgagtacagggctgtaaatactaaaatctgttcctttgcaatttttggtatttgagcttttccagagaacaaatagaaggatttgatgagcttagaaatacatgtgtagaggaacagtgaaaaagacttcttcccaaatggctgctaagtaattatatatttttcatcataattaaatattctcaaaattgtatgtcagtgtgttgaaaatagtgttttcaaagaaaatattggctgggcgtggtggctcacacctgtaatcccaacattttgggaggccaaggcaggcggattgcttgagctcaggagttcaaggccagcctgggcaacatggcaaaaccctatatctacaaaaaaaaataaaaattagctgggtgctgctgggcactgtggctcatgtctgtaatcccagcactttcagaggtcgaggcgggtggatcacctgaggtcaggagttcgagaccagcctggccaacctggtgaaaccctgtctctactaaaactacaaaatattagccgggcatggtggcggatacttgcaatctcagctactcaggaggctgaggcaggagaattgcttgaatccaggaggtggaggttgcagtgagatgagatcacatcactgcactccagcctgggcaacaagagcaaaacttcatctcaaaaaaaattagctgggtgtggtggtgcatgcctgtggtcccagctactcaggaggctgacgtgggaggatgggaagattacttgagctcagcaggtcaaggctgctgtgagctgtgattgcgccacagtgctccactgggtggcagagttcagaccctgtctcaaaaaaaaaaaaaaaaagaaaagaaaaggaaagaaagaaatgtctttagcattattatgtacagatatttttaatgaaaacaactttagttatagaggtgatatatttgcattgtaagtcacaagatacagaaaagtataaaaatgcaaaataatagaatgcacctacatttcaaatacctagggataaccactgttaagatttagtatcagattctctttttcaatgtatacactttttcaatgtatacactgaaggttcacttgcaaactcaaaattttatacatgtaagatcataccacacctgtgctgtgtgacctgccttttttcctctgcaatatttttccatatgggtaaattgaaatttttgtcattttgtttaatgtcttcagttattggatgtgctataatttcttttcttttcttttttttttctgagacggagttttgctcttattgtctgggctggagtgcaatggcatggtctcagctcactgcaacctctgcctcccgggttcaagtgattctcttgcctcagcctcccaagtagctgggattacaggcgctttcgaccatgtccggctaatttttgtattttcagtagagacagggtttcaccatgttggccaggctagtctcaaactcctgacctcaggtgatccacccaccctggcctcccaaagtgctggtattacaggcgtgagccactgcgcctggcctggatgtgccataatttctttgactatttctttattacaggcatttaggttgtttctaaatttttctacccaagacagttttagaaaaattgttatgtgtataacttgaatatttaaccaatttttagtttttaatttttatacacattgccaaactactttaaacaattaaaacaaattttgaatagcatggtatcataaactttcatattagctactcatcaaagcttggttttgtctttcctgcttgcagttggttgcgtttttctcatgctgtattaacatctgaagtttccaaaagatacagttgtggttttcaagacagttggttcagcagctgaaaacctcatgatattactttctctactttttttttttaagctaacagtagtgtcctaagcaaaagagagtttttactgttaattgtgcaatgagaaactgcatgtttttctaagattgctagaatttgctttttgggatgaaaaagctgcatgctgggatttcctttttctttcttatacagatataaaactaagagtgtatgtgagatgtactacattttgtctgagaatcccacagtgtccagtcctgtggacagcagcttcccagctaaagtatcttagagacattatctctgccagcatagccattccagcatgagagcaaagggtctactggtcagggctttctttcctcatccgctcaccccccatcaggctcagccctccttagcgttctagtgtcacctagctgctcacctaagaatctgttttatcttcacttatgtcactaatattaattcctcttttttttttttttttttgagatagggtcttgctctgtcaaccaggctggagtgcagtggtaccatctcagctcactgcaatctccacctggattcaagcaattctcctgcctcagcctcctgagtagctgggattgcaggcacacaccaccacgcctggctaatttttgtatttttagtagagacagggttacaccatgttgccaggctggtctcgaactcctgacttcaagtgatctgcctgcttaggcttcccaaagtgctgggattacagacaggagccaccatgcccagcctattaattccttttttttttttttttttgagatagggtttcactctatcacccaggctggagtgcaagtggtacaatctcagctcactccagcctccacctcccaggctcaagcaatcctcctaccttggcctcccaagtagctgggattagaggcatgctgcactaccacacctggctatttcttttgtatttttggcagagacagggtttcgccatgttgtctaggctggtcgccgcctcctggactcaagcgatctgcctgccttggcctcccaaagtgctgggattacaagcatgagctaccacgcccagccttaattccttgtaaagcttatgtcatacttatttagatctcaagggcattgtctatgggtgtttcatcttttttttttttttttttttttttgagacggagttttggtctgtcacccaggctggagtgcagtggcacgatcttggctcactgcagcccccgcctcccgggttgaagcaattatcctgcctcagcctctggagtagctgggactacaggcatgcgccaccacgcccggctaattttttgtatttttggtagagacagggtttcactgtgttggccaggatggtcttgatctcctgacctcatgatctgcccgcctcggcctcccaaagtgctgggattacaggcgtgagccaccgtgcccagccagatgtttcatctttttaacttccattgcattagtaaagtcttttgctcaccataaatgctcaataaattttattttattttatttttattatttatattatttgtttttattttatattactttatttatttttgggtctcactctgtcacccaggctggagtgccgtggcatgatcatagcttattgcagcctcaaactcctggcctcaagagatcctcctgtttcagtctgtcaagtagcctggtctccctatattgagtaggctgttcttgaactcatgggctaggcgatgcacccacctctgccttccaaagtgctgggattacaggcatgaaccaccacacccagcctcagtaaaattaaaatggctgaagtgttgatgacttaatgtgttaccttttctagggctatttgtctttttttttttttttgctgatatttttgtggagaaagtagaccttggcccaaattactggtttattagaacaaaacctcaaagcatttatgaaaattaatatatgacaattgctttgttaccaagctaataatactatggttagtttaatagcacctcagctgttaatttgtcatttggtttatttaggttgactaattttttttcctgtttttaatatttagcttagctggctttttaaaattccattcactctattgtctttgaataattacggcaaatatagagaaatccagttgtaagtgtaaagttgacattgagtacctatgctttgctaagtacttcaaatttattagcttttattttcacaatagcccttcaaggagttatatgtgatgtgtctgggtttggggcttcagaaaggtgttgccttaagaaaccataataaaattctaaaaattaacactaaatcaaagacacttggtctcaaggggacaaaataacccccaggccttgtaaaatctgtcacttggttgcctatagcaatactgctagagaaaggctacctcaagaagagatttcacaaccatggatacataaacaaaggcgaagcattttttagcccattcaagcacttccctgtagaaaaggagcttcattcagccagttgcctcatccagagaaaaaagaagtacaagaggggccaggctcaccttctaccagaccatgtactccagaacttaaagtataaaaaaaaaaaaaaaagccgggtgcagtgggggacgcctataatcccagctactctggaggctgaggcaggataattgcttcaacccaggaggcggaggctgcagtgagctgagatcgtgccactgcactccagcctgggtgacagagaaaaactccgtctcaaaaaaaaaaaaaaaaaaagatgaaacacccatagacctgtttcaggtctaagaatgaaaaaaaatcaatagactaattatgtagctctgaaaagatttaagctggtggcactgtaaacatctacccttaaggtacatagtgactcaaaggaccttgaggtataaaagaatggcatgttacctattgtagtaaagtcctgagcatgccaaggtaaagtggagaacagctttacatggaaaagacagaccttttagtttctgggggagaaaagttctcttaaattaattgcatcactctgatacttaaaactttaatctctgttttaagaagaaaacagaaaatatgtctgtttgtaacagaaaaatgttctagatgggatatgcccaaggaaaagtccgagatccctggtatccaccacgcattcctacctagaaattcactttccagagcctttttctatacaaatcttggaggctcttcatattttgctttactaaggtaggcttttatcttcataggtgacaaatagagtttctaattaaatacaatacaataaagaacaaaatgggaatattccctctattgacttttgcaaggtcacagcaagtctgtaaagtaataatgtggatggtaagagtccattctcatgaatctgtaatcctacataatatagatttgtggcacattatattgtcaaaggattgaacctgaaaatgacttctgcaaatatgtctatatataatgtatttcagcactaatttactataaaataatagtagccaactcacagtatttttttttctgtatgagacactttccatttgctttacatatatagacacataattccaaaattaaaaaaacctctggaaatgaaaagcatttttcacaaatttgcctgaacttatttggtgttacaacatgatgtgaatttacttgaggctatttatagtctttattctacttaatctgaatattcatttcctgcagaaatattaatgtgcttgattgtaggttactgcctcagatcctgctagttctgtatggtgaataaacatctggctttattgaattatatgtgatttattttgtgtatcttcaaagtagcctcctttatttttgttttggggaaggagaattgggggagggggagttggaaaaagtatttggattttttttttttttaagaaaagtcactagtttgcatcataatatttgtcctgaatctaaaagaaatatatcgcacatacttttcaattccctgaagtgatcaaaataatagttgagttagattaatgtcgcctacacttagaatacaaagagcctttgattttcaatagaaaaataaatctgtgttgctttttaataggatatgcatctttgtttccctttatttgaaactttgaaattgctaatcttagctttgaaacatatttaataaccgtagttgctatctctgcttatttggttgtactcccagcccttgtcactgttaatcgctgtgataagtagaaagaatcctaggaacctccctttcagttatccctttggaaatcttgtttttaatagcacttttctttctgggcttgcatgacattttatctttcttttcctttctttttgccgtttgcaaagactcttgggaggatttgacagatttggtggagcaaatgcgcgatgatacagaaggtgcgtgccacaccaacatctttcagctttttctccttgctttttaaaattttctaaccaccttttaattgttttccgtaagaggaaatgtcagctttaggttttatttcccatggcaataagtggaaatcttaatgttttggttccaagtaaaatagtgtcaatgtatgtttatgttgcttttgaaagatatttgctgaataacgtgtttaaaagggacattatttcaagattatatcaagtttttgccatggctgttttttcacttgtttgttgagaaagtgtaaattttattactcatgcaaatacatgtatatatatttctgtgaatttcacagcagccaaaagcaaacagatcccaggaatctagtggttggcctggaatgttgctctgatttgtagatttccataacattacacacttaagctttgtcatgtcatagcattcttttctggtgtaattattttttgttaattttttcttcttcatacaagagactgaaacatggaatggtgtgattatctttttaaagtagcacacatgttctaatgtggaaaggttccccaaaccaatcagtgtttcttctgtatcaaggcagctaactatagggagctcagagcgatttacacattttatactaaaaatagaaaaattgagatttgaatctactttatcattttacatgttcccgctttgctgtagcacacacccctgacacacacacatccaccactctgtccagactgacctttcctgcccacctcctcctctcctactttgttcctgtgacatctcatgtatttatacccttccccctccgcctgtgccacctgcgaacccttcagtccttatgggatttccacaatttactctttgacagctttggcccacattcttttctccattcacttgctgctgcagaacttggagcttaaggaaggctttttacttattctctaattcttgtgtgtttatcaacctagttaaagggtaaactccttgagaacagagattgtcttaaacttcttggtatccttaatcagacctgggacgagtactgccctcagtagatctggtcattaccaaacaaaatcaaggcagctttaccctctctgttgatgcccaagagtatcttctgtttcagcccttgcctttgaatgtgtgaattctgaaatcctgagtgtcatctcttttcctttggtcaaactatttttatgccatctttgattctgcttttaatataactgattacatatagttcagtgaaagaacaaatcagtattgtctagttgattgacagttcacagacaagaaaaaagagaaggatgttgattcatttagtgtgtaatgtttactattgtgttagctgctattattattattattatatttatttatttattttgaaatggaatctcactccatcgtccaggctgcggtgcagtggagcgatctcatctcactgcaacttctgcctcctggggttcaagcaattctcctgcctcagcttcctaagtagctgggattataggtgcataccaccatccctggctaatttttttgtgtttttagtagagacggggtttcaacatgttggccaggctggtctcgaactcctgacctcaagtgatccacctgcctcagcctctcaaagtgctgggattacaagtgtgaaccactgtgcctggcctattatcattattattaattattggctaggcaccaccaggtttaaggctttaattcctttgatagactagatattaaaggaaaatgctacataaagtttatccccttcttgagaactttaccatgactcatcacaggcaagattctatttctttaatacaaagtattaataatgcaagagtcaagcttactgtgagagtcagactccttttttttaattttgtttttgctgggatttttgtcgatggttattataggtgaactccaaaagggagagaagatgaactttaacagtatagtacataaaatatccagaaaatgttgattatgtcagtaccttcatgatcttaatagatttccagtcaagtgatatatggtaatgttgatcaagatcctctttacagaaaagtctttctgaaaagtagttaaaaaaaaaaatgagaatggggagagggagatggcttcactttaactcttttgataatttcattcttcttgatatccttctctgcttttcttgcctcatggtctcaatcacagttatgtaaaattccagcatttcacacaactgtattacgtaacttggagatgttataaataagtgctagtactaagaagaaataagttatggagtattacctgcacataacacacaatagcaattcagggtctgggaagaatcctcatttcagactcagaaaaagctgatgatatatgcaggctcagatcttttctggagaccttcaactgctaagctgttttcaatgctgtttctcatctgttattgcagatgggccataacagttggcttttttaaaattttattttattttattttatttttttgagacgaggtatcactctgttgcccaggctggagtgcagtggcatgatcatagcttcctgcagcctcgaactcccaggctccttcctcagcctcctgagtagctgggactacaggcatgtgccatcacacctggctaatttttatgtatgtatgtatgtatgtatgtagagacagggtctcactttgttgcccaggctggtctcaaactcctaggctcaaacgatcctcccacttcagcctcccaacgcactaggattgcaggcttgagccaccgaacccggctatagtttgctttttaatagatagagtgttaacactggcttctggcctcctaaaaatttttaaaataacagactctagtgggttgcagatttgaactggtcgttgtttttgttttttgtttcagttctgtcacaattgaagcttcttattttgaatttttttttttttttttgagatggagtttcgctcttgttgcccaggctggagtgcaatgctatgatatcagctcactgcaacctccacctcccagattgaagcaattctcctgcctcagcctcctgagtagctgggactacaggcacatgccaccacatctggctaatttttgcatttttagtagagacagggtctcaccatgttggctaggctggtctcgaactcctggcctcaggtgatgcgcccgcctcaggctcccaaagtgctgggattacagacatgagccactgtgcccagcccttttgaatttttttagaagatgggagtcttgctgtgttgcccaggctggagtgctgtggtgcaatctcggctcactgcagcctctgctagtgattcttcttgcctcagcctcctgagtagctgggactacaggtgcacaccaccatgcctagctaatttttgcattttttagtagagatggagtttcaccatgtttgccaggatggtctcaatctcctgacctcgtggtccacccgccttggcctcccaaagtgctgggattacaagtgtgagccaccgcgcccggcctgaactattttttacagtgatgattagtttcatattctatgtgtttgtaacttatatctactagaatatgaagtgtcttcttagggtacaattgtatgatgtacaacacctattatattgcatctcctttccttatatgctagtaatttgtgtctaaaatgttttgaaactcactagggaaattatgaacattaaattaaataatgaaaggcacatagcttattacctttagtttttcaataaatatcggatttctgtctgtactcattacaagccttttgaacagattttgtaaatttgcagtggcccagattactgcccgtctctctgaggattaaaatagtcaggacagtacttgaatttaggcaataatatacctgtgtaaaatattacctaccaaaattgcatactggttccttggcatttgggggcagagggtgttaagacttgatgcatgttgaaaaacagaagaaacatatcttaagagattttattagcttctagcactgtgccacatcgtcattcaataagcttattaagttaaacaaaattgttataatggcttagagtggtggttcacttctataatcccagtactttgcggggccgaggcaggcagattacttgacgtcaggagttcaagaccagcctggccaacatgacaaaacccgtctctactaaaaatacaaaaaattgctgaggcgaggaattgcttgaaactgggaggcagaggttgcggtgagctgagatcacgccactgcactccagcctgggcaatagagtgagtctccctctcaaaacacaacaacaaaaaaattggcggggcgtggtggctcacgcctgtaatcctagcactttgggatgccaaggtgggcggatcacttgatgccaggagttcaaggccagcctgggcaacatggtgaaaccctgtctctactaaaaatacaaaaagttagccaggtatggtggcaggcgcctgtaatcccagttcctgggagtctgaggcacgagaatcgcttgagcccgggaggcggaggttgcagtgagtcaagatcatgccactgcactcaagcctggttgacagagcaagactccttaaaaaaaaaaaaaaaaattagccaggcatggtggcgggtgcctgtagtcccagctactcagaaggctgaggcaagaaaatcacttgaagctgtgagttggaggttgcagtgagccgagattgcaccattgcattccagcctgggtgactgagcaagactgtctcaaaaaaaaaaaaaaaaaaaagttatgtacatggaagaccataataattgcagtagctaacaacttttttccttagtatattccaagcacttctaaatggttacgtataagaacttgtttactcttcagaaccctgtcaccattttatagataaggaaagtgacacatacagaggttaagaaagtttcccagcaaaatactactcagttgtaaaaaggaagagaccactgatacatgcaacaacctgaatgattcttcggagaattatgctgaataacaaaaagtcaattttaatggttgcatactatatgattctatttacataacagtcttgaagtgatgaaagtatagaaatgaagaacagattagtggttggcatgggttgaggatggagtaggggcaaggagagatgtgggcatggctataaaacatcaatatgggggatccttgtcgtgatggaaatgttcagtgtcttgactgtaattcaacatcagtatactggttgtgataatgtactacagttttgcaagatacccttgggagaactaggttaaaagtacatggtatctctcgatattatttcttacaatttcatgtgattcctcaattatctcaaaacagaaaatgcaacaagagaaaaaacttttcccaaggtcacacagctagggaagagtttgaatagagttcaaactcccacagaccagctttagagcttgtgctgttaaccactacaccaaaattgtttaaacttatttgacacaagaacaactgtaaaaatacatcttcatcagaactcagtacacacatcatttatttgtatgtatcttaaaacaaaagtttcatgaaacaatacatagccttactatataggacattaaattgattttgtgacccactaaagggttgtgacctttgtttgaaagacactccagtatcctgtgctgcctctctggtatatacatccatttgtacggtagccactgtctaggtgtgtgcaaaaaaaaaaaaacaaattcctgaaaggactgttttggctctgtttccagcctgtaatcgtgggcatactttaaaggctgggctagtaaccttgcatccttctatttctctttaaaacatctccttgtgaaagcatcttttctcataactgctattattgtcctatgctgatgactctctaagtccaaacttccatttgcatttacaactaggtgatcaaaaatatcttgaaagctgggcatggtggttgcattcctggagacccatctattcaggaggctgaggtgggaggattgcttgagcccatgagtccaagtccagcctgggcaacatagtgagaccttgtctttaaaaataatatgttgagaatccttccacataaatatcctttatgatatccaaaaccaagtttattttgccctttatctccataacagttactcaactttttcatttccctttatagcacactcttccagtctctcagggcaaaaatgttggtgttattcttgaccccttcatttcctttatcttttctatgactatctgaacttgaatcactacagttcttcgtggcagaccattttgattctcttccctcaaattcattttgcgtaatcttctcagattagtcatctccaaacaaaattttaggcacgctgattctctgctcaaaactacagtggttcccattgcttcctccattaatatccaagtctagtttcagagacctctttatctgactctaccctacctgtgttttccagttctccccagtaagaactccctcttccactcttattttctccacctgacttcacacacccattccaaccacttggaataccgtccttcatgtgttctgtgataccacgacatttaggatctacctcaagtactgcagtatattgagatttatcacacttttattcatattacttttggtgttatctcatttgaagtacaaatgtacaatattccagggagttaaactaaggacagtggttattcctggtttttgtcaggtctgaggtttacctgctttaacaaattaataaagcctcttgctgtttcttggatgctggcaaaagacacaagactcctaggtcagagataaaggactttattactcatgacagtgcaagcagcctgagcatctgcatatctgtgccagttcttcttggaccagagtcccatggggtgacactggatggctcagtgacatgcttcacacgtggtaggtttgtgttgcagatgaagaaggccaagttgggagaacccattgtttttataggaagcagtaggaaagcttcgtctctcattatcaggttcataaatggcccaggaaagagtggtcagggccgtatagtcttgacataacccagtaaagaaatgtaggtgcccaagaggtccaaggaggattgtcttccccaacattttacagatgaaacagaagaatgaggatttcccccaacatcactcagggaatatgagagagacagatctaacccttctagatcatagatctaactgcgattgccctctcacatccatttacattgtttttcttttcttttcttttcttttttttatacctaggtaaagcccaaaacatttaaattatttctatgcaataaattgagcaaaccaaggaattcttgggttgtatttaccacctaaatttcttatgttgtatcaaaacaacgaaggtttgtcctaacttctaaatgtttccagaaatcttctaggtattcttctgcagcatggaattctcaggtaaaggtaactgaagaagtctgggaaactttccaaaactaaaattgattatattatgatatgggagcccaatgaagaagaaatcagtgtgtttcctagggaactcttgtgcaagctaatatatttttttttaatctattaaagattagagaaatgtatacctaaccaagaatgagtaagagtatatgaaaataatggttttggttaagtaagctgactcatttcaatgctaaagcccatcaaaagggtttttttttttttttggttatatacggaggtagaagaaactacactagtttcttcttaccttcttacaggaggccagcagctaaaccttgacctggagtaagagaaagcagaattacttttttcttgtcttgtcttttttttttttttttgagacaggatctcactctgttgcccaggctagaaggtggtggcacagctcactgtagcttacactttccaggctcaagccatcctcccacctcagcttcccaaggagctgggactacaggtttgcaccaccacacccagctaattttttgtgtgttttttatggagagggggtctcaccttgttgcctagcctggtcttgactcctgaggtcaagctatccatctgccagcctcagcctcccaaagtgctgggattacaggtgtgagccactgtgcccagccagaattttacttttactttaaattttttacttttaattatgaaacttttttttttttttaaagagacagggtctcaaccctgttgcccaggccagagtacagtagcatgatcatagctctcgtagctctctgtaactttgaactcttggttcaagtgaccttcctgccttacctcagccccgagtagctagggctatgggtgcgtaccaccaagtccagcttaattacacaactttttatagtacgtaaaaagaatagcttaatgaacttaaatatctccatcaccagcttcagtaattattgccaatcttatttaatctaatacctccatttttgtttctggagcattttaaagcaaactccaaacattacatctcagcacctgtaaatccttcagtgtcagagctaacaaaattaacaacaaagtcttatagtgtctcagcccattttcaaagtctgttgattgtctcaaatatgtctttttatagttggtttatttgaatcaagaaacatacaagttatatattattattatgtctaaaaactttagtggtttttttctaataatagccttattgaggtacaattcacataccataaaggtcaccactttaaagtgtacaattcagtggtggttagtatagtcacaaagctgtgcatccatcaccactctctaatcgaagaatattttcatcaccttttctaaaaagaaactctgtacccattaataaccactctctattcttcctcctcccagccgctggcaaccactagtctattttctgtctctgcagtttttttttgaggggcttcttcaagtatttacatatgtctctctccatagatttgcctattctgggcattttatataaacaaaaataaaatatgtggtcttttgtgtcaggcttctttcacttagtatatgttttcaagggttatccatgttgtagcatgtatcgtaacttcatttctttttatggattaataatattgtatgggcatatcatattttgtctattggttggtggacatttggcttgtttcactttggggcaaattatgaataatactgtgaacattaatgcatacattttgtgtggatatattttttaaataatttcagctcttgttttagattcaggggctacatgcgcaggtttgttacatgggtatactgtgtgatgctgagatttggggtatgatggatcctgtcacccaggtagtgagcatagtacccaacagttagtttttctgcttccctcccaccaccctctagtagtcttcagtgtctattgttggcatttttatgatgtgtggacatgttttcatattgaaaatgttgaattgctgggtcaaataactcatatgtttaattttttggagaattgccagactgccaaagcagctggaccattttacactcctacaagcaaggcacaaaagtttccagttttccacattcttgctaataccatttgcttcaatgaataattattattgttatcctagtgagtgtgaaaaggtatctcatcttgatttgtatttctctaattagcatcttttcatatgctttctggccatttgtctatcttctctgcagaaatgtatatttcaagcctttgcccattcttttttactaggattatttctcttctgttgttaaatcataataattatttatacattctggatattggatctgatttgcaaatattttctgccattctgtgggttgtcttttcactttcttgatgatgtcgtttgaaacacaaatgtttttatttttgatgaagtccaccttacctattttttcttttgttgctaaaccattgcctagcctatggttataaaatatttagacctgtgtttccttctaagagttttatagttttagctcttacactttggtctcagatctattttgagctttttaaaaaattattttgcatttggatatccaattatcctaccaccatttgttgcaaataataatttttgtaattttagtagagatggggtttcaccatgttggccaggctggtcttgaactcctgacctcaagtgatccacccacttaggtctcccaaagtgctgggattacagacgtgagataccgcgcccagcctgatcttttaaaatttcttgcagcaaagttttatagttttccatgtacaagtcttgtacttcttttgttaagtttattggtaaatatttttctggtgctattgtaaatggaattgtttttaaatttctttttcgaattgtttgttgctaatgtatacaaatataattaatttttgtgtattgatcttgtaccttacaaccttgccaaactcattttatgtacatactttgtgtgtgtgtgtgtggattccttaggattttttatatacaagatcatgtcatctgcaaatatagttttacttcttccttttcaaactggatgcctttcatttccttttcttgcctacttgccctggcaagactcgcctatacaatttggttagaagtagcaaaagtgggcatccttgtcttgttcctgatctttgagaaagccttcagtcttttgccatcaagtttgttagctgtgagttttttgtagatgccctttgtcaagctaaggaagttctttctcttcctagtttgttgaatgtttttatcattaatggatattggaacttgtcaagtactttgtctgcttctaatgaaatgaccatgtgatgtctttctttactctgttaatttggtgtattacactgattgagttttgtgtgttggaccgaccttgcattctgtgattaatcccacttggtccagttatataatccttcttatatgtttctggatttggtttaccagtattttgttaaggatttttgtgtctgtattcataaggagtattgatctatagttttcttatgatatctttatctgatttggtctcaaggtaatattagtgtcatagaatgagttcggaagttctctcttctaatttttggaatagtctgtcaaggattggtgtcaattccttaaatgactggtagattttaacaacgagactatctggtcctggcctcctctgtatgctatttttttattattattactaattcaggatctttacttgtaggtctgttcagatttcctatttcttcttatgtcagttttggtagtttgtgtctaagaaattgtccattttgtctagattatctaatatgttgacatacagttgtccgtagtattcccttataatccttgtttctgtaatgtcaatactactgtcccctctttcattcccgattttagtaatttgaatcttctcccttttctactgatcagtctagctaaatgtcagtattgttaatcttgtcaaagagccaactttggattttattgatttttctcagtagttgtttttgctttttaatttatttctgatctaatctttattatttccttcctcctagggctttctacttatatacatgtatgttggttgcccttgatgaagccaactgtgaaatcatggaattataatatgctagctaggagagtgatctaggccagtgcttctcaaactttaatgcacatacagattgcttggggatctagttaaagtgcaaaacctgattcagtggtagtgttgaagtctacagcttcccttgtctaaaagctttcctggttatgccagtgttgatgttctgagaccagagagtagaaaggatctagttcatttggtatcaatcatttgtgggattttccaaacagaacatgtcatttctctggttccaggtatattaatatgtctctccctttgagaatcagtgctgctatatgtcattatgactattatgaatgtgcatggtttccaagggaaaaaactgaacaagcccaaccctctcattttactgatgaggaaattgaagcttcaaaggggtgagatttcttgcctgaagtcatataataggttaattggctccatggatgagtatattaatcctttctgatgacaagtcctaactcagtgaagttcatcattgattatactgttaccaagaaaaggtagcaatgaggacaagtaaatttatggttaatttttttttttttttcgagatggagttttgctgttgtcgcccaggctggatggagtgcaatggcacaatcttggctcactgcagtttctgcctgccgggttcaagtgattctcctgcctcagcctcctgagtagctgggattacaggtgcctggcaccacacccagctaacttttgtacttttagtagagatggggcttccccatgttggccaggctggtctcgaactcctgacctcaggtaatccacctgcctcggcctcccaaagtgctgggattacaggtgtgagccaccaagcctggctggttaatttttttgactaacccctttaacagatttcaatccagagaaaatgttacttaagtaaattttcttattattgagtagaaatatgatacctgagacgccattaagaatagatagatatagttatggatatagatatatagatattctaagggtcctaagactctattataatttttttttttttttgtaaatgaggatagaataaaagttcatgattgtctcatacaaataagtgtcatcaggctaactaaatggtgttttattacaaggtctttttcagtactttcacttctttctttcacaattaaggactcattttctgtccagttttatacgctaaggtctttttagtactttcacttctttctttcacaatcaaggactcattttctgtccagttttatactctaagaacaattattgcaaaagttcaaaatagatttatttaaaattattgttcttcagtcattcccaacatagagtaagcttttctttctatatgtttctgttagtttgttgtttttaatctcatattaaagcttttttttttttctttttttcttgagacgggggtatcactctatctcccaggctggaatgcagtggtgtgatcttggctcactgcaacctccgcttcccgggttgaagcgattctcctgcctcagtctccctagtagctgggattacaggcgcctgccaccatgcccagctaatttttgtatttttagtaaagacgaggtttcactgtgttggctaggctggtctcaaacttttgacctcagatgatcctccctgagccaccgcgtgagccaccagcgtgagccactgcgcccagccaaaagcttttacacatctttgaaaagtcttctgtgtgataaccattttgtttcttatataagataaaagctttaatctgttagataataagaaaattctgaagaataactatgattgtgctacatattaatatcaattattctctgccaagaattgcatataacatacttaatactaatattaaatatatctttcttttccttcaattatttagaaaacatttcaagattttgctgtatgaacattagtcattgcattataagaagataaaatggcaccttggtgacatgatttgttttcagaacaatatgactcactgtcactgttagctatatgacttcagatcacttttatcatcactattaactaaatgagctacatgactctgtaaagtttattaaaatacccttatatggaaattagcagtcttgaagagatacagtgaagaatcacatgctttttgaaagaacattgaggtcgggtacggtggctcatgcctgtaatcccagcactttgggacactgaggcgggcggatcacgaggtcaggagatcaagaccatcctggctaacacagtgaaactccgtatctactaaaaatacaaaaagttagccgggcgtggcagcaggtgcctgtagtcccagctactcaggaggctgaggcaggagaatggcgtgaacctgggaggcggaacttgcagtgagctgagatcacgcctctgcactccatcccgggtgacagagcgagattctgtctcgaaaaaaaaaaaaaggaaaaaaagaacattgatttgagaaccagtcaacataatgtattattttaactatagtcacttccacatgatttctttagtccagtgctcttgctgtattccccaccaatgtgatctgcaccatcgtccatctaatcgccaaaactacaaatagggaagttactctccattctccttgactatgtccagatagtcaagctatgaaatgctaacgttctaccccagaatgtctctccatgctgactccctcttctccatacagccccactgctctagttctaccctttattatttattttcctctgccattgcagtagacccttacttgcccctcagctttgagttcatgcacccttccaatcatcttccaaaaggatgcaagaatggcttctctaaaattcaaatttgtgacatcacatcccacgttaaagtcttcactgactttaaggtgaaatctgtactccttaaacaaggtccttagcagtctgcccttgtctctttctcttgtctcatctctaatacttaaacccctggcattttttcagtgttgtttttcttctgtgtatgttatgttcttccatacttctgtacctttacctaagctattccttccatcctgttcccttcacatctctactgctaccccttccttacgtgactcctttctttttatcctttaagattgaactcaaaagtctcatcctctgaggatttatagaaacacacggggcccctaaaattgaaggaaaaatagggagccaggtcagatacctttctcctatgcatattcccctggtatcctgtatataccattgttggagttcttactgcagtgtagttgcagtacttctcagtcttctccacagaagtgcacccaatgtcagaggaaattgtattatgcttacagcctgcctgaaaccctaaattaatgacatcaattatcttagttttaagaaatgtagaaaactaacatttccatagaataggtttatgtcatttaacaaaaaaaaaatttttttaattagctgggcatggcgacccatgcctgtaatctcattactttgggaggctgaggtgagaggatcacttgatcttaggagtttgggaccagctgggcaacatagggagaccctgtctctacaaaaaataaaaaaaaaattagccgggcatggttgcacacacctgtttattatcccaggtactcaggaggctgagatgggagaatcacttgagcctgggagattgggactacagtgagttgtgatcgtgccactgcactccagcctgggtgatagagcaagatcctgcctcaaaaatcaaaacaaaacaaatggaacatttaaaattatttgttctgggccgggcgcggtggttcatgcctgtaatcccagcactttgggaggccgaggcaggtggatcacctgaggtcaggagtttgagaccagcctgaccaatatggtgagaccctgtctctactaaaaatacaaaactagccgcacgtggtggcacatgcctgtaatcccagatacttgggaggctgagacaggaaaatcacttgaacccaggaagacgaggttgcagtgagccaagatcgcgccattgcactccagcctgggcaacaagagtgaaactccatctgaaaaattaaaaaattaaaataaaataaaatatttgtcctggaataaaattgatctttgttaaatatgattatgtttatcctgaaatttcaggtgtttgctgtacactgccctatttgttctctataagtttgtattaaccaactgcgataaatagtaagcactttgatggcagggactaagtctattattacctctgtatttctagcattaaaacaatatctaacacatagtagatgttcaatatgtattgaaaaaaataattgcatgaaagttctctattggaatgatagtgttaaatgccagtgttgtgaacattttaaaattttaaatcatttttctcataggaaaagcttgactgatgatatcatgaaagtcatgcatgttttaaaatggctttctggcttatacaatataacagaatctttttttactttatatagttaaaagtacaaaatacacagaaaagaatcctatattataagtattcagctcagtacaatgttacacacacaacatgcttgcataataaacacccataccaacaaacagaaattcacctgccctcagaagcccctccatactctgtcaggtcattgcagccctttttaacaggataggttagttttgcaaaatcattttacacttgaatagtatttaagacaagtaatgttgaatagaaaatattctgtgacaaatcaggttaatgatttaatattcattattagcagccaacattatttgtaggccaggtgtagtggcttatacctttaatcccagcacttcgggaggccaacatgggaggatggcttgaggccaggagttcaagaccagtttgagcaacatagcaagactaaatagccatacttttgtatactattcagcacaaaaatgttaataataagaattaaataatactcattttagcttttgtgttcatttacaatgagcaatatattctttttaaaatttttgatgtgtaataattatacatatttagggatacagactgacattttggctcatgtatacaatgtaatgatcaaatcagggtaattagcatatctcttgcctcaaacacttatttattaattttgggaatattcaaaatcctctcttctagctatttgaaaatataaaaaaaaaaaaattattgccaggcgtggtggctcacacctgtaatcccagcacttgtgggaggccgaggcaggtagatcacgaggtcaggagatcaagaccatcctggttaacacagtggaaccccatctctactaaaaatacaaaaaattagcccagcgtggtgtgggtgcctgtagtcccagctactcgggaggccgaggcaggagaatgacatgaacccgggaggcggagcttgcagtgagccgagatcgtgccactgcactccagcctgggcgacagcaagactctgtctcaaaaaaaaaaaagaaaattattgactatagtcaccatacaatgctacagaacactagaacttactcatcttatctagttgtagctttgcatctgttaaccaacctctccctatcttcccctcctccatactcttttcattttctaataatcacaattctactctctacttctatgagctcaacttttttagcttccacatatgagtgagaacatgtggtatttatctttctgtcccagacttatttcacttaacataatgtcctttaggctcatccatgttgccatgaatcataggatttcattctttttatggctgaatttgtgtgtgtgtgtgtatgtgtgtgtgtgtgtgtgtgtgtgtgtgtataccacatttctttattcatgttgatgacacttaggttgatttcatatcttggttattgtgaatagtgctgaattaaacatgggaatgcagctatctctttgttatatcgatttcctttcctttggataaatatctggtagtgggattgctgaatcatatggtagttctacttttagttttttgaggaacctccgtacagttttccataaaggctatactaattgacattcccaccaacagtgtataagaattcccttttttctgcatccacaccagcattttttattttttgtcttgttagtaatagccattctgagtgaattgttacttttaagctcttatctctaacaatcaaattactataacagatttttgtttcactttcatttgtttagattagtagttctcaatgtggaaggacctgatttaatctcccaaagaatatttggcagtgtctggagacatttttggttgtcttaacccaccaaaaacagttgtcagtgctactgacatctagtgttacccactactgggttgctgtgaaaattagttttcagaacagagccccataaaaatgaattatctagcttaaaatgtcaacagtgccaaggttgagagtagtgttttttaaagaatgggtaggttgtttatgtttgatggaagttagtttaaatagattgtagcaccttactaatggagtccatgatatcagaaatttaattcccatagacgctagttaacctgtctgtagttcatgcactccagacctcagccagatgtcttaaacatttctgctgcagattataagaagaacaagatgagaaaatgtagatgggttggtataaatctatcactacttctggaaaaatgtctcaatatgatattttttacttaacccaagtctatctctcaccacatgactagttctcactacgttggaatcagcttgtaaactttgactagcagcattgtttaatcttgttataagttcctgaattaatggtctacaggcttgaggcagagtgaatgcctcaaagttatgggcaggcagttatctagtaccaaccatagtctcctgccatctattgggaggtgtcaggtgggaaggctagtagccctctacacatattcatacccacaccccagctctattttttttttttgagtaattataggaggtcagaaacactagaatgtacatacatgctggtaataaatggaaattaatatctgatagttttcttcatggctgtctttcagggcatagttttccatgtattttgctgtcctcttgtgagaatactacccttgacaagttgatctacatttaagctatggccacatttaaactatggccctaaaacatttgttgttatgcaagaaagaattaatggtgatatataccaattctgactctcacataaagtgtttctccaaaagtaacctcagacaacataacaacaaaccaagatttatatagttggaattgcaaatccgtaagtccttaaacttaatgagaagattaatttggaatttgaccatttgactctgctcatttaactttgaaagcagatataaataaaaaccttgtatgaagaaaattgcttgggataatttgcattaaacagtctgttttttgctaagtggcttatttgtattatggaagcatagccttattagtatttttagtcttcctaagaagaaatggaatacatcatagagctctaggccttctttagttttcagtacaaatttggtatatttggtgtttgggaggatatacatggcataaggtaaagagagcattagctttcacgtcagatccaggtccagattctgccacttataaactgttacaccttggaccacctagctattatgggcctgctttagcaccggaaagaagggagaatacctaaatatgatgagagaataagtaggtaaaataatcatgtaaaagaatggtcaggaggagtctggcctctggctctgtcatttattattgtctgtgcccatgggccggctgcaactatttgattgacctaaaatgggatggtgacttgcccgaggtcatacagtgagtcagggcagagcagctgaagctttactctctaagtctcattttccttccctgtaaaattgttgtattggtgactgtctcacagcatgttgtaaggagagatggagatcataattgtaagaggtagcccacagtgctggcacagtgtaagcaccaataaatgaaggtaatgagtacaataaaatgtgtcacttagcccctttccccaaatagtttatccatctggttgatgagagccatacactgtatgctaagacttaaaaatgtgggagttgattaagttctagtactgcattatactaataatgctagtgcatagtttaaagaataataaaataccataatgcaaagtttgtttaagccctttaccctttttttcctacattggggctttatttttagagcacttcacaaattatgcagagaaaagaggggtaggcaagaatggaagcagagagagcagtgtgaaggtagtacagtagggagttatgacagatgcttaggttagggtgatagcagaggtggtggtgagactattaaaagactactcagccaggcatggtggctcacgcgtattatcccaacactctgggaggtcgaagtgggaatatcgcttcagctcaagagctcaagaccagcctgggcaacaaagtgagaccatgtctctacagaaaatacaaaaattagccagtgtgatggcgtgcgcctatagttccagctacttgggaggcagagacagaagggttacttgagcccagaaggttgaggctacagtgagctatgatcatgccactgcattccagtttgggcaacagagcaagaccctgtctcaaagaaaaaaagaaagaaaagactactcaaggcttgagatttgataaaatagttcattttactgcttcattgaggatattcttaaaggaaactggcattttttttcacagtgagtacatggtggagaagaatacaactaatactgaattttaaaatgtgctatttctagtaaccagccttcatcttcttcccctttggctgcagatcctaattatctcatggctaatgaacgcatgaacctcatgaacatggccaagctgagtatcaagggcttgattgaatcagctctgaacctggggaggactcttgactctgactatgcacctctccagcaattctttgtggtgatggagcactgtctgaaacatggcttgaaaggtaggccatcaccccaaaatgcaaatatgcatgcagctgttttctagcaatgcatactatagaagaaagcattctttgtggagccaaagaataagaggcttgaattaataatattaatccattggaatgcagtcttttataggagcagggttatggttgactcaatggacttatagggctttaaaaatacagatcattaaatgttacagttggaggggccattataagtaatcaagtacagtacagtagttctgtttgacaggtggaaataggcctgcccagaatgagacatgacttggtcaaggtcacacattgagttgtggcagagtaggtgctagaactcaggtctcccgactcttgggtcagtgttctttccacttaactataagcttttgagggcagtaactggtcttgttcacccttgtttcctttcttcttgccttctcaatattcttttcttgttgttttttgtttgattgttttttttaaatctgtatgcctatgcttaccaacttcccaatattccatagcctatttctggattacatattcttttctattgagctgttttcttcattaataccacacaattttaggcactaaattgttaaaatgttttattatattatagggctaggccacaaactgtttgtgaaagaagaagggctgagtcttgggaagtagagaatttttttattttcacaaaatattatctattctaaaagcatgaatgaatccaaaaccatcttataacctaggattggtttcctgaaaagttgtgtgtgtatgtgtgtgtgtattgagagtgcgcttatgttgtaaagaatattaaaatactgctttatttttgttgccttagctaaaaaaacttttctcggacaaaataaatccttctgggggcctctagaactggtagaaaagcttgttccagaagccgcagagataacagcaagtgttaaagatcttccaggacttaagtaagtctaaggttgaattccatttctcaggaacagcattcttattaactatcccttgaagagcaagactaaagacaattatgtacgaataatttattttataacaatccaaaatgcatgatgtcatgaataggtgctgacaggagagaattggtatacagaatattgagaaaaatgtgctcttgagggataattattcatctaagagagattgtctttttgttgaaatgccaaacatttgcttattttttaaagcacttgggagaatcatatctaagggggtggcatgctgtacttgacttagggaaaaaaggtattcagtgggtttgagagtcaagattaaaacagctgtcaaattaacctgaagagctagtgactgtagcctgccttagaactataaagtagtgaccaccttcccaaatgagactggtttaattttaatcagacagaggcctagattgcctgtgtccacattcatgctttggacatttatataatccacactgaatttataaggatttgctattattgatctgatggaacatttttagttgggtctcccagaggctgtgtcttcaaattgtagttacattcagtaattctttttgaaagcatttgttccgggtcacattagcccacacacaaaaattccttgcatgggaatgtactgggagaggtcctgaggagcacctcagtgtgcttgttacactggaataccattagcaagaataagtgaactgattctactgtagcctttgcttctggtgcttatgttttcagttgtttgatttctgtgtttttgtaggacaccagtaggtagaggaagagcctggcttcgtttggcattaatgcaaaagaaactttcagaatatatgaaagctttgatcaataagaaagaacttctcaggtatgaacaccttcttgaactttcttctttccttggtatgttctacatcgtataaagtcaaaccatataagttcactatttttgtagatcagaaacatttgattcataacagcttcactgatactttctctcatacctcacacacatatcctcccaaatggatgatttatgttatgtgtgttctgtctgtcactgtggcatatattggtcctttccaaggcaggccaagacttacctctagaaaacagaaggcaccttagcatgtgcccaggctcaataagacaagaacttgacatgtagcattaaattcaaatatagcacaaaattggacgggtgcagtggttcacgcctgtaatcccagcatttcgggaggccaaggtgggcagaccacttgaggccaggagtctgagaccagcctggtcaatatgtcgaaaccctatctctactaaaaaaatataaaaattagccgggcgtggcggtggacacctgtaatcccagctacttgggcggctgaggcacgagaatcgcttggacctgggaagtagaagctgcagtgatccgagagcgtgccaccactcttcagcccgggcgacagagtgagactctgtctcaaaaaaaaaaaaaaaaaatgtgtatatatatatatatatttgtaaaatcacaaaatcttccagtagatcatagatacaactgggagaggcaaaacaacattattttatccgtctttattatatgattccattgtataaaggtcaaaactaggtaaaatcaatctatggtgatagaaatcaggataatagttaccttgaagaggtgggggtagagattggaagagagaaagaatccgatttctaggatttcagtactgttctctttcctgatcatgatagtgattacacagatagatgtgttttttgtgaaagttcatggaactaacagttagctgagatttggaaatgtgtgaatgttggaattcagccatattccacttctgaacagttcataaggttaggcttttgggacaataaactgtcaaagaaccttgttcattccagttctactcagtttccttcagaggctatcaaagaacaaaaatagcatgtgatcagtttttgagagaaacagtaaatttgcagctcattcacttgctgtttttgtgctattttgtcatttgttaatatcttttttttttttttttgagacagagtctcactctgtcaccaggctgtaggctgtagtgcagtggcgctatctccactcactgccacctccgcctcccgggttcaagcgattctcctgccacagcctcctgagtagctgggactacaggcgcacaccaccacacccagctaatttttgtatttttagtagagacggggtttcaccgtgttggccaggatggtctcgatctcttgatctcgtgatccacccaccttggcctcccaaagtgctgggattacaggcgtgagcccagcctattaatatcttttatagtgaatcagaaaagaaataaggaactaatatcagtgaattatattgattgttaacagtgattgaggttgacctttacccccaggtaacttgttgaaaacaaattgattgcagtgttgttttaatcatgatgtcaaattgactgaaaatgaataattcaggtcactgggttttcgtgttttgttttgttttgctttaagagactcgcgctctgtcacccaggttggagtgcagtggtgcaatcacggctcactgcagcttccacctcccaggttcaatcgattctcctgcctcagcctcccgagtagatgggactataggcatgcaccaccacacctggctaatttttgtatttttagtacagacagggtttcaccacgttggccaggctggtcttcaactcctgacctcaagtgatccacctgcctcagcctcccaaagtgtggggtttacaggcgtgagccaccgcacccgcctgtttccatttttttaaaaaatctaaaagactattttttagagtggttttaaatttatagcaatattgagtagaaggtacagatatttttcatacatacccttcccccctgtacaacctccctcattatcaacatcccacaggagtggtacatttgttacaattgatgaacctacattgacacatcattatctcccaaagttcatagttcacattaaggtttactcttggtattgtatgttttatggattttgacagatgtataatgatatgtatccatatgtcattatagtaccatacaaaatagtttcatggccctaaaaaatcctctgtgctccacctattcatctctctgtcctccaacccctaataaccactgatcgtactgtgattgtactgttgttaccaggggtttactgtctctgtggtttttccttttccagaatgtcatgtagtgggaatcatagagtatatggccttttcagactggcacctttcacttagtaatatgcatttaagtttcctctgtggcttgatagctccctttttttttgttctttgagacagagtttcactcttgttgcccaggctggagtgcagtggcacgatctcagctcaccgcaatctccgcctcccaggttcaagtgattgtcctgcctcagcctcctgagtagctgggattacaggcgtgtgccaccatgcccggctaattttgtattttttttttttttttttttttttttttttagtagagacagggtttctacatgttggtcaggctggtctcgaacttccgacctcaggtgatccacccgccttgacctcccaaagtgctgggattgcaggcgtgagccactgcgcctggcgatagctccctttttttagtgctaagtcatatgccattgtccattcatttactgaaggacatcttggttgctcccaaattttggcaattaagagtaaaactgctataaacacatgtatgcaggtttttgtgtggacgtaagtttttaactcagttgggtaaataccaaggaatgcaatagttagatcatatgaattacatcactggtttttttgtgtgtgtattagtaatttaggtgcattataagcagtatttaattatctatgggtcttcacgaatttttttttttgagacagagtgttgctctgtcacccaggctggagtgcagtggcacaatctcagctcactgcaacctccgcctcctgtgttcaagcgattctcctgcctcagcctcctgagtagctgggattacaggtgtgcaccaccacacccagctaatttttgtatttttagtagagatggggtttcaccatgttggccaggctggtcttgaactcctgacctcaagtgatccacccgcctcggcctcccaaagtgctgggattacaagcgtgagccaccgtgcccagccaataatttttatccattcagatttttttttgtttttagtagagatggggtcttactatgttgctcactctggtctcaaagtcctgggctcaagcagtcctcccgccttggtctccccaagtgctgggattacaggtgcgaaccaccatgccgagctaccaaacaaatgttttaagatgcataaaagattgcaaaattatctgatggtgcatcacaagtacaaatatgtcagaaaagtctgaatacctgcttcaaccacaatactgttcagtcacgtctttctgccagcctattatttaaagaatctattcatgcgcctattatttttttcttttaaaaaattttttctccagtgccacttgccaacatccacctattattctaaaagtaaaatatttactaaagcctttctttttgtagttttttttttactatttttgtagatggctataatcaaccatgatgactatgattcaaccatgaatcaaccatttttgtccttgtctctggatttttgagatttttgttacaataaggaattctgtggatttctcttacagtgaattctacgaacccaatgccctcatgatggaagaagaaggagccataattgctggtctgttggtgggtctgaatgtcattgatgccaatttctgtatgaaaggagaagacttggactctcaggtatgggaaagagactcattcccatgggtgtcactctgagttctgctatctcagaagtggatttgattaggttataccaaccaaattaggccatattctatgagtcataaacaggatttccttccattttgatgggaatataaaaaaaagattgtttttccttccagtttggctcatttatacgttacgaatgttttttagattcttgtcttggctgtactctctgttaaacatacatatacacacacacacatacacatttacatacacatacatacacacacaaacacaggtatacccagagatattgcaggtttggtttcagatcacaacaataaagcaaatatcataataaagcaagtcacatgcattttttggtttcccagtacatgtaaaagtttgtttatactaggccaggtgcgattgttcacacctgtaatccctgcactttggggcaggagtatcacttgaacccagaagtttgagaccagcctgggcaacatagtgagaccccgtctctacaaaaaataaaaaattagctggttgtgtagctacttgggaggctgaggcaggaggatcacttaagcttgggaagtcgaggctatagttagccataattgtgcattccagcctgggtgacagtgagaccctgtctcaaaataaaactctaaaaaaaattttttaaataaaaagtttgtttgcattatactgtagtctattaagtatgtgatagtgtaagtgtaaaaaataatgtacataccttaacttaaaaatactttattgctaaaaaaatgctaacaatcacctgagccttcagtgagttgtaatctttttgctggtagagggtcttacctcagtgttaatggctgctgactgatcttggcagttgctgaaagttgaggtggctgtggcaatttcttaaaataagacaacaatgaagtttaccacattaattggcttcctttacaaaagatttctctgtagcataccacgctgtttgacagcattttacccacagtagaatttctttcaaaattggagtcagtcctctcaaatcttgctgctgctttatcaactaagtttatgtaatactctagtaaaccatgctgtaaacagatgtgctgtctttgttgtaccctttatttttgttttgtttttgtttttgttttttgttttttagagacagagtcttaatgtgtctcccaggctggaatgcagtggcaccatctcagctcactgcaacctccgcctcctgggctcaagcaatcctcatgcctcatcctcctgagtagctggactacaggcatgcaccaccacacctagctaatttttttatttatagtagagatggggttttgccatattgcccaggctgatctcaaactcatggcctcaagtgatctgcctgccttggcttcccaaagtgctgggattacaggcatgaaccaccatgcccagcccactattccatttataaagcataggcagagtagatttagcatcattcttaagggccctaggattttcagaatggtaaatgagcactggcttcaacttagagtcaccagctgtattagcctctaacaagagagtcagtctgtcctttgcagctttgaagccaggcattgacttctcatctatagctatgaaagtcctagatggcattgtctaatagaaggctgttttgactacagtgaaaatctgttgttgagtgtatccaccttcatcaattatcttaattagatcttctggataacttgctacagcttctattatttacatcagtgcttgctgcttcaacttgtacttttatgttatggagacactttccttaaacctcgtaaaccagtggctgctaacttcaggcttttcctctgcagcttttttacctctcaatctccatagaattcaagagcattagggccttgctctgaattaggtgttggcttaagggaatgttgtggctggtttgatcttctatacagaccactcaaactttattcctgtcagcaataaggctgttttgctttcttgtcattcatttgttcatgagtagcacttaattcccttcaagcacttctcctttgctttcacaacctggctgtttggcccaaaaagcctaccttttggcctgtcttctctttcgacatgccttcttcactgagcttaattttttctggcttttgatttaaaataagaaatgtgcaattcttcctttcacttgaacacttagtggccattgcagggttattaattggcctaatttcagtattgttgtgtcttagggaatagggaggccaaggagaagggagagagatgggggaacggccagtaagtagagcagtgagaacatacacatttatggattgcttgccatcttatatgggcgtagttcatggagccccaaaataattttgatagtaacatcaaagatcactgattacaggttatcatagcagatgtaataataaagaaaaagtttaaagtactgtgagagttaccaaaatgtgaaaccgagacatgaagcgagcacatgctgttggaaaaatggcactaatatacttgcatgacgcagggttgccacaaaccttcaatttgtaaaaaatgcaatatctgtgaagcaaagtgcaataaaatgaggtatgtgtgtgtgtgcgtgtgtgtgtatactaaaatatatgcagttgactcttgaacaacagagtaaggcattccacatggtagaaacatcccacatagaaaattcacctaaaacttttcattccctaaaaacgttaagtactaatagcatacgattaaccagaggccttactagtaacataaacagtcaattaacacatattttgtatattataaatagttatatttatatttattttattttatttttgagacaaagtctcactgtcatccaggccggagtgccgtggagtgaactcagctcagtgcaacctctgcctcccaggcttaattgatccttccacttcagccttcagagtagctgggactataggaacatgctaccacacccagctaatttttttgttttgtggagacagagtttcgctatgttgcctaagctggtcttgaactcctgagctcaagtgatcctcctgcctcggcctcccaaagtgctgggattacaggcatgagccatggcgcctggcctattgtatatttcatatgctgtattcttacaataaagtaagctagagacaagaaaatattataggaaaattataaagatgagaaaatatatttactattcatttaaatgaatggattatcataaaggaaccagatcatcataaaggtcttcacactaaccagattgatgaggaggaggaggaagaggaggcggttggtcttgctgtctcaggagtggcagagatggaggaaaaccttttttttttctgcctggatgacagagtgagactttgtctcagaaataaaataatataatataaatatatattttatattgtgtatatatatagtatataggtggactcgcacaattcaaagtcgtgttgttcaagaatcaactgtacagttgtccttcagtgtccaaaggagattatttccagcacctccatgaataccaacactcacaatgctcaagcccttacagtcagccctctgcgtccttggattttaggacttgctgagaatgagagcgaactgtactaaaggccattaaagcacggtagttaagagtaaaggctctgaagctaactgcctaggtttggattctggcttcctcattttctagctgaatatattttataattacttagtttcttgttgtttcagatttcttgatgtaatgcagttagaacagggcctagtacacattaattgcccaataaataatgttttcactttaattacttctcaccctttctgtatgaaatactatgacaaacttctgttatgttttattctggtaaaataggaagggaagtaagattttttggtgtggattttttttttatttttttatttttattttttttgagacggagttttgctcttgttgcccaggctggagtgcaatggtgagatcctggcttaccgcaacctccacctcctggattcaagcaattctcctgcctcagcctcccgagtagctgggattacaggcatgtgccaccacacccagctaatttttgtatttttagtagagacagggtttctccatgttgttcagtctggtctcgaactcctgacctcaggtgatccacccgcttcggcctcccaaagtgctgggattataggcaagagccactgcgcccggcctttggtgtggatttttaaaaagaaataagctaaataataaaatggcaatcttgaaaaatgaagacgtgtacatcaatgaaagtttggaggaacagacaccaaaatattagcaatggtcatcttcagtggttgggattatgagtgtttaatattacttccccttttttttagctgtattttctgaaacttctacaggggaaatgtgctaatttttaaaaagttatttctaaaaatgaacagggattcagtagcagaatacccgaaataagcaaaagagaaagaaactttagaccttatttatattaagtattctgttgactgtgttagttgtgatctagtcttctagtcttattgacataatcttgattctttacttccaactcttgttaattcttgattaaactgaaagtaaaacagtacatttttaatcgtaaatttctagtaagtgtcatgactgtattactgttttgagtgcctagaaggagacattgtgttatgccttgtaaagaatatctaattttatattaaaacctgaaaattctctctgtaggttggagttatagatttttcaatgtatctcaaggacgggaacagcagtaaaggtactgaagggtacgtacaaagaaaattagatttcttttctcctgatgtagcattttttttcctttggtggtacttaaagtttacaacaatactgttttaacagacgtgctgaaagaatttctgatcatatagctttaataaagtcttgccagaaatatctgactattacgcctacctctaaaccctaaaaggatttttttgtttgtttgtttaatgattttcctgctatgtggttcaggggcaaagaaaatacaaattttctaaaggattccaattctccatgtcttatagtagggtttaaaaacatggtcattttgaccagaggagtcgcattctcagtttgcttaaaattggcaatatgaaatatgcactgtgaggttatgtaaaatattgacattaggggaaactgattgaaggtacatgggaactctgtgctgcgtttatacctcttcttgtatatctaaaattgtgttaaacacttttaaaatattcattatggtacttagtaattagagatcagaagcacatctattctttttataaatttagccattgaaagcataattagtctgatttttaatttttgacattgagctaagattatctcactgttcttttagtaattgtataggtttggggccttaattttatcttacagctgaaaaatctggctgtttatcttttgtctactacagattagttggttgtagacgtgaaccttctttatccacagtttaatttttcatgtaataataaacatttgggccgggcatggtggctcatgcttgtaatcccagcactttgggaggccgaggcaggcagatgacctgaggtcaggagtttgagaccagcctggccaacatggtgaaaccccatctctacaataatacaaaaaaaaaaaaatagccaggcattatggcgggtgcctgtaatcccagctacttgggaggctgaggccggagaattgcttgaacccgggaggtggaggttgcagtgagccgaaatcacaccattgcactccggcctgggtgacaaagcaggactctgcctcaaaaaaaaaaaaaaaaaaaaaaaaaaaaaaatatatatatatatatatatatatataaaataaacattcaatcttcgtgaaaccctttttaaccattcactttaaatgttaaatagcacttacagacaaatatttagcccttgagaacagctatattacatcagagtgagcttaattcaagtcctatgacaattggaaagttgttactataaatactactagtgaagctgaaaaacctattaacaagaaaatttttatcctttaaatgcgtctaatagattgcaacatcatacctgtgacctaaattattaatactgaggtttgtaagctataacaagagctttattagtgaggggttttgtcatttttaaactcctgactctttcttgttgctatgtcaagagggttttacatcaaatctgtcttatggttcagtgtatctgtgccacaatttttttctcatgttttatgaaaagatggggtggggtggggttgggatcttggtatttcttatgttatttattttatttctattttcttccccttcccccagagacggtcagattactgcaattctggaccagaagaactatgtagaagaactgaacagacatttgaagtaaataatgaataaatatattactttactggggaattgttgaaggagaagggaagagtaagatgatgcgcagtgaggataaattcagacagtgttcaacaaatatatgtagaattcctgtttgccaggcactgagttaggcactagataaataaatggcatttaacagttttggtgacctttagtgaaaggcagtatataatgttatatataatatataataacatagtatataatattacgtatgtaattataactctagtgattaaatagataaatacgtaaatacattcagttaagaattttaaaatatgtgacatatacagttgaaattggtagctttttcagtttagtagagatagctgcatatttcagaactgatcttgggtaaaccactcattacattagtacctttaaattaatcatatcgtccaggtgtgctgggccaaagcctgtagtcccaacactttgggaggccaaggcaggaggattgctttagctcaggagttcaagatgagctagggtaacatagcaagaccttgtctctattaaaaaactcaaaactagccgggcatgtgcctgtagtcccagctacttgtggggctgagacaggaggaggatcacttgagcctgggaagctgaggctgcagtgaaccctggtcttgccattacaccccaccctgggttacagagcgagacactgtcttaaacaaaaaaaaaaaaacgaaaaaaaagatacatgctttgttttcctgcatttctcatttatacattgaattaatagcattaatttaatatataaattgaatttctttgccattattacagttaattcaccaagtattcacaaagtacagtagttcccccttatgtggaggggatacattctaagacccccaaaggatatctgaaaccacagatagtaccaaaccctatatatgctatgttttttcctatacatatgtacctatgataaagtttaatttataaattaggcaaggtaggagattagcaacaataataaaataaaacaactttaacaatagactataataaaagtaatgtgaatgtagtgtctccctcaaaatcaacacatccttttattttgttttcattgaacttcttcttcctagttttctcaggtttttttcccccttcagttttctgtatttatatttcttattgtccttaaatgactatggctattctatatctgagcacagtgaataaaacattaaagtttaattaaaaattaaagaggccgggagcagtggctcacgcctataatcccagcactttgggaggccgaggcaggcggatcacaaggtcaggatatggagatcatcctggctaacacggtgaaaccccatctctactaaaaatacaaaaaaaattagccgggcgtggtaccaggcgcctgtagtcccagctgctcgggaggctgaggcaggagaacggcgtgaacccgggaggcagagcttacagtaagccgagatcgcgccactgcactccagcatgggcaaccgagcgagactccgtctcaaaacaaaacaaaacaaaacaaaaattagagaaagaaagcattagaaataccagtttcaagattttgtgcattgagaaatcattatttccaaaagattttctaagggccactgtccttacgacaattcagtgttgtatatatgttcacagtttatttttttatcttaggagaagtaaaaatccttactggataatccttatttatttgtgttttttaaacatactcatacttccctctattgtttgtgtcatagagagcacaaatcagatttggacatcttatgtgggatttaaacaaatacgtttatacatgagtctatcaaaatccttatttacatgtaagaaaaaaatacatgcccagctttgcccaaggaagtcccagagggagaacagtatcttattgtactattcttacctatttttgaaccacagttgagtgcaggtaactgaaaccacagaaaacaaaactatagataagagaggactactgtattttcagaattttccagaacataaaacagtttcctctctcctgagaagagctatccaaaagctattggtattctcaagtactttgatgttcttgttatgttaagactactgaataattttgaagaataattaatatattcattaattatcttgtttgtagttctcttatgaaaaatagacatttttaatttaagtaaaacttataatatgattatactactgtcagtaaaattttaagtagtcttggttccacctagcaaattcaaaacaatttaagtacattttctctggggaccaagaactaatataatgactttaatgaactatggagatgttagccaagcaaagatatggttacagttaacaatgaaatataaacaatggcactattatttactctttctatgccttagtttctttatctgtaaatgagaatacctaacataaagggttgttgaaaggaataaatgcaataacgcaaataacgtaatttagaagagggtttggtgcatgtaagtatttaattcatatagactgttattatcatatgtagataaacaaagtttattctgtagggaatgaactcttttatttcattgaataaatacttactgaattaaaactcaaatgccaaagataatagccttttgtaagcctagaggtcaagatttgtgagcattaaggcctggcgcagtggctcatgcctgtaatcccagcactctgggaggccgaggcaggtgggtcacttgaggtcaacagtttgagacctgcctgggcaacatggtgcaaccccatctccaccaaaaaatacaaaaattagctggatttggtggtgcatgtctgtagtctccagctacttgggagactgaggcaagagaatcacttgaacccaggaggcagaggttgcagggagccgagaatcgcaccactgcactccagtctcagcgacacaacgagactccgtctaaaaataataataataataaaataaaaaattatgaacattagacaatgaaggataagtgtgaagggtttaaaaaggaaggtacagagtattgtctgtttttcaaaagtgacttttttttcttctctatattatagtgctactgtaaacaaccttcaggcaaaagtagatgcattagaaaaatccaacactaaactgacagaggaggtaagttttggaaatgctttgattgacttatagaatttaatatgcattagtagaaccaataattttaatgtaaccttggaaagaaagaacttgacttttcaaataatattgactgtagtacataacttcttattctttttttttttttttttttttttgagatggagtttcgcttttgttgcccaggctggagtgcagtggcgcgatcttggctcaccgcaacctccgtctcccaagttcaagcgatgctcctgcctcagcctcccgagtagctgggattacaggcatacaccaccaccccggctaattttgtatttttttagtagagacggggtttctccatgttagtcaggctggtcttgaactcctgacctcaggtgatccacccgcctcagcctcccaaagtgctgggattacaggcgtgagccacctcgcctggcccataactccttattctgactagaacggcccagttggcttattgcagggatctcatttacccaattagactgtgtaggggcatgttgccaggttgatggagtatcttggtttctttcgtgtgcatgttttgtctgggctagcctagattaaatgtttagcatatagcatattcatcatttattcagtaagcgtttcacacagtttatgtgcaagagctagacaaatatttatatgtgccaggcattgatttatgttccagattggcaaactccccaccacttatgtccttgttttcttcctgggacagttacatagataaggtgaagagtactggtcagaagatcagtaatccctgcctacaaatcatgcttatgtaactcatgtgctcctgagtaagtcagccacttgacctccaagaggctgagttccgtcactggaaaatgagagtgtttacaatacacttccttttcggcctcacaattaactctgaagatcagataagaatatgaaaactcttagaaaagtccctaaaataagaacagaaaaataacctcatgttttacttctaataaaaatattttttccttaacttgccaagccttagctacagatattttttctttaaatagcattagatggttttatgaaaaatactaaataacattgtccagatggcaaagagtttaccttccttatttctttttctttttttttttttttttctgagatagggtatcattctgttgtccaggctggaatgcagtgacacaagggcttactgtaacccccgccccccgggctcaagtgatctcccaccctcagcctcccaagtagctgggatcacaggcacacaccaccacacctggctatttttagtagagagggggtcttgccatgttgcccatgctggtcctgaactgctgagctcaagtgacccgcctgcctcggccttccaaagtgctagaataataggcatagccactgcgcctggcccaccttctttatttctaattgtaatgatgcccttacaccccatgggatgaatttagtttaaataaaatcaaattaaagcactagtcaggaagatgcttttaatcagtttttctttagaatgaacattttcattattatagttttaaaataccttttttattactcaactctgtgaccttcactttcggacaaaaatttttaaattttatatatcttaaaactttatgcttagggtccttagaatcttatcacataggcttttggaatgttcagcacagattttttactgttattctgctgctactatgttgaagcagtacagcatagcaattaagcatgatctctaaagttaggctacttgggttcatgtcctggctctggcacttgctagttttttgtttttttgttttgttttgttttgttttttgttttttgttttttgagacagagtattgctttgtcgcccaggttgaagtgcagtggtgccatcttggctcactttaacctccacctcccggttcaagcaattctcctgcctcagcctccgagtagccgggaccacaggcatgcaccatcacagctggctaatatttgtatttttatagaaacagagtttcaccaggttggccaggctggtcttgagctcccggcctcaggtgatccacccgcctcggcctcccaaagtgctgggattacaggcatgagccgccgtacccagccacttgctagtcttctaatcctgggccaattacttaagcttctattccttgatttatttatctataacatggaaatagcaataataacattttatgagattgctgtgtgaatgaaatgatttaatacatgattagggcttagaacagtacctaacacatcataagcactcaataaatatagttgttaattttattccctcagtcataagacttgtcttccttagagtcatattaatactaacaatatttattcattgacttatttattttaccagtagcacttattttcttaaagaaaatatgctctaagagagtagacgaggctcattagttctgccttttttcatttccattttgggtttaagaaagccagtaaggccaggcacagtggctcatgcctgtaatcccaacacttgggacatcaaggtgggtggatcgcttgaggccaggattccaaaaccagcgtgggcaacatagcaaaaccccatctcacaaaaaaaaaaaaaagggccagtaaaaaagatagcagacctcttttcccctcctgggttttgaatctgaatgacaaactaagaagaattaagcagatgaagatataaatatccacttcaggcctggcacagtgactcacacctgtaatcccagccctttggaagccaaggcaggaggatcgtttgaggccaagagttcaagattaggctgggaaacatagtgagaccccatctctacaccaaaaaaattagccggctgttgtggtgcacacctgtagtcccagctactcggcatgctgaggagggaggattgcttgagcctgggagaccaaggctgcagtagccaagattgtgccaccacactccaacctgggcaacagagggagaccctgtctcaaataaataaatagataaataaatgtctacttcattattggtaaagctgaattggaaagcctcctgtgatctgcagccataatcaggtttcccaatagtttctcttaaatcaagattttggaatgacctgcctgagggcatacttgaatctagagaggagacctacttgcccagaattggtttcgtgcacatttttaggccacaggatctgagagagaattggacttccaggcctgcccccagaaagcatgagcttctctgtgcttaccatgttaggacaggaactgagcagagcctgcacccactgctaatgaggagataataattgaggagactagcctggctgagaggagcctgcttggttattcctctcggcctcatacaggcaccttcacattctccgggagtttagtagatgcagagaagaaaaaagtgtttccaccttactttttccttctaagaaagagatataaatgtttccctgtagcagttgactgctaataacgttacctgatctttttaggtgttgaaatgaaaaatctcctcaatgcttaatgggatcttttagcatgagaactttggagttcatgtctttaatcttttaagaaatcatctataaaagatcttatagagcgtttgtcacatgggttccatggtgtgacaggacccctttattaaacattttagaaatagacattattaataaataatttttttcttactaaatatgtgtacatctataagaacacccttgagataatcttaagttaaaacttttcatataaaagtagcagtaaggtgatattttatttcttttttttttttttttgagaccgagtttcactctcaccaggctggagtgcagtggcgcgatcttgatctcgggtcactgcaacctctggttcaagctattctcctgcctcagcctcccgagtagctgggattacaggcacacaccactacgcccagctaatttttgtatttttagtagagatggggtttcaccatgttggccaggatggtctcgatctcctgacctcgtgatccgctcgcatcagcctcctaaagtgctgggattacaggcatgagccactgcacctggccaaggagatattttttatttttatttagactgctctaaaaatatttcttggtcgggcgcagtggctcatgcctataatcccagcactttgggaggccgaggtgggcagatctcttgaaggcagaagttcaacaccagcctggccaacatggtgaaaccttgtctctactaaaaatacaaaaattagttgggcgtggtggtgcatgcctatagtcccagctacttgggaggctaaggcatgagaatcacttgaaccaggaggcagaggttacagtgacccgagattatgccactgcactccaggctgggcaatagagtgaggccctgtctcagaaaaataaagaaaaatatttctcttgagttcttataagaacatttttattgggttatagcttccttgctttctaagaatatccaagcctgagaattacatcctagcagatcgtgaattatcttatactatgttaattttaaaaagataaaagattatttttaaaattttatccacagcttgcagttgcaaacaacaggatcattaccttacaagaagaaatggaacgagttaaagaggaaagttcctacatactggaatccaatcggaaggttaatcttactggatttataaaatattcactgagagcatatcaacttgttagtggtaaaggggagtctctaaaggactattttaagcagctggcctgtatcaagcacactttttatttagactccatgcataattgtgtgatgaaggttgtgggagggttatgcgcctttttctacaagatgcttcgtggcttcacagccacctacatctgtttagagacttcaagaaacagtctaattcagtttcttgtttttatgtactaatggttcaaacagtatttaataatttgttatgttaaacatactattacttttatagcatgttactgttttgtaagaagtgacaccttatttatatatcactgggaaagagctaccatataaatgtattttctacataacttaattccttaaagtatcaaactttttatacatgtctaattagaattttgtaaacctttatgttttgtacaattccaagccttcttaattaaggacataatttaatacatttagccctttacgatgactgaggatcattaattaccaacattgacaattccctactaaattataatagtgccactttaggaggctattgaaattgatagagcttctgacacctacacttaaatattccccgatttctgtggatggttttttttcctgtcttttacgtattcaatagcatctcttactttttactgatgctcggtgttatctttaggatgatctctactttcttttatcttcatgcttctaatctactctccctaggaattcaaatccatagttattaaaattgttcttaaagagttactaggctctgcgaggggacaaaagcagttttccatgagtaaagtgattgactttaataatgcatggacttcatgactgctcagaataatttttttatgacctgcttgtttttatctgtgatcttgctggatagttgaagataaccagttgcgaattctctggagattgaatgtattaacatttaaacctatagcccctgggctgggtgcagtggctcacgcctgtaatcccagcactttgggaggccaaggaggcagatcacttgaggtcgggagttcgagaccagcctggccaacgtggtgaaaccccgtctctactaaaaatacaaaaattagccgggcgtggtggcgcacgcctataatcccagctactcgggaagctgagacaggagaatcgcttgaacccaggaggtggaggttgcagtgagcagagattgagccactgcagtccagcctgggcgacagagtgagactccgtctcaaaaaagaaaaaaaaaaaacctataacccaactcatattttgaaatgaatgctatgttatttttagaggctgatttttaaaacttctaccatctggtttggaaacctattttaggattttaaataaagtgtcaggaagcccccaattcagcttaacctttaaaaatgtactagacttcaatttctttgttgtgtttgttcattattatacctgcttcagtatgatctttttttcttgctaagtagcagtgttagtgtctaattctgtatagattaaatccttaaatatgtacaatgttatttatcttttcaagggtcccaagcaagacagaactgcagaagggcaagcactaagtgaagcaagaaagcatttaaaagaagagacacaattacgattggtaaactatgcttaatttctaatagttcaggaatatattaaaaggtaactgcccacttagaggttttatcatacagaccaagattaggaatatcagtagtgttctgaaaaattctagatcctataaaatggttcatctctttttaacccacattccttatcatactttctcaatctttttctgagtattctcaacaagattttgttaatctttatttttttgcttttatagtttgtattacaagaatattaagtatacagaacctacttttttaaactatgccgtctcactcctacctaagtcctcatccctgcaaagattcttggaggtggtggctcctcttttctttacaaagaatcattaatgtaggattactctattttatttttagctgttatttctgatttattattggtcttagatataaatggaaaatttatcatccagtattagtcttaagatttttttagaaattaaaaaaaatacatatcaatatatagatagagagtatatcatctcactctaatcagaatggcaactatcaaaaaattgaaggataagtgttgacaaggatgtagagaaagagaacctttacacactgctggtgaaaatataaattagtatagccactatggaaaacatagttgtcttaaaaaattaaaaatcgggccaggcacagtggctcacacctgtaatcccagcactttgggaggctgaggcggatggatcacgtaaggtcgggagttcgagaccagcatgaccagcatggtgaaaccccatctctactaaaaatacaaaaaaaaaaaaatcagccgggcatggtggcatgcacctgtaatcccagctacttgggaggctgaccaggagaattgcttgaacctgggaagcggaggctgcagtgagccaagattgtatcactgcactccatcctaggcaacagagccagactccgtctcaaaaaataaaaaataaattaattaaaaatcagtctagcaaaagatccagcaatcccactactggggatatatccaaaggaaatgaaatcagtatgtcagagagaatctgtactcctatgtttattgcagcactattcacagtagccaagatagggaatcaacctaagtgttcatcaacacttgaatggataaagaaagcatggtatatatacacaatgggatgctattcagcgataaaaaggaatgaaatcctgtcatttgtggcaacatgggtgaacctggaggacattatgtgaagtgtagtaagccaaacacagaaagagaaatgccatatgataacactcatacgtggaatctaaaacgttgttctcataaaagtagagagtaaggtggggttaccagagggagaggaggcaggggatagtaagagattggtcaacaggtacaaagctatagttagataggaggaataagttctggtcctctgttgcatagtgtggggtgactagagttaacaataatacacattttaatatagttagaagaaaggtttttttttttctttttttttattgatgcataatagatatacatagctctggggttcatatgataatttaatatactcatgtagtaaagaccaaatcagtgttcttggtatacccatcaccttaaatatttgtcttttctttatgctggaaaaaaaagaggcttttgaatgttctcatcacaaatgataaatgtttaagatgatagatacattcatttctctgatttggtcattacacaatttttatattatcaaaacatcatgttctataccataaattactatgtgtcagtcatactttttttaaaaagaatttataataagggatactattcctgtactagattttatccaggtgctagtgttattatattaataacccctggtattcacatactaactcttcctggagtttagatagtataacaaacacaaggacctccccagaatgtctttaagaataaggaggagcctgaaaataaggggtgacttaacttgtactaaaaaattattacaggccaagcgccatggctcacacctgtaattccagcactttgggaggatcgcttgagcttaggagtttgagcccagcctgggcaacatagggacaccctatctctacaaaaattacaaaattaaccatgcttgatagtacatgcctgtattcccagctacttgggaagctgaggagggagatcacctgagcccaaggaggttaaggctgcagtgagccaagatcacactgcactccagcctgggtgacaaagtgagaccctgtctcagaaaaaaaaaaaaaaaaaaaatatatatatatatatatatatatataaaaacaaattgacagtatataacataattttagatttatttatttgtttttttttttttttgagatggagtcttgctctgccacccaggctgaagtgcagtggtgtagtctcagctcactgcaacctccgcctcccaggttcaagagattctcctgcctcagcctcctgaatggctggaattacaggcgcctgccaccacacccagctaatttttgtattttagtagagatggggtttcaccatgttggccaggctggtctcaaactcctgaccttgtaattgtgatccgcctgcctcagactcccaaagtgctgggattacaggtgtgagccatcacacccggccagaatttcagattttttgaaaacaaagcgatattattttgacatccttaaaatagttagcatttgccttctatgtatttgtgaatgagatctcaaaatataatacttttcataagaaaggtcgcagaaataatatatgtcagcattttaagaaggggtatgattcgttttctataatgctaatcaagtaaaatgagaatctcagtgaagtggcacataataaaaatcttaaaatttttcatatccttttatcacagtaagacaaatgtttgttaagaaggaaagaaactaagaaagtatttgaggtcctaggtgagcccaaggcacaaggcagatgcagaagatcctcaggtctttgtatcttcgatcacccacataatgttgcagtaataatggttgaaacaaaaagaggtttcatgttaagtgaactaaaaattctgttagcggccgagtgtggtggctcacacctgtaatcccagcactttgggaggctgaggcgggcagatcacgaggtcaggaattcacaccagcctggtcaacatggtgaaaccccgtctctactaaacatacaaaaaattagccaggcatggtggcatgcacccgtagtcccagctactcaggaggctgaggcaggagaatcgcttgaacccgggaggtggaggttgcagtgagccaagactgagcccctgcactccagcctgagcgacagagcgagactctgtctcaaaaaaaaaaaaaaaatctgttcgcctcgtaaccatactagtcatcatcctcagtaattgcgatgttaccccagggacccagatggtcctctgggttccctgggctcttgaatatatcaacaacattcacatttaggaggactgcaactgcttcattttgtgctgactgctgtaaccctgtaggtatatttctataataagatatgaccatcagttgtcgtaatatctactgaagtgtctcaaatatgtatatattttagatgtattaaataacactatctttggcttagcaggtttttcagatttgtacattattgggcaaatgttattgtatatcctaattattattgttaattattaattaattattgttaatgtctctgaaaatgaatggtagcttaagctattttgccagaatattcagacctgagagttttggtgtactttttcctgtgaaatattatggtttgtacttagttgaaggaacagagtgtaagcaatttacttacctttgggggcaggatgttgagaaagaactggagatgcagatcagcatgaggcaggagatggaattggctatgaagatgctggagaaggatgtctgtgagaagcaggatgccctggtatctcttcggcagcagctggatgacctcagagctctcaagcatgaacttgcctttaagctgcaggtaggggaaatatgaggaatagactcactggctctctaaaatcctggggcttccctcctcccatctgatcctccagaatcacactttaattacaagaggaaagaatcacatctcattttgatgctagctgccagtaaactactttcagaatcagacaaccatgggatcctgtattgctgttctagaaaaccatggccacttttcacattatagtagaggatgagggtcttttttatcctatagggtaatttctactctgcagtctaccgtgccagctaagttatatattctattagcttttacactggaatgtgatacattgatgaactattactgtgatcacactgcatataacaatactaactttagataaattgcttttttttccatttcaggattaactgatattgaaatatatgaacatttctgttttcccacttaccattagattcaaaaggcatgtgtggttgtattttaggatttatgttatacaggttgtttatcgttattttccataacagagttcagacttaggagtaaaacagaaaagtgaactaaacagtcgcttggaagagaagactaatcagatggctgctaccattaaacaacttgaacaaaggtaaaagtcctgtttctttaatgaaacactttggattgtcagtgctgaagtgaaaagaatgtgctgtacattcggcaaatagaaaatacatgaaattcttccaaattagcatcagacattctggtagaaaaaagccagttgaatgttatgtgtgttttctaaggtatgactgaaatgtttttaggaaatgtcaatcacttgactagcctttaaaaaaaaaaaagaaaggtcagccttttatgactgttttgaacatcagaactcttaatccatgtcagagtcatgtgttagaggaaggatacttaaaagcatggaaggactcttaaatgtatgtatgtaattctgtgattttattgttcatcactgaagtctttgaatacttggatgctaggggatatagaggcactgagagataggtgtcctccaaggatctattctggatctttctctcccttctttaacccttttctcttatctcccttttctttct

SEQ ID NO: 15796 - DNA, 72669 bp, Homo sapiens
gattatgtgttcagaaggcagtctcagtgaacttctcaaagtgagaaggttgtagcttttaatacagtctcagaagcctatgggacaaagttttctggacacggttcatcccttcttgttgctctgccctgaaaataacctggctagtcaccctttcaaggtaagttttacccacttagcttccaggattttgtaaaattctaaatctgggtgagaaatatcagtagctctgtacttgtatgccagttcctatctaaaccacgaaagaggtgcatgctgcctctgatctgaccgtaacatactctgcataaaatcagcttttccttcctgtttcaggactactttcagtttcttcctgtctctttgatactcttgcactagcgttggcttcagtgcactgtcattaaccacagtgccttacagtattttcttctattggtgagccttttctggacctttcgtgaaacagagcttctacttgaatctttaatttgtgcccttcataacagaactcacattaactcttctttgggttatcagcttctgacacccaagagtcatttgtcctaaactaatcactgaaatatgaatcattttccaaaaagaaatgctgtgccagagaagataattgccactcagtgatagagctcagaacggaattcacgttgtcagattcccaagcctgagtaccaaccaagatctggttggaaagagcaagtgctgtcgtctgagaacatccaccatattctgtactcttcagtagctgttctgtgttttgcttttttgatggtgcccctcctgagggggaggtggagagtatataattgggcatgttttttcattgtggttcctctagtccccaccagtcaactgtgactactatgaagtgcttttgagtacagggctgtaaatactaaaatctgttcctttgcaatttttggtatttgagcttttccagagaacaaatagaaggatttgatgagcttagaaatacatgtgtagaggaacagtgaaaaagacttcttcccaaatggctgctaagtaattatatatttttcatcataattaaatattctcaaaattgtatgtcagtgtgttgaaaatagtgttttcaaagaaaatattggctgggcgtggtggctcacacctgtaatcccaacattttgggaggccaaggcaggcggattgcttgagctcaggagttcaaggccagcctgggcaacatggcaaaaccctatatctacaaaaaaaaataaaaattagctgggtgctgctgggcactgtggctcatgtctgtaatcccagcactttcagaggtcgaggcgggtggatcacctgaggtcaggagttcgagaccagcctggccaacctggtgaaaccctgtctctactaaaactacaaaatattagccgggcatggtggcggatacttgcaatctcagctactcaggaggctgaggcaggagaattgcttgaatccaggaggtggaggttgcagtgagatgagatcacatcactgcactccagcctgggcaacaagagcaaaacttcatctcaaaaaaaattagctgggtgtggtggtgcatgcctgtggtcccagctactcaggaggctgacgtgggaggatgggaagattacttgagctcagcaggtcaaggctgctgtgagctgtgattgcgccacagtgctccactgggtggcagagttcagaccctgtctcaaaaaaaaaaaaaaaaagaaaagaaaaggaaagaaagaaatgtctttagcattattatgtacagatatttttaatgaaaacaactttagttatagaggtgatatatttgcattgtaagtcacaagatacagaaaagtataaaaatgcaaaataatagaatgcacctacatttcaaatacctagggataaccactgttaagatttagtatcagattctctttttcaatgtatacactttttcaatgtatacactgaaggttcacttgcaaactcaaaattttatacatgtaagatcataccacacctgtgctgtgtgacctgccttttttcctctgcaatatttttccatatgggtaaattgaaatttttgtcattttgtttaatgtcttcagttattggatgtgctataatttcttttcttttcttttttttttctgagacggagttttgctcttattgtctgggctggagtgcaatggcatggtctcagctcactgcaacctctgcctcccgggttcaagtgattctcttgcctcagcctcccaagtagctgggattacaggcgctttcgaccatgtccggctaatttttgtattttcagtagagacagggtttcaccatgttggccaggctagtctcaaactcctgacctcaggtgatccacccaccctggcctcccaaagtgctggtattacaggcgtgagccactgcgcctggcctggatgtgccataatttctttgactatttctttattacaggcatttaggttgtttctaaatttttctacccaagacagttttagaaaaattgttatgtgtataacttgaatatttaaccaatttttagtttttaatttttatacacattgccaaactactttaaacaattaaaacaaattttgaatagcatggtatcataaactttcatattagctactcatcaaagcttggttttgtctttcctgcttgcagttggttgcgtttttctcatgctgtattaacatctgaagtttccaaaagatacagttgtggttttcaagacagttggttcagcagctgaaaacctcatgatattactttctctactttttttttttaagctaacagtagtgtcctaagcaaaagagagtttttactgttaattgtgcaatgagaaactgcatgtttttctaagattgctagaatttgctttttgggatgaaaaagctgcatgctgggatttcctttttctttcttatacagatataaaactaagagtgtatgtgagatgtactacattttgtctgagaatcccacagtgtccagtcctgtggacagcagcttcccagctaaagtatcttagagacattatctctgccagcatagccattccagcatgagagcaaagggtctactggtcagggctttctttcctcatccgctcaccccccatcaggctcagccctccttagcgttctagtgtcacctagctgctcacctaagaatctgttttatcttcacttatgtcactaatattaattcctcttttttttttttttttttgagatagggtcttgctctgtcaaccaggctggagtgcagtggtaccatctcagctcactgcaatctccacctggattcaagcaattctcctgcctcagcctcctgagtagctgggattgcaggcacacaccaccacgcctggctaatttttgtatttttagtagagacagggttacaccatgttgccaggctggtctcgaactcctgacttcaagtgatctgcctgcttaggcttcccaaagtgctgggattacagacaggagccaccatgcccagcctattaattccttttttttttttttttttgagatagggtttcactctatcacccaggctggagtgcaagtggtacaatctcagctcactccagcctccacctcccaggctcaagcaatcctcctaccttggcctcccaagtagctgggattagaggcatgctgcactaccacacctggctatttcttttgtatttttggcagagacagggtttcgccatgttgtctaggctggtcgccgcctcctggactcaagcgatctgcctgccttggcctcccaaagtgctgggattacaagcatgagctaccacgcccagccttaattccttgtaaagcttatgtcatacttatttagatctcaagggcattgtctatgggtgtttcatcttttttttttttttttttttttttgagacggagttttggtctgtcacccaggctggagtgcagtggcacgatcttggctcactgcagcccccgcctcccgggttgaagcaattatcctgcctcagcctctggagtagctgggactacaggcatgcgccaccacgcccggctaattttttgtatttttggtagagacagggtttcactgtgttggccaggatggtcttgatctcctgacctcatgatctgcccgcctcggcctcccaaagtgctgggattacaggcgtgagccaccgtgcccagccagatgtttcatctttttaacttccattgcattagtaaagtcttttgctcaccataaatgctcaataaattttattttattttatttttattatttatattatttgtttttattttatattactttatttatttttgggtctcactctgtcacccaggctggagtgccgtggcatgatcatagcttattgcagcctcaaactcctggcctcaagagatcctcctgtttcagtctgtcaagtagcctggtctccctatattgagtaggctgttcttgaactcatgggctaggcgatgcacccacctctgccttccaaagtgctgggattacaggcatgaaccaccacacccagcctcagtaaaattaaaatggctgaagtgttgatgacttaatgtgttaccttttctagggctatttgtctttttttttttttttgctgatatttttgtggagaaagtagaccttggcccaaattactggtttattagaacaaaacctcaaagcatttatgaaaattaatatatgacaattgctttgttaccaagctaataatactatggttagtttaatagcacctcagctgttaatttgtcatttggtttatttaggttgactaattttttttcctgtttttaatatttagcttagctggctttttaaaattccattcactctattgtctttgaataattacggcaaatatagagaaatccagttgtaagtgtaaagttgacattgagtacctatgctttgctaagtacttcaaatttattagcttttattttcacaatagcccttcaaggagttatatgtgatgtgtctgggtttggggcttcagaaaggtgttgccttaagaaaccataataaaattctaaaaattaacactaaatcaaagacacttggtctcaaggggacaaaataacccccaggccttgtaaaatctgtcacttggttgcctatagcaatactgctagagaaaggctacctcaagaagagatttcacaaccatggatacataaacaaaggcgaagcattttttagcccattcaagcacttccctgtagaaaaggagcttcattcagccagttgcctcatccagagaaaaaagaagtacaagaggggccaggctcaccttctaccagaccatgtactccagaacttaaagtataaaaaaaaaaaaaaaagccgggtgcagtgggggacgcctataatcccagctactctggaggctgaggcaggataattgcttcaacccaggaggcggaggctgcagtgagctgagatcgtgccactgcactccagcctgggtgacagagaaaaactccgtctcaaaaaaaaaaaaaaaaaaagatgaaacacccatagacctgtttcaggtctaagaatgaaaaaaaatcaatagactaattatgtagctctgaaaagatttaagctggtggcactgtaaacatctacccttaaggtacatagtgactcaaaggaccttgaggtataaaagaatggcatgttacctattgtagtaaagtcctgagcatgccaaggtaaagtggagaacagctttacatggaaaagacagaccttttagtttctgggggagaaaagttctcttaaattaattgcatcactctgatacttaaaactttaatctctgttttaagaagaaaacagaaaatatgtctgtttgtaacagaaaaatgttctagatgggatatgcccaaggaaaagtccgagatccctggtatccaccacgcattcctacctagaaattcactttccagagcctttttctatacaaatcttggaggctcttcatattttgctttactaaggtaggcttttatcttcataggtgacaaatagagtttctaattaaatacaatacaataaagaacaaaatgggaatattccctctattgacttttgcaaggtcacagcaagtctgtaaagtaataatgtggatggtaagagtccattctcatgaatctgtaatcctacataatatagatttgtggcacattatattgtcaaaggattgaacctgaaaatgacttctgcaaatatgtctatatataatgtatttcagcactaatttactataaaataatagtagccaactcacagtatttttttttctgtatgagacactttccatttgctttacatatatagacacataattccaaaattaaaaaaacctctggaaatgaaaagcatttttcacaaatttgcctgaacttatttggtgttacaacatgatgtgaatttacttgaggctatttatagtctttattctacttaatctgaatattcatttcctgcagaaatattaatgtgcttgattgtaggttactgcctcagatcctgctagttctgtatggtgaataaacatctggctttattgaattatatgtgatttattttgtgtatcttcaaagtagcctcctttatttttgttttggggaaggagaattgggggagggggagttggaaaaagtatttggattttttttttttttaagaaaagtcactagtttgcatcataatatttgtcctgaatctaaaagaaatatatcgcacatacttttcaattccctgaagtgatcaaaataatagttgagttagattaatgtcgcctacacttagaatacaaagagcctttgattttcaatagaaaaataaatctgtgttgctttttaataggatatgcatctttgtttccctttatttgaaactttgaaattgctaatcttagctttgaaacatatttaataaccgtagttgctatctctgcttatttggttgtactcccagcccttgtcactgttaatcgctgtgataagtagaaagaatcctaggaacctccctttcagttatccctttggaaatcttgtttttaatagcacttttctttctgggcttgcatgacattttatctttcttttcctttctttttgccgtttgcaaagactcttgggaggatttgacagatttggtggagcaaatgcgcgatgatacagaaggtgcgtgccacaccaacatctttcagctttttctccttgctttttaaaattttctaaccaccttttaattgttttccgtaagaggaaatgtcagctttaggttttatttcccatggcaataagtggaaatcttaatgttttggttccaagtaaaatagtgtcaatgtatgtttatgttgcttttgaaagatatttgctgaataacgtgtttaaaagggacattatttcaagattatatcaagtttttgccatggctgttttttcacttgtttgttgagaaagtgtaaattttattactcatgcaaatacatgtatatatatttctgtgaatttcacagcagccaaaagcaaacagatcccaggaatctagtggttggcctggaatgttgctctgatttgtagatttccataacattacacacttaagctttgtcatgtcatagcattcttttctggtgtaattattttttgttaattttttcttcttcatacaagagactgaaacatggaatggtgtgattatctttttaaagtagcacacatgttctaatgtggaaaggttccccaaaccaatcagtgtttcttctgtatcaaggcagctaactatagggagctcagagcgatttacacattttatactaaaaatagaaaaattgagatttgaatctactttatcattttacatgttcccgctttgctgtagcacacacccctgacacacacacatccaccactctgtccagactgacctttcctgcccacctcctcctctcctactttgttcctgtgacatctcatgtatttatacccttccccctccgcctgtgccacctgcgaacccttcagtccttatgggatttccacaatttactctttgacagctttggcccacattcttttctccattcacttgctgctgcagaacttggagcttaaggaaggctttttacttattctctaattcttgtgtgtttatcaacctagttaaagggtaaactccttgagaacagagattgtcttaaacttcttggtatccttaatcagacctgggacgagtactgccctcagtagatctggtcattaccaaacaaaatcaaggcagctttaccctctctgttgatgcccaagagtatcttctgtttcagcccttgcctttgaatgtgtgaattctgaaatcctgagtgtcatctcttttcctttggtcaaactatttttatgccatctttgattctgcttttaatataactgattacatatagttcagtgaaagaacaaatcagtattgtctagttgattgacagttcacagacaagaaaaaagagaaggatgttgattcatttagtgtgtaatgtttactattgtgttagctgctattattattattattatatttatttatttattttgaaatggaatctcactccatcgtccaggctgcggtgcagtggagcgatctcatctcactgcaacttctgcctcctggggttcaagcaattctcctgcctcagcttcctaagtagctgggattataggtgcataccaccatccctggctaatttttttgtgtttttagtagagacggggtttcaacatgttggccaggctggtctcgaactcctgacctcaagtgatccacctgcctcagcctctcaaagtgctgggattacaagtgtgaaccactgtgcctggcctattatcattattattaattattggctaggcaccaccaggtttaaggctttaattcctttgatagactagatattaaaggaaaatgctacataaagtttatccccttcttgagaactttaccatgactcatcacaggcaagattctatttctttaatacaaagtattaataatgcaagagtcaagcttactgtgagagtcagactccttttttttaattttgtttttgctgggatttttgtcgatggttattataggtgaactccaaaagggagagaagatgaactttaacagtatagtacataaaatatccagaaaatgttgattatgtcagtaccttcatgatcttaatagatttccagtcaagtgatatatggtaatgttgatcaagatcctctttacagaaaagtctttctgaaaagtagttaaaaaaaaaaatgagaatggggagagggagatggcttcactttaactcttttgataatttcattcttcttgatatccttctctgcttttcttgcctcatggtctcaatcacagttatgtaaaattccagcatttcacacaactgtattacgtaacttggagatgttataaataagtgctagtactaagaagaaataagttatggagtattacctgcacataacacacaatagcaattcagggtctgggaagaatcctcatttcagactcagaaaaagctgatgatatatgcaggctcagatcttttctggagaccttcaactgctaagctgttttcaatgctgtttctcatctgttattgcagatgggccataacagttggcttttttaaaattttattttattttattttatttttttgagacgaggtatcactctgttgcccaggctggagtgcagtggcatgatcatagcttcctgcagcctcgaactcccaggctccttcctcagcctcctgagtagctgggactacaggcatgtgccatcacacctggctaatttttatgtatgtatgtatgtatgtatgtagagacagggtctcactttgttgcccaggctggtctcaaactcctaggctcaaacgatcctcccacttcagcctcccaacgcactaggattgcaggcttgagccaccgaacccggctatagtttgctttttaatagatagagtgttaacactggcttctggcctcctaaaaatttttaaaataacagactctagtgggttgcagatttgaactggtcgttgtttttgttttttgtttcagttctgtcacaattgaagcttcttattttgaatttttttttttttttttgagatggagtttcgctcttgttgcccaggctggagtgcaatgctatgatatcagctcactgcaacctccacctcccagattgaagcaattctcctgcctcagcctcctgagtagctgggactacaggcacatgccaccacatctggctaatttttgcatttttagtagagacagggtctcaccatgttggctaggctggtctcgaactcctggcctcaggtgatgcgcccgcctcaggctcccaaagtgctgggattacagacatgagccactgtgcccagcccttttgaatttttttagaagatgggagtcttgctgtgttgcccaggctggagtgctgtggtgcaatctcggctcactgcagcctctgctagtgattcttcttgcctcagcctcctgagtagctgggactacaggtgcacaccaccatgcctagctaatttttgcattttttagtagagatggagtttcaccatgtttgccaggatggtctcaatctcctgacctcgtggtccacccgccttggcctcccaaagtgctgggattacaagtgtgagccaccgcgcccggcctgaactattttttacagtgatgattagtttcatattctatgtgtttgtaacttatatctactagaatatgaagtgtcttcttagggtacaattgtatgatgtacaacacctattatattgcatctcctttccttatatgctagtaatttgtgtctaaaatgttttgaaactcactagggaaattatgaacattaaattaaataatgaaaggcacatagcttattacctttagtttttcaataaatatcggatttctgtctgtactcattacaagccttttgaacagattttgtaaatttgcagtggcccagattactgcccgtctctctgaggattaaaatagtcaggacagtacttgaatttaggcaataatatacctgtgtaaaatattacctaccaaaattgcatactggttccttggcatttgggggcagagggtgttaagacttgatgcatgttgaaaaacagaagaaacatatcttaagagattttattagcttctagcactgtgccacatcgtcattcaataagcttattaagttaaacaaaattgttataatggcttagagtggtggttcacttctataatcccagtactttgcggggccgaggcaggcagattacttgacgtcaggagttcaagaccagcctggccaacatgacaaaacccgtctctactaaaaatacaaaaaattgctgaggcgaggaattgcttgaaactgggaggcagaggttgcggtgagctgagatcacgccactgcactccagcctgggcaatagagtgagtctccctctcaaaacacaacaacaaaaaaattggcggggcgtggtggctcacgcctgtaatcctagcactttgggatgccaaggtgggcggatcacttgatgccaggagttcaaggccagcctgggcaacatggtgaaaccctgtctctactaaaaatacaaaaagttagccaggtatggtggcaggcgcctgtaatcccagttcctgggagtctgaggcacgagaatcgcttgagcccgggaggcggaggttgcagtgagtcaagatcatgccactgcactcaagcctggttgacagagcaagactccttaaaaaaaaaaaaaaaaattagccaggcatggtggcgggtgcctgtagtcccagctactcagaaggctgaggcaagaaaatcacttgaagctgtgagttggaggttgcagtgagccgagattgcaccattgcattccagcctgggtgactgagcaagactgtctcaaaaaaaaaaaaaaaaaaaagttatgtacatggaagaccataataattgcagtagctaacaacttttttccttagtatattccaagcacttctaaatggttacgtataagaacttgtttactcttcagaaccctgtcaccattttatagataaggaaagtgacacatacagaggttaagaaagtttcccagcaaaatactactcagttgtaaaaaggaagagaccactgatacatgcaacaacctgaatgattcttcggagaattatgctgaataacaaaaagtcaattttaatggttgcatactatatgattctatttacataacagtcttgaagtgatgaaagtatagaaatgaagaacagattagtggttggcatgggttgaggatggagtaggggcaaggagagatgtgggcatggctataaaacatcaatatgggggatccttgtcgtgatggaaatgttcagtgtcttgactgtaattcaacatcagtatactggttgtgataatgtactacagttttgcaagatacccttgggagaactaggttaaaagtacatggtatctctcgatattatttcttacaatttcatgtgattcctcaattatctcaaaacagaaaatgcaacaagagaaaaaacttttcccaaggtcacacagctagggaagagtttgaatagagttcaaactcccacagaccagctttagagcttgtgctgttaaccactacaccaaaattgtttaaacttatttgacacaagaacaactgtaaaaatacatcttcatcagaactcagtacacacatcatttatttgtatgtatcttaaaacaaaagtttcatgaaacaatacatagccttactatataggacattaaattgattttgtgacccactaaagggttgtgacctttgtttgaaagacactccagtatcctgtgctgcctctctggtatatacatccatttgtacggtagccactgtctaggtgtgtgcaaaaaaaaaaaaacaaattcctgaaaggactgttttggctctgtttccagcctgtaatcgtgggcatactttaaaggctgggctagtaaccttgcatccttctatttctctttaaaacatctccttgtgaaagcatcttttctcataactgctattattgtcctatgctgatgactctctaagtccaaacttccatttgcatttacaactaggtgatcaaaaatatcttgaaagctgggcatggtggttgcattcctggagacccatctattcaggaggctgaggtgggaggattgcttgagcccatgagtccaagtccagcctgggcaacatagtgagaccttgtctttaaaaataatatgttgagaatccttccacataaatatcctttatgatatccaaaaccaagtttattttgccctttatctccataacagttactcaactttttcatttccctttatagcacactcttccagtctctcagggcaaaaatgttggtgttattcttgaccccttcatttcctttatcttttctatgactatctgaacttgaatcactacagttcttcgtggcagaccattttgattctcttccctcaaattcattttgcgtaatcttctcagattagtcatctccaaacaaaattttaggcacgctgattctctgctcaaaactacagtggttcccattgcttcctccattaatatccaagtctagtttcagagacctctttatctgactctaccctacctgtgttttccagttctccccagtaagaactccctcttccactcttattttctccacctgacttcacacacccattccaaccacttggaataccgtccttcatgtgttctgtgataccacgacatttaggatctacctcaagtactgcagtatattgagatttatcacacttttattcatattacttttggtgttatctcatttgaagtacaaatgtacaatattccagggagttaaactaaggacagtggttattcctggtttttgtcaggtctgaggtttacctgctttaacaaattaataaagcctcttgctgtttcttggatgctggcaaaagacacaagactcctaggtcagagataaaggactttattactcatgacagtgcaagcagcctgagcatctgcatatctgtgccagttcttcttggaccagagtcccatggggtgacactggatggctcagtgacatgcttcacacgtggtaggtttgtgttgcagatgaagaaggccaagttgggagaacccattgtttttataggaagcagtaggaaagcttcgtctctcattatcaggttcataaatggcccaggaaagagtggtcagggccgtatagtcttgacataacccagtaaagaaatgtaggtgcccaagaggtccaaggaggattgtcttccccaacattttacagatgaaacagaagaatgaggatttcccccaacatcactcagggaatatgagagagacagatctaacccttctagatcatagatctaactgcgattgccctctcacatccatttacattgtttttcttttcttttcttttcttttttttatacctaggtaaagcccaaaacatttaaattatttctatgcaataaattgagcaaaccaaggaattcttgggttgtatttaccacctaaatttcttatgttgtatcaaaacaacgaaggtttgtcctaacttctaaatgtttccagaaatcttctaggtattcttctgcagcatggaattctcaggtaaaggtaactgaagaagtctgggaaactttccaaaactaaaattgattatattatgatatgggagcccaatgaagaagaaatcagtgtgtttcctagggaactcttgtgcaagctaatatatttttttttaatctattaaagattagagaaatgtatacctaaccaagaatgagtaagagtatatgaaaataatggttttggttaagtaagctgactcatttcaatgctaaagcccatcaaaagggtttttttttttttttggttatatacggaggtagaagaaactacactagtttcttcttaccttcttacaggaggccagcagctaaaccttgacctggagtaagagaaagcagaattacttttttcttgtcttgtcttttttttttttttttgagacaggatctcactctgttgcccaggctagaaggtggtggcacagctcactgtagcttacactttccaggctcaagccatcctcccacctcagcttcccaaggagctgggactacaggtttgcaccaccacacccagctaattttttgtgtgttttttatggagagggggtctcaccttgttgcctagcctggtcttgactcctgaggtcaagctatccatctgccagcctcagcctcccaaagtgctgggattacaggtgtgagccactgtgcccagccagaattttacttttactttaaattttttacttttaattatgaaacttttttttttttttaaagagacagggtctcaaccctgttgcccaggccagagtacagtagcatgatcatagctctcgtagctctctgtaactttgaactcttggttcaagtgaccttcctgccttacctcagccccgagtagctagggctatgggtgcgtaccaccaagtccagcttaattacacaactttttatagtacgtaaaaagaatagcttaatgaacttaaatatctccatcaccagcttcagtaattattgccaatcttatttaatctaatacctccatttttgtttctggagcattttaaagcaaactccaaacattacatctcagcacctgtaaatccttcagtgtcagagctaacaaaattaacaacaaagtcttatagtgtctcagcccattttcaaagtctgttgattgtctcaaatatgtctttttatagttggtttatttgaatcaagaaacatacaagttatatattattattatgtctaaaaactttagtggtttttttctaataatagccttattgaggtacaattcacataccataaaggtcaccactttaaagtgtacaattcagtggtggttagtatagtcacaaagctgtgcatccatcaccactctctaatcgaagaatattttcatcaccttttctaaaaagaaactctgtacccattaataaccactctctattcttcctcctcccagccgctggcaaccactagtctattttctgtctctgcagtttttttttgaggggcttcttcaagtatttacatatgtctctctccatagatttgcctattctgggcattttatataaacaaaaataaaatatgtggtcttttgtgtcaggcttctttcacttagtatatgttttcaagggttatccatgttgtagcatgtatcgtaacttcatttctttttatggattaataatattgtatgggcatatcatattttgtctattggttggtggacatttggcttgtttcactttggggcaaattatgaataatactgtgaacattaatgcatacattttgtgtggatatattttttaaataatttcagctcttgttttagattcaggggctacatgcgcaggtttgttacatgggtatactgtgtgatgctgagatttggggtatgatggatcctgtcacccaggtagtgagcatagtacccaacagttagtttttctgcttccctcccaccaccctctagtagtcttcagtgtctattgttggcatttttatgatgtgtggacatgttttcatattgaaaatgttgaattgctgggtcaaataactcatatgtttaattttttggagaattgccagactgccaaagcagctggaccattttacactcctacaagcaaggcacaaaagtttccagttttccacattcttgctaataccatttgcttcaatgaataattattattgttatcctagtgagtgtgaaaaggtatctcatcttgatttgtatttctctaattagcatcttttcatatgctttctggccatttgtctatcttctctgcagaaatgtatatttcaagcctttgcccattcttttttactaggattatttctcttctgttgttaaatcataataattatttatacattctggatattggatctgatttgcaaatattttctgccattctgtgggttgtcttttcactttcttgatgatgtcgtttgaaacacaaatgtttttatttttgatgaagtccaccttacctattttttcttttgttgctaaaccattgcctagcctatggttataaaatatttagacctgtgtttccttctaagagttttatagttttagctcttacactttggtctcagatctattttgagctttttaaaaaattattttgcatttggatatccaattatcctaccaccatttgttgcaaataataatttttgtaattttagtagagatggggtttcaccatgttggccaggctggtcttgaactcctgacctcaagtgatccacccacttaggtctcccaaagtgctgggattacagacgtgagataccgcgcccagcctgatcttttaaaatttcttgcagcaaagttttatagttttccatgtacaagtcttgtacttcttttgttaagtttattggtaaatatttttctggtgctattgtaaatggaattgtttttaaatttctttttcgaattgtttgttgctaatgtatacaaatataattaatttttgtgtattgatcttgtaccttacaaccttgccaaactcattttatgtacatactttgtgtgtgtgtgtgtggattccttaggattttttatatacaagatcatgtcatctgcaaatatagttttacttcttccttttcaaactggatgcctttcatttccttttcttgcctacttgccctggcaagactcgcctatacaatttggttagaagtagcaaaagtgggcatccttgtcttgttcctgatctttgagaaagccttcagtcttttgccatcaagtttgttagctgtgagttttttgtagatgccctttgtcaagctaaggaagttctttctcttcctagtttgttgaatgtttttatcattaatggatattggaacttgtcaagtactttgtctgcttctaatgaaatgaccatgtgatgtctttctttactctgttaatttggtgtattacactgattgagttttgtgtgttggaccgaccttgcattctgtgattaatcccacttggtccagttatataatccttcttatatgtttctggatttggtttaccagtattttgttaaggatttttgtgtctgtattcataaggagtattgatctatagttttcttatgatatctttatctgatttggtctcaaggtaatattagtgtcatagaatgagttcggaagttctctcttctaatttttggaatagtctgtcaaggattggtgtcaattccttaaatgactggtagattttaacaacgagactatctggtcctggcctcctctgtatgctatttttttattattattactaattcaggatctttacttgtaggtctgttcagatttcctatttcttcttatgtcagttttggtagtttgtgtctaagaaattgtccattttgtctagattatctaatatgttgacatacagttgtccgtagtattcccttataatccttgtttctgtaatgtcaatactactgtcccctctttcattcccgattttagtaatttgaatcttctcccttttctactgatcagtctagctaaatgtcagtattgttaatcttgtcaaagagccaactttggattttattgatttttctcagtagttgtttttgctttttaatttatttctgatctaatctttattatttccttcctcctagggctttctacttatatacatgtatgttggttgcccttgatgaagccaactgtgaaatcatggaattataatatgctagctaggagagtgatctaggccagtgcttctcaaactttaatgcacatacagattgcttggggatctagttaaagtgcaaaacctgattcagtggtagtgttgaagtctacagcttcccttgtctaaaagctttcctggttatgccagtgttgatgttctgagaccagagagtagaaaggatctagttcatttggtatcaatcatttgtgggattttccaaacagaacatgtcatttctctggttccaggtatattaatatgtctctccctttgagaatcagtgctgctatatgtcattatgactattatgaatgtgcatggtttccaagggaaaaaactgaacaagcccaaccctctcattttactgatgaggaaattgaagcttcaaaggggtgagatttcttgcctgaagtcatataataggttaattggctccatggatgagtatattaatcctttctgatgacaagtcctaactcagtgaagttcatcattgattatactgttaccaagaaaaggtagcaatgaggacaagtaaatttatggttaatttttttttttttttcgagatggagttttgctgttgtcgcccaggctggatggagtgcaatggcacaatcttggctcactgcagtttctgcctgccgggttcaagtgattctcctgcctcagcctcctgagtagctgggattacaggtgcctggcaccacacccagctaacttttgtacttttagtagagatggggcttccccatgttggccaggctggtctcgaactcctgacctcaggtaatccacctgcctcggcctcccaaagtgctgggattacaggtgtgagccaccaagcctggctggttaatttttttgactaacccctttaacagatttcaatccagagaaaatgttacttaagtaaattttcttattattgagtagaaatatgatacctgagacgccattaagaatagatagatatagttatggatatagatatatagatattctaagggtcctaagactctattataatttttttttttttttgtaaatgaggatagaataaaagttcatgattgtctcatacaaataagtgtcatcaggctaactaaatggtgttttattacaaggtctttttcagtactttcacttctttctttcacaattaaggactcattttctgtccagttttatacgctaaggtctttttagtactttcacttctttctttcacaatcaaggactcattttctgtccagttttatactctaagaacaattattgcaaaagttcaaaatagatttatttaaaattattgttcttcagtcattcccaacatagagtaagcttttctttctatatgtttctgttagtttgttgtttttaatctcatattaaagcttttttttttttctttttttcttgagacgggggtatcactctatctcccaggctggaatgcagtggtgtgatcttggctcactgcaacctccgcttcccgggttgaagcgattctcctgcctcagtctccctagtagctgggattacaggcgcctgccaccatgcccagctaatttttgtatttttagtaaagacgaggtttcactgtgttggctaggctggtctcaaacttttgacctcagatgatcctccctgagccaccgcgtgagccaccagcgtgagccactgcgcccagccaaaagcttttacacatctttgaaaagtcttctgtgtgataaccattttgtttcttatataagataaaagctttaatctgttagataataagaaaattctgaagaataactatgattgtgctacatattaatatcaattattctctgccaagaattgcatataacatacttaatactaatattaaatatatctttcttttccttcaattatttagaaaacatttcaagattttgctgtatgaacattagtcattgcattataagaagataaaatggcaccttggtgacatgatttgttttcagaacaatatgactcactgtcactgttagctatatgacttcagatcacttttatcatcactattaactaaatgagctacatgactctgtaaagtttattaaaatacccttatatggaaattagcagtcttgaagagatacagtgaagaatcacatgctttttgaaagaacattgaggtcgggtacggtggctcatgcctgtaatcccagcactttgggacactgaggcgggcggatcacgaggtcaggagatcaagaccatcctggctaacacagtgaaactccgtatctactaaaaatacaaaaagttagccgggcgtggcagcaggtgcctgtagtcccagctactcaggaggctgaggcaggagaatggcgtgaacctgggaggcggaacttgcagtgagctgagatcacgcctctgcactccatcccgggtgacagagcgagattctgtctcgaaaaaaaaaaaaaggaaaaaaagaacattgatttgagaaccagtcaacataatgtattattttaactatagtcacttccacatgatttctttagtccagtgctcttgctgtattccccaccaatgtgatctgcaccatcgtccatctaatcgccaaaactacaaatagggaagttactctccattctccttgactatgtccagatagtcaagctatgaaatgctaacgttctaccccagaatgtctctccatgctgactccctcttctccatacagccccactgctctagttctaccctttattatttattttcctctgccattgcagtagacccttacttgcccctcagctttgagttcatgcacccttccaatcatcttccaaaaggatgcaagaatggcttctctaaaattcaaatttgtgacatcacatcccacgttaaagtcttcactgactttaaggtgaaatctgtactccttaaacaaggtccttagcagtctgcccttgtctctttctcttgtctcatctctaatacttaaacccctggcattttttcagtgttgtttttcttctgtgtatgttatgttcttccatacttctgtacctttacctaagctattccttccatcctgttcccttcacatctctactgctaccccttccttacgtgactcctttctttttatcctttaagattgaactcaaaagtctcatcctctgaggatttatagaaacacacggggcccctaaaattgaaggaaaaatagggagccaggtcagatacctttctcctatgcatattcccctggtatcctgtatataccattgttggagttcttactgcagtgtagttgcagtacttctcagtcttctccacagaagtgcacccaatgtcagaggaaattgtattatgcttacagcctgcctgaaaccctaaattaatgacatcaattatcttagttttaagaaatgtagaaaactaacatttccatagaataggtttatgtcatttaacaaaaaaaaaatttttttaattagctgggcatggcgacccatgcctgtaatctcattactttgggaggctgaggtgagaggatcacttgatcttaggagtttgggaccagctgggcaacatagggagaccctgtctctacaaaaaataaaaaaaaaattagccgggcatggttgcacacacctgtttattatcccaggtactcaggaggctgagatgggagaatcacttgagcctgggagattgggactacagtgagttgtgatcgtgccactgcactccagcctgggtgatagagcaagatcctgcctcaaaaatcaaaacaaaacaaatggaacatttaaaattatttgttctgggccgggcgcggtggttcatgcctgtaatcccagcactttgggaggccgaggcaggtggatcacctgaggtcaggagtttgagaccagcctgaccaatatggtgagaccctgtctctactaaaaatacaaaactagccgcacgtggtggcacatgcctgtaatcccagatacttgggaggctgagacaggaaaatcacttgaacccaggaagacgaggttgcagtgagccaagatcgcgccattgcactccagcctgggcaacaagagtgaaactccatctgaaaaattaaaaaattaaaataaaataaaatatttgtcctggaataaaattgatctttgttaaatatgattatgtttatcctgaaatttcaggtgtttgctgtacactgccctatttgttctctataagtttgtattaaccaactgcgataaatagtaagcactttgatggcagggactaagtctattattacctctgtatttctagcattaaaacaatatctaacacatagtagatgttcaatatgtattgaaaaaaataattgcatgaaagttctctattggaatgatagtgttaaatgccagtgttgtgaacattttaaaattttaaatcatttttctcataggaaaagcttgactgatgatatcatgaaagtcatgcatgttttaaaatggctttctggcttatacaatataacagaatctttttttactttatatagttaaaagtacaaaatacacagaaaagaatcctatattataagtattcagctcagtacaatgttacacacacaacatgcttgcataataaacacccataccaacaaacagaaattcacctgccctcagaagcccctccatactctgtcaggtcattgcagccctttttaacaggataggttagttttgcaaaatcattttacacttgaatagtatttaagacaagtaatgttgaatagaaaatattctgtgacaaatcaggttaatgatttaatattcattattagcagccaacattatttgtaggccaggtgtagtggcttatacctttaatcccagcacttcgggaggccaacatgggaggatggcttgaggccaggagttcaagaccagtttgagcaacatagcaagactaaatagccatacttttgtatactattcagcacaaaaatgttaataataagaattaaataatactcattttagcttttgtgttcatttacaatgagcaatatattctttttaaaatttttgatgtgtaataattatacatatttagggatacagactgacattttggctcatgtatacaatgtaatgatcaaatcagggtaattagcatatctcttgcctcaaacacttatttattaattttgggaatattcaaaatcctctcttctagctatttgaaaatataaaaaaaaaaaaattattgccaggcgtggtggctcacacctgtaatcccagcacttgtgggaggccgaggcaggtagatcacgaggtcaggagatcaagaccatcctggttaacacagtggaaccccatctctactaaaaatacaaaaaattagcccagcgtggtgtgggtgcctgtagtcccagctactcgggaggccgaggcaggagaatgacatgaacccgggaggcggagcttgcagtgagccgagatcgtgccactgcactccagcctgggcgacagcaagactctgtctcaaaaaaaaaaaagaaaattattgactatagtcaccatacaatgctacagaacactagaacttactcatcttatctagttgtagctttgcatctgttaaccaacctctccctatcttcccctcctccatactcttttcattttctaataatcacaattctactctctacttctatgagctcaacttttttagcttccacatatgagtgagaacatgtggtatttatctttctgtcccagacttatttcacttaacataatgtcctttaggctcatccatgttgccatgaatcataggatttcattctttttatggctgaatttgtgtgtgtgtgtgtatgtgtgtgtgtgtgtgtgtgtgtgtgtgtataccacatttctttattcatgttgatgacacttaggttgatttcatatcttggttattgtgaatagtgctgaattaaacatgggaatgcagctatctctttgttatatcgatttcctttcctttggataaatatctggtagtgggattgctgaatcatatggtagttctacttttagttttttgaggaacctccgtacagttttccataaaggctatactaattgacattcccaccaacagtgtataagaattcccttttttctgcatccacaccagcattttttattttttgtcttgttagtaatagccattctgagtgaattgttacttttaagctcttatctctaacaatcaaattactataacagatttttgtttcactttcatttgtttagattagtagttctcaatgtggaaggacctgatttaatctcccaaagaatatttggcagtgtctggagacatttttggttgtcttaacccaccaaaaacagttgtcagtgctactgacatctagtgttacccactactgggttgctgtgaaaattagttttcagaacagagccccataaaaatgaattatctagcttaaaatgtcaacagtgccaaggttgagagtagtgttttttaaagaatgggtaggttgtttatgtttgatggaagttagtttaaatagattgtagcaccttactaatggagtccatgatatcagaaatttaattcccatagacgctagttaacctgtctgtagttcatgcactccagacctcagccagatgtcttaaacatttctgctgcagattataagaagaacaagatgagaaaatgtagatgggttggtataaatctatcactacttctggaaaaatgtctcaatatgatattttttacttaacccaagtctatctctcaccacatgactagttctcactacgttggaatcagcttgtaaactttgactagcagcattgtttaatcttgttataagttcctgaattaatggtctacaggcttgaggcagagtgaatgcctcaaagttatgggcaggcagttatctagtaccaaccatagtctcctgccatctattgggaggtgtcaggtgggaaggctagtagccctctacacatattcatacccacaccccagctctattttttttttttgagtaattataggaggtcagaaacactagaatgtacatacatgctggtaataaatggaaattaatatctgatagttttcttcatggctgtctttcagggcatagttttccatgtattttgctgtcctcttgtgagaatactacccttgacaagttgatctacatttaagctatggccacatttaaactatggccctaaaacatttgttgttatgcaagaaagaattaatggtgatatataccaattctgactctcacataaagtgtttctccaaaagtaacctcagacaacataacaacaaaccaagatttatatagttggaattgcaaatccgtaagtccttaaacttaatgagaagattaatttggaatttgaccatttgactctgctcatttaactttgaaagcagatataaataaaaaccttgtatgaagaaaattgcttgggataatttgcattaaacagtctgttttttgctaagtggcttatttgtattatggaagcatagccttattagtatttttagtcttcctaagaagaaatggaatacatcatagagctctaggccttctttagttttcagtacaaatttggtatatttggtgtttgggaggatatacatggcataaggtaaagagagcattagctttcacgtcagatccaggtccagattctgccacttataaactgttacaccttggaccacctagctattatgggcctgctttagcaccggaaagaagggagaatacctaaatatgatgagagaataagtaggtaaaataatcatgtaaaagaatggtcaggaggagtctggcctctggctctgtcatttattattgtctgtgcccatgggccggctgcaactatttgattgacctaaaatgggatggtgacttgcccgaggtcatacagtgagtcagggcagagcagctgaagctttactctctaagtctcattttccttccctgtaaaattgttgtattggtgactgtctcacagcatgttgtaaggagagatggagatcataattgtaagaggtagcccacagtgctggcacagtgtaagcaccaataaatgaaggtaatgagtacaataaaatgtgtcacttagcccctttccccaaatagtttatccatctggttgatgagagccatacactgtatgctaagacttaaaaatgtgggagttgattaagttctagtactgcattatactaataatgctagtgcatagtttaaagaataataaaataccataatgcaaagtttgtttaagccctttaccctttttttcctacattggggctttatttttagagcacttcacaaattatgcagagaaaagaggggtaggcaagaatggaagcagagagagcagtgtgaaggtagtacagtagggagttatgacagatgcttaggttagggtgatagcagaggtggtggtgagactattaaaagactactcagccaggcatggtggctcacgcgtattatcccaacactctgggaggtcgaagtgggaatatcgcttcagctcaagagctcaagaccagcctgggcaacaaagtgagaccatgtctctacagaaaatacaaaaattagccagtgtgatggcgtgcgcctatagttccagctacttgggaggcagagacagaagggttacttgagcccagaaggttgaggctacagtgagctatgatcatgccactgcattccagtttgggcaacagagcaagaccctgtctcaaagaaaaaaagaaagaaaagactactcaaggcttgagatttgataaaatagttcattttactgcttcattgaggatattcttaaaggaaactggcattttttttcacagtgagtacatggtggagaagaatacaactaatactgaattttaaaatgtgctatttctagtaaccagccttcatcttcttcccctttggctgcagatcctaattatctcatggctaatgaacgcatgaacctcatgaacatggccaagctgagtatcaagggcttgattgaatcagctctgaacctggggaggactcttgactctgactatgcacctctccagcaattctttgtggtgatggagcactgtctgaaacatggcttgaaaggtaggccatcaccccaaaatgcaaatatgcatgcagctgttttctagcaatgcatactatagaagaaagcattctttgtggagccaaagaataagaggcttgaattaataatattaatccattggaatgcagtcttttataggagcagggttatggttgactcaatggacttatagggctttaaaaatacagatcattaaatgttacagttggaggggccattataagtaatcaagtacagtacagtagttctgtttgacaggtggaaataggcctgcccagaatgagacatgacttggtcaaggtcacacattgagttgtggcagagtaggtgctagaactcaggtctcccgactcttgggtcagtgttctttccacttaactataagcttttgagggcagtaactggtcttgttcacccttgtttcctttcttcttgccttctcaatattcttttcttgttgttttttgtttgattgttttttttaaatctgtatgcctatgcttaccaacttcccaatattccatagcctatttctggattacatattcttttctattgagctgttttcttcattaataccacacaattttaggcactaaattgttaaaatgttttattatattatagggctaggccacaaactgtttgtgaaagaagaagggctgagtcttgggaagtagagaatttttttattttcacaaaatattatctattctaaaagcatgaatgaatccaaaaccatcttataacctaggattggtttcctgaaaagttgtgtgtgtatgtgtgtgtgtattgagagtgcgcttatgttgtaaagaatattaaaatactgctttatttttgttgccttagctaaaaaaacttttctcggacaaaataaatccttctgggggcctctagaactggtagaaaagcttgttccagaagccgcagagataacagcaagtgttaaagatcttccaggacttaagtaagtctaaggttgaattccatttctcaggaacagcattcttattaactatcccttgaagagcaagactaaagacaattatgtacgaataatttattttataacaatccaaaatgcatgatgtcatgaataggtgctgacaggagagaattggtatacagaatattgagaaaaatgtgctcttgagggataattattcatctaagagagattgtctttttgttgaaatgccaaacatttgcttattttttaaagcacttgggagaatcatatctaagggggtggcatgctgtacttgacttagggaaaaaaggtattcagtgggtttgagagtcaagattaaaacagctgtcaaattaacctgaagagctagtgactgtagcctgccttagaactataaagtagtgaccaccttcccaaatgagactggtttaattttaatcagacagaggcctagattgcctgtgtccacattcatgctttggacatttatataatccacactgaatttataaggatttgctattattgatctgatggaacatttttagttgggtctcccagaggctgtgtcttcaaattgtagttacattcagtaattctttttgaaagcatttgttccgggtcacattagcccacacacaaaaattccttgcatgggaatgtactgggagaggtcctgaggagcacctcagtgtgcttgttacactggaataccattagcaagaataagtgaactgattctactgtagcctttgcttctggtgcttatgttttcagttgtttgatttctgtgtttttgtaggacaccagtaggtagaggaagagcctggcttcgtttggcattaatgcaaaagaaactttcagaatatatgaaagctttgatcaataagaaagaacttctcaggtatgaacaccttcttgaactttcttctttccttggtatgttctacatcgtataaagtcaaaccatataagttcactatttttgtagatcagaaacatttgattcataacagcttcactgatactttctctcatacctcacacacatatcctcccaaatggatgatttatgttatgtgtgttctgtctgtcactgtggcatatattggtcctttccaaggcaggccaagacttacctctagaaaacagaaggcaccttagcatgtgcccaggctcaataagacaagaacttgacatgtagcattaaattcaaatatagcacaaaattggacgggtgcagtggttcacgcctgtaatcccagcatttcgggaggccaaggtgggcagaccacttgaggccaggagtctgagaccagcctggtcaatatgtcgaaaccctatctctactaaaaaaatataaaaattagccgggcgtggcggtggacacctgtaatcccagctacttgggcggctgaggcacgagaatcgcttggacctgggaagtagaagctgcagtgatccgagagcgtgccaccactcttcagcccgggcgacagagtgagactctgtctcaaaaaaaaaaaaaaaaaatgtgtatatatatatatatatttgtaaaatcacaaaatcttccagtagatcatagatacaactgggagaggcaaaacaacattattttatccgtctttattatatgattccattgtataaaggtcaaaactaggtaaaatcaatctatggtgatagaaatcaggataatagttaccttgaagaggtgggggtagagattggaagagagaaagaatccgatttctaggatttcagtactgttctctttcctgatcatgatagtgattacacagatagatgtgttttttgtgaaagttcatggaactaacagttagctgagatttggaaatgtgtgaatgttggaattcagccatattccacttctgaacagttcataaggttaggcttttgggacaataaactgtcaaagaaccttgttcattccagttctactcagtttccttcagaggctatcaaagaacaaaaatagcatgtgatcagtttttgagagaaacagtaaatttgcagctcattcacttgctgtttttgtgctattttgtcatttgttaatatcttttttttttttttttgagacagagtctcactctgtcaccaggctgtaggctgtagtgcagtggcgctatctccactcactgccacctccgcctcccgggttcaagcgattctcctgccacagcctcctgagtagctgggactacaggcgcacaccaccacacccagctaatttttgtatttttagtagagacggggtttcaccgtgttggccaggatggtctcgatctcttgatctcgtgatccacccaccttggcctcccaaagtgctgggattacaggcgtgagcccagcctattaatatcttttatagtgaatcagaaaagaaataaggaactaatatcagtgaattatattgattgttaacagtgattgaggttgacctttacccccaggtaacttgttgaaaacaaattgattgcagtgttgttttaatcatgatgtcaaattgactgaaaatgaataattcaggtcactgggttttcgtgttttgttttgttttgctttaagagactcgcgctctgtcacccaggttggagtgcagtggtgcaatcacggctcactgcagcttccacctcccaggttcaatcgattctcctgcctcagcctcccgagtagatgggactataggcatgcaccaccacacctggctaatttttgtatttttagtacagacagggtttcaccacgttggccaggctggtcttcaactcctgacctcaagtgatccacctgcctcagcctcccaaagtgtggggtttacaggcgtgagccaccgcacccgcctgtttccatttttttaaaaaatctaaaagactattttttagagtggttttaaatttatagcaatattgagtagaaggtacagatatttttcatacatacccttcccccctgtacaacctccctcattatcaacatcccacaggagtggtacatttgttacaattgatgaacctacattgacacatcattatctcccaaagttcatagttcacattaaggtttactcttggtattgtatgttttatggattttgacagatgtataatgatatgtatccatatgtcattatagtaccatacaaaatagtttcatggccctaaaaaatcctctgtgctccacctattcatctctctgtcctccaacccctaataaccactgatcgtactgtgattgtactgttgttaccaggggtttactgtctctgtggtttttccttttccagaatgtcatgtagtgggaatcatagagtatatggccttttcagactggcacctttcacttagtaatatgcatttaagtttcctctgtggcttgatagctccctttttttttgttctttgagacagagtttcactcttgttgcccaggctggagtgcagtggcacgatctcagctcaccgcaatctccgcctcccaggttcaagtgattgtcctgcctcagcctcctgagtagctgggattacaggcgtgtgccaccatgcccggctaattttgtattttttttttttttttttttttttttttttagtagagacagggtttctacatgttggtcaggctggtctcgaacttccgacctcaggtgatccacccgccttgacctcccaaagtgctgggattgcaggcgtgagccactgcgcctggcgatagctccctttttttagtgctaagtcatatgccattgtccattcatttactgaaggacatcttggttgctcccaaattttggcaattaagagtaaaactgctataaacacatgtatgcaggtttttgtgtggacgtaagtttttaactcagttgggtaaataccaaggaatgcaatagttagatcatatgaattacatcactggtttttttgtgtgtgtattagtaatttaggtgcattataagcagtatttaattatctatgggtcttcacgaatttttttttttgagacagagtgttgctctgtcacccaggctggagtgcagtggcacaatctcagctcactgcaacctccgcctcctgtgttcaagcgattctcctgcctcagcctcctgagtagctgggattacaggtgtgcaccaccacacccagctaatttttgtatttttagtagagatggggtttcaccatgttggccaggctggtcttgaactcctgacctcaagtgatccacccgcctcggcctcccaaagtgctgggattacaagcgtgagccaccgtgcccagccaataatttttatccattcagatttttttttgtttttagtagagatggggtcttactatgttgctcactctggtctcaaagtcctgggctcaagcagtcctcccgccttggtctccccaagtgctgggattacaggtgcgaaccaccatgccgagctaccaaacaaatgttttaagatgcataaaagattgcaaaattatctgatggtgcatcacaagtacaaatatgtcagaaaagtctgaatacctgcttcaaccacaatactgttcagtcacgtctttctgccagcctattatttaaagaatctattcatgcgcctattatttttttcttttaaaaaattttttctccagtgccacttgccaacatccacctattattctaaaagtaaaatatttactaaagcctttctttttgtagttttttttttactatttttgtagatggctataatcaaccatgatgactatgattcaaccatgaatcaaccatttttgtccttgtctctggatttttgagatttttgttacaataaggaattctgtggatttctcttacagtgaattctacgaacccaatgccctcatgatggaagaagaaggagccataattgctggtctgttggtgggtctgaatgtcattgatgccaatttctgtatgaaaggagaagacttggactctcaggtatgggaaagagactcattcccatgggtgtcactctgagttctgctatctcagaagtggatttgattaggttataccaaccaaattaggccatattctatgagtcataaacaggatttccttccattttgatgggaatataaaaaaaagattgtttttccttccagtttggctcatttatacgttacgaatgttttttagattcttgtcttggctgtactctctgttaaacatacatatacacacacacacatacacatttacatacacatacatacacacacaaacacaggtatacccagagatattgcaggtttggtttcagatcacaacaataaagcaaatatcataataaagcaagtcacatgcattttttggtttcccagtacatgtaaaagtttgtttatactaggccaggtgcgattgttcacacctgtaatccctgcactttggggcaggagtatcacttgaacccagaagtttgagaccagcctgggcaacatagtgagaccccgtctctacaaaaaataaaaaattagctggttgtgtagctacttgggaggctgaggcaggaggatcacttaagcttgggaagtcgaggctatagttagccataattgtgcattccagcctgggtgacagtgagaccctgtctcaaaataaaactctaaaaaaaattttttaaataaaaagtttgtttgcattatactgtagtctattaagtatgtgatagtgtaagtgtaaaaaataatgtacataccttaacttaaaaatactttattgctaaaaaaatgctaacaatcacctgagccttcagtgagttgtaatctttttgctggtagagggtcttacctcagtgttaatggctgctgactgatcttggcagttgctgaaagttgaggtggctgtggcaatttcttaaaataagacaacaatgaagtttaccacattaattggcttcctttacaaaagatttctctgtagcataccacgctgtttgacagcattttacccacagtagaatttctttcaaaattggagtcagtcctctcaaatcttgctgctgctttatcaactaagtttatgtaatactctagtaaaccatgctgtaaacagatgtgctgtctttgttgtaccctttatttttgttttgtttttgtttttgttttttgttttttagagacagagtcttaatgtgtctcccaggctggaatgcagtggcaccatctcagctcactgcaacctccgcctcctgggctcaagcaatcctcatgcctcatcctcctgagtagctggactacaggcatgcaccaccacacctagctaatttttttatttatagtagagatggggttttgccatattgcccaggctgatctcaaactcatggcctcaagtgatctgcctgccttggcttcccaaagtgctgggattacaggcatgaaccaccatgcccagcccactattccatttataaagcataggcagagtagatttagcatcattcttaagggccctaggattttcagaatggtaaatgagcactggcttcaacttagagtcaccagctgtattagcctctaacaagagagtcagtctgtcctttgcagctttgaagccaggcattgacttctcatctatagctatgaaagtcctagatggcattgtctaatagaaggctgttttgactacagtgaaaatctgttgttgagtgtatccaccttcatcaattatcttaattagatcttctggataacttgctacagcttctattatttacatcagtgcttgctgcttcaacttgtacttttatgttatggagacactttccttaaacctcgtaaaccagtggctgctaacttcaggcttttcctctgcagcttttttacctctcaatctccatagaattcaagagcattagggccttgctctgaattaggtgttggcttaagggaatgttgtggctggtttgatcttctatacagaccactcaaactttattcctgtcagcaataaggctgttttgctttcttgtcattcatttgttcatgagtagcacttaattcccttcaagcacttctcctttgctttcacaacctggctgtttggcccaaaaagcctaccttttggcctgtcttctctttcgacatgccttcttcactgagcttaattttttctggcttttgatttaaaataagaaatgtgcaattcttcctttcacttgaacacttagtggccattgcagggttattaattggcctaatttcagtattgttgtgtcttagggaatagggaggccaaggagaagggagagagatgggggaacggccagtaagtagagcagtgagaacatacacatttatggattgcttgccatcttatatgggcgtagttcatggagccccaaaataattttgatagtaacatcaaagatcactgattacaggttatcatagcagatgtaataataaagaaaaagtttaaagtactgtgagagttaccaaaatgtgaaaccgagacatgaagcgagcacatgctgttggaaaaatggcactaatatacttgcatgacgcagggttgccacaaaccttcaatttgtaaaaaatgcaatatctgtgaagcaaagtgcaataaaatgaggtatgtgtgtgtgtgcgtgtgtgtgtatactaaaatatatgcagttgactcttgaacaacagagtaaggcattccacatggtagaaacatcccacatagaaaattcacctaaaacttttcattccctaaaaacgttaagtactaatagcatacgattaaccagaggccttactagtaacataaacagtcaattaacacatattttgtatattataaatagttatatttatatttattttattttatttttgagacaaagtctcactgtcatccaggccggagtgccgtggagtgaactcagctcagtgcaacctctgcctcccaggcttaattgatccttccacttcagccttcagagtagctgggactataggaacatgctaccacacccagctaatttttttgttttgtggagacagagtttcgctatgttgcctaagctggtcttgaactcctgagctcaagtgatcctcctgcctcggcctcccaaagtgctgggattacaggcatgagccatggcgcctggcctattgtatatttcatatgctgtattcttacaataaagtaagctagagacaagaaaatattataggaaaattataaagatgagaaaatatatttactattcatttaaatgaatggattatcataaaggaaccagatcatcataaaggtcttcacactaaccagattgatgaggaggaggaggaagaggaggcggttggtcttgctgtctcaggagtggcagagatggaggaaaaccttttttttttctgcctggatgacagagtgagactttgtctcagaaataaaataatataatataaatatatattttatattgtgtatatatatagtatataggtggactcgcacaattcaaagtcgtgttgttcaagaatcaactgtacagttgtccttcagtgtccaaaggagattatttccagcacctccatgaataccaacactcacaatgctcaagcccttacagtcagccctctgcgtccttggattttaggacttgctgagaatgagagcgaactgtactaaaggccattaaagcacggtagttaagagtaaaggctctgaagctaactgcctaggtttggattctggcttcctcattttctagctgaatatattttataattacttagtttcttgttgtttcagatttcttgatgtaatgcagttagaacagggcctagtacacattaattgcccaataaataatgttttcactttaattacttctcaccctttctgtatgaaatactatgacaaacttctgttatgttttattctggtaaaataggaagggaagtaagattttttggtgtggattttttttttatttttttatttttattttttttgagacggagttttgctcttgttgcccaggctggagtgcaatggtgagatcctggcttaccgcaacctccacctcctggattcaagcaattctcctgcctcagcctcccgagtagctgggattacaggcatgtgccaccacacccagctaatttttgtatttttagtagagacagggtttctccatgttgttcagtctggtctcgaactcctgacctcaggtgatccacccgcttcggcctcccaaagtgctgggattataggcaagagccactgcgcccggcctttggtgtggatttttaaaaagaaataagctaaataataaaatggcaatcttgaaaaatgaagacgtgtacatcaatgaaagtttggaggaacagacaccaaaatattagcaatggtcatcttcagtggttgggattatgagtgtttaatattacttccccttttttttagctgtattttctgaaacttctacaggggaaatgtgctaatttttaaaaagttatttctaaaaatgaacagggattcagtagcagaatacccgaaataagcaaaagagaaagaaactttagaccttatttatattaagtattctgttgactgtgttagttgtgatctagtcttctagtcttattgacataatcttgattctttacttccaactcttgttaattcttgattaaactgaaagtaaaacagtacatttttaatcgtaaatttctagtaagtgtcatgactgtattactgttttgagtgcctagaaggagacattgtgttatgccttgtaaagaatatctaattttatattaaaacctgaaaattctctctgtaggttggagttatagatttttcaatgtatctcaaggacgggaacagcagtaaaggtactgaagggtacgtacaaagaaaattagatttcttttctcctgatgtagcattttttttcctttggtggtacttaaagtttacaacaatactgttttaacagacgtgctgaaagaatttctgatcatatagctttaataaagtcttgccagaaatatctgactattacgcctacctctaaaccctaaaaggatttttttgtttgtttgtttaatgattttcctgctatgtggttcaggggcaaagaaaatacaaattttctaaaggattccaattctccatgtcttatagtagggtttaaaaacatggtcattttgaccagaggagtcgcattctcagtttgcttaaaattggcaatatgaaatatgcactgtgaggttatgtaaaatattgacattaggggaaactgattgaaggtacatgggaactctgtgctgcgtttatacctcttcttgtatatctaaaattgtgttaaacacttttaaaatattcattatggtacttagtaattagagatcagaagcacatctattctttttataaatttagccattgaaagcataattagtctgatttttaatttttgacattgagctaagattatctcactgttcttttagtaattgtataggtttggggccttaattttatcttacagctgaaaaatctggctgtttatcttttgtctactacagattagttggttgtagacgtgaaccttctttatccacagtttaatttttcatgtaataataaacatttgggccgggcatggtggctcatgcttgtaatcccagcactttgggaggccgaggcaggcagatgacctgaggtcaggagtttgagaccagcctggccaacatggtgaaaccccatctctacaataatacaaaaaaaaaaaaatagccaggcattatggcgggtgcctgtaatcccagctacttgggaggctgaggccggagaattgcttgaacccgggaggtggaggttgcagtgagccgaaatcacaccattgcactccggcctgggtgacaaagcaggactctgcctcaaaaaaaaaaaaaaaaaaaaaaaaaaaaaaatatatatatatatatatatatatataaaataaacattcaatcttcgtgaaaccctttttaaccattcactttaaatgttaaatagcacttacagacaaatatttagcccttgagaacagctatattacatcagagtgagcttaattcaagtcctatgacaattggaaagttgttactataaatactactagtgaagctgaaaaacctattaacaagaaaatttttatcctttaaatgcgtctaatagattgcaacatcatacctgtgacctaaattattaatactgaggtttgtaagctataacaagagctttattagtgaggggttttgtcatttttaaactcctgactctttcttgttgctatgtcaagagggttttacatcaaatctgtcttatggttcagtgtatctgtgccacaatttttttctcatgttttatgaaaagatggggtggggtggggttgggatcttggtatttcttatgttatttattttatttctattttcttccccttcccccagagacggtcagattactgcaattctggaccagaagaactatgtagaagaactgaacagacatttgaagtaaataatgaataaatatattactttactggggaattgttgaaggagaagggaagagtaagatgatgcgcagtgaggataaattcagacagtgttcaacaaatatatgtagaattcctgtttgccaggcactgagttaggcactagataaataaatggcatttaacagttttggtgacctttagtgaaaggcagtatataatgttatatataatatataataacatagtatataatattacgtatgtaattataactctagtgattaaatagataaatacgtaaatacattcagttaagaattttaaaatatgtgacatatacagttgaaattggtagctttttcagtttagtagagatagctgcatatttcagaactgatcttgggtaaaccactcattacattagtacctttaaattaatcatatcgtccaggtgtgctgggccaaagcctgtagtcccaacactttgggaggccaaggcaggaggattgctttagctcaggagttcaagatgagctagggtaacatagcaagaccttgtctctattaaaaaactcaaaactagccgggcatgtgcctgtagtcccagctacttgtggggctgagacaggaggaggatcacttgagcctgggaagctgaggctgcagtgaaccctggtcttgccattacaccccaccctgggttacagagcgagacactgtcttaaacaaaaaaaaaaaaacgaaaaaaaagatacatgctttgttttcctgcatttctcatttatacattgaattaatagcattaatttaatatataaattgaatttctttgccattattacagttaattcaccaagtattcacaaagtacagtagttcccccttatgtggaggggatacattctaagacccccaaaggatatctgaaaccacagatagtaccaaaccctatatatgctatgttttttcctatacatatgtacctatgataaagtttaatttataaattaggcaaggtaggagattagcaacaataataaaataaaacaactttaacaatagactataataaaagtaatgtgaatgtagtgtctccctcaaaatcaacacatccttttattttgttttcattgaacttcttcttcctagttttctcaggtttttttcccccttcagttttctgtatttatatttcttattgtccttaaatgactatggctattctatatctgagcacagtgaataaaacattaaagtttaattaaaaattaaagaggccgggagcagtggctcacgcctataatcccagcactttgggaggccgaggcaggcggatcacaaggtcaggatatggagatcatcctggctaacacggtgaaaccccatctctactaaaaatacaaaaaaaattagccgggcgtggtaccaggcgcctgtagtcccagctgctcgggaggctgaggcaggagaacggcgtgaacccgggaggcagagcttacagtaagccgagatcgcgccactgcactccagcatgggcaaccgagcgagactccgtctcaaaacaaaacaaaacaaaacaaaaattagagaaagaaagcattagaaataccagtttcaagattttgtgcattgagaaatcattatttccaaaagattttctaagggccactgtccttacgacaattcagtgttgtatatatgttcacagtttatttttttatcttaggagaagtaaaaatccttactggataatccttatttatttgtgttttttaaacatactcatacttccctctattgtttgtgtcatagagagcacaaatcagatttggacatcttatgtgggatttaaacaaatacgtttatacatgagtctatcaaaatccttatttacatgtaagaaaaaaatacatgcccagctttgcccaaggaagtcccagagggagaacagtatcttattgtactattcttacctatttttgaaccacagttgagtgcaggtaactgaaaccacagaaaacaaaactatagataagagaggactactgtattttcagaattttccagaacataaaacagtttcctctctcctgagaagagctatccaaaagctattggtattctcaagtactttgatgttcttgttatgttaagactactgaataattttgaagaataattaatatattcattaattatcttgtttgtagttctcttatgaaaaatagacatttttaatttaagtaaaacttataatatgattatactactgtcagtaaaattttaagtagtcttggttccacctagcaaattcaaaacaatttaagtacattttctctggggaccaagaactaatataatgactttaatgaactatggagatgttagccaagcaaagatatggttacagttaacaatgaaatataaacaatggcactattatttactctttctatgccttagtttctttatctgtaaatgagaatacctaacataaagggttgttgaaaggaataaatgcaataacgcaaataacgtaatttagaagagggtttggtgcatgtaagtatttaattcatatagactgttattatcatatgtagataaacaaagtttattctgtagggaatgaactcttttatttcattgaataaatacttactgaattaaaactcaaatgccaaagataatagccttttgtaagcctagaggtcaagatttgtgagcattaaggcctggcgcagtggctcatgcctgtaatcccagcactctgggaggccgaggcaggtgggtcacttgaggtcaacagtttgagacctgcctgggcaacatggtgcaaccccatctccaccaaaaaatacaaaaattagctggatttggtggtgcatgtctgtagtctccagctacttgggagactgaggcaagagaatcacttgaacccaggaggcagaggttgcagggagccgagaatcgcaccactgcactccagtctcagcgacacaacgagactccgtctaaaaataataataataataaaataaaaaattatgaacattagacaatgaaggataagtgtgaagggtttaaaaaggaaggtacagagtattgtctgtttttcaaaagtgacttttttttcttctctatattatagtgctactgtaaacaaccttcaggcaaaagtagatgcattagaaaaatccaacactaaactgacagaggaggtaagttttggaaatgctttgattgacttatagaatttaatatgcattagtagaaccaataattttaatgtaaccttggaaagaaagaacttgacttttcaaataatattgactgtagtacataacttcttattctttttttttttttttttttttttgagatggagtttcgcttttgttgcccaggctggagtgcagtggcgcgatcttggctcaccgcaacctccgtctcccaagttcaagcgatgctcctgcctcagcctcccgagtagctgggattacaggcatacaccaccaccccggctaattttgtatttttttagtagagacggggtttctccatgttagtcaggctggtcttgaactcctgacctcaggtgatccacccgcctcagcctcccaaagtgctgggattacaggcgtgagccacctcgcctggcccataactccttattctgactagaacggcccagttggcttattgcagggatctcatttacccaattagactgtgtaggggcatgttgccaggttgatggagtatcttggtttctttcgtgtgcatgttttgtctgggctagcctagattaaatgtttagcatatagcatattcatcatttattcagtaagcgtttcacacagtttatgtgcaagagctagacaaatatttatatgtgccaggcattgatttatgttccagattggcaaactccccaccacttatgtccttgttttcttcctgggacagttacatagataaggtgaagagtactggtcagaagatcagtaatccctgcctacaaatcatgcttatgtaactcatgtgctcctgagtaagtcagccacttgacctccaagaggctgagttccgtcactggaaaatgagagtgtttacaatacacttccttttcggcctcacaattaactctgaagatcagataagaatatgaaaactcttagaaaagtccctaaaataagaacagaaaaataacctcatgttttacttctaataaaaatattttttccttaacttgccaagccttagctacagatattttttctttaaatagcattagatggttttatgaaaaatactaaataacattgtccagatggcaaagagtttaccttccttatttctttttctttttttttttttttttctgagatagggtatcattctgttgtccaggctggaatgcagtgacacaagggcttactgtaacccccgccccccgggctcaagtgatctcccaccctcagcctcccaagtagctgggatcacaggcacacaccaccacacctggctatttttagtagagagggggtcttgccatgttgcccatgctggtcctgaactgctgagctcaagtgacccgcctgcctcggccttccaaagtgctagaataataggcatagccactgcgcctggcccaccttctttatttctaattgtaatgatgcccttacaccccatgggatgaatttagtttaaataaaatcaaattaaagcactagtcaggaagatgcttttaatcagtttttctttagaatgaacattttcattattatagttttaaaataccttttttattactcaactctgtgaccttcactttcggacaaaaatttttaaattttatatatcttaaaactttatgcttagggtccttagaatcttatcacataggcttttggaatgttcagcacagattttttactgttattctgctgctactatgttgaagcagtacagcatagcaattaagcatgatctctaaagttaggctacttgggttcatgtcctggctctggcacttgctagttttttgtttttttgttttgttttgttttgttttttgttttttgttttttgagacagagtattgctttgtcgcccaggttgaagtgcagtggtgccatcttggctcactttaacctccacctcccggttcaagcaattctcctgcctcagcctccgagtagccgggaccacaggcatgcaccatcacagctggctaatatttgtatttttatagaaacagagtttcaccaggttggccaggctggtcttgagctcccggcctcaggtgatccacccgcctcggcctcccaaagtgctgggattacaggcatgagccgccgtacccagccacttgctagtcttctaatcctgggccaattacttaagcttctattccttgatttatttatctataacatggaaatagcaataataacattttatgagattgctgtgtgaatgaaatgatttaatacatgattagggcttagaacagtacctaacacatcataagcactcaataaatatagttgttaattttattccctcagtcataagacttgtcttccttagagtcatattaatactaacaatatttattcattgacttatttattttaccagtagcacttattttcttaaagaaaatatgctctaagagagtagacgaggctcattagttctgccttttttcatttccattttgggtttaagaaagccagtaaggccaggcacagtggctcatgcctgtaatcccaacacttgggacatcaaggtgggtggatcgcttgaggccaggattccaaaaccagcgtgggcaacatagcaaaaccccatctcacaaaaaaaaaaaaaagggccagtaaaaaagatagcagacctcttttcccctcctgggttttgaatctgaatgacaaactaagaagaattaagcagatgaagatataaatatccacttcaggcctggcacagtgactcacacctgtaatcccagccctttggaagccaaggcaggaggatcgtttgaggccaagagttcaagattaggctgggaaacatagtgagaccccatctctacaccaaaaaaattagccggctgttgtggtgcacacctgtagtcccagctactcggcatgctgaggagggaggattgcttgagcctgggagaccaaggctgcagtagccaagattgtgccaccacactccaacctgggcaacagagggagaccctgtctcaaataaataaatagataaataaatgtctacttcattattggtaaagctgaattggaaagcctcctgtgatctgcagccataatcaggtttcccaatagtttctcttaaatcaagattttggaatgacctgcctgagggcatacttgaatctagagaggagacctacttgcccagaattggtttcgtgcacatttttaggccacaggatctgagagagaattggacttccaggcctgcccccagaaagcatgagcttctctgtgcttaccatgttaggacaggaactgagcagagcctgcacccactgctaatgaggagataataattgaggagactagcctggctgagaggagcctgcttggttattcctctcggcctcatacaggcaccttcacattctccgggagtttagtagatgcagagaagaaaaaagtgtttccaccttactttttccttctaagaaagagatataaatgtttccctgtagcagttgactgctaataacgttacctgatctttttaggtgttgaaatgaaaaatctcctcaatgcttaatgggatcttttagcatgagaactttggagttcatgtctttaatcttttaagaaatcatctataaaagatcttatagagcgtttgtcacatgggttccatggtgtgacaggacccctttattaaacattttagaaatagacattattaataaataatttttttcttactaaatatgtgtacatctataagaacacccttgagataatcttaagttaaaacttttcatataaaagtagcagtaaggtgatattttatttcttttttttttttttttgagaccgagtttcactctcaccaggctggagtgcagtggcgcgatcttgatctcgggtcactgcaacctctggttcaagctattctcctgcctcagcctcccgagtagctgggattacaggcacacaccactacgcccagctaatttttgtatttttagtagagatggggtttcaccatgttggccaggatggtctcgatctcctgacctcgtgatccgctcgcatcagcctcctaaagtgctgggattacaggcatgagccactgcacctggccaaggagatattttttatttttatttagactgctctaaaaatatttcttggtcgggcgcagtggctcatgcctataatcccagcactttgggaggccgaggtgggcagatctcttgaaggcagaagttcaacaccagcctggccaacatggtgaaaccttgtctctactaaaaatacaaaaattagttgggcgtggtggtgcatgcctatagtcccagctacttgggaggctaaggcatgagaatcacttgaaccaggaggcagaggttacagtgacccgagattatgccactgcactccaggctgggcaatagagtgaggccctgtctcagaaaaataaagaaaaatatttctcttgagttcttataagaacatttttattgggttatagcttccttgctttctaagaatatccaagcctgagaattacatcctagcagatcgtgaattatcttatactatgttaattttaaaaagataaaagattatttttaaaattttatccacagcttgcagttgcaaacaacaggatcattaccttacaagaagaaatggaacgagttaaagaggaaagttcctacatactggaatccaatcggaaggttaatcttactggatttataaaatattcactgagagcatatcaacttgttagtggtaaaggggagtctctaaaggactattttaagcagctggcctgtatcaagcacactttttatttagactccatgcataattgtgtgatgaaggttgtgggagggttatgcgcctttttctacaagatgcttcgtggcttcacagccacctacatctgtttagagacttcaagaaacagtctaattcagtttcttgtttttatgtactaatggttcaaacagtatttaataatttgttatgttaaacatactattacttttatagcatgttactgttttgtaagaagtgacaccttatttatatatcactgggaaagagctaccatataaatgtattttctacataacttaattccttaaagtatcaaactttttatacatgtctaattagaattttgtaaacctttatgttttgtacaattccaagccttcttaattaaggacataatttaatacatttagccctttacgatgactgaggatcattaattaccaacattgacaattccctactaaattataatagtgccactttaggaggctattgaaattgatagagcttctgacacctacacttaaatattccccgatttctgtggatggttttttttcctgtcttttacgtattcaatagcatctcttactttttactgatgctcggtgttatctttaggatgatctctactttcttttatcttcatgcttctaatctactctccctaggaattcaaatccatagttattaaaattgttcttaaagagttactaggctctgcgaggggacaaaagcagttttccatgagtaaagtgattgactttaataatgcatggacttcatgactgctcagaataatttttttatgacctgcttgtttttatctgtgatcttgctggatagttgaagataaccagttgcgaattctctggagattgaatgtattaacatttaaacctatagcccctgggctgggtgcagtggctcacgcctgtaatcccagcactttgggaggccaaggaggcagatcacttgaggtcgggagttcgagaccagcctggccaacgtggtgaaaccccgtctctactaaaaatacaaaaattagccgggcgtggtggcgcacgcctataatcccagctactcgggaagctgagacaggagaatcgcttgaacccaggaggtggaggttgcagtgagcagagattgagccactgcagtccagcctgggcgacagagtgagactccgtctcaaaaaagaaaaaaaaaaaacctataacccaactcatattttgaaatgaatgctatgttatttttagaggctgatttttaaaacttctaccatctggtttggaaacctattttaggattttaaataaagtgtcaggaagcccccaattcagcttaacctttaaaaatgtactagacttcaatttctttgttgtgtttgttcattattatacctgcttcagtatgatctttttttcttgctaagtagcagtgttagtgtctaattctgtatagattaaatccttaaatatgtacaatgttatttatcttttcaagggtcccaagcaagacagaactgcagaagggcaagcactaagtgaagcaagaaagcatttaaaagaagagacacaattacgattggtaaactatgcttaatttctaatagttcaggaatatattaaaaggtaactgcccacttagaggttttatcatacagaccaagattaggaatatcagtagtgttctgaaaaattctagatcctataaaatggttcatctctttttaacccacattccttatcatactttctcaatctttttctgagtattctcaacaagattttgttaatctttatttttttgcttttatagtttgtattacaagaatattaagtatacagaacctacttttttaaactatgccgtctcactcctacctaagtcctcatccctgcaaagattcttggaggtggtggctcctcttttctttacaaagaatcattaatgtaggattactctattttatttttagctgttatttctgatttattattggtcttagatataaatggaaaatttatcatccagtattagtcttaagatttttttagaaattaaaaaaaatacatatcaatatatagatagagagtatatcatctcactctaatcagaatggcaactatcaaaaaattgaaggataagtgttgacaaggatgtagagaaagagaacctttacacactgctggtgaaaatataaattagtatagccactatggaaaacatagttgtcttaaaaaattaaaaatcgggccaggcacagtggctcacacctgtaatcccagcactttgggaggctgaggcggatggatcacgtaaggtcgggagttcgagaccagcatgaccagcatggtgaaaccccatctctactaaaaatacaaaaaaaaaaaaatcagccgggcatggtggcatgcacctgtaatcccagctacttgggaggctgaccaggagaattgcttgaacctgggaagcggaggctgcagtgagccaagattgtatcactgcactccatcctaggcaacagagccagactccgtctcaaaaaataaaaaataaattaattaaaaatcagtctagcaaaagatccagcaatcccactactggggatatatccaaaggaaatgaaatcagtatgtcagagagaatctgtactcctatgtttattgcagcactattcacagtagccaagatagggaatcaacctaagtgttcatcaacacttgaatggataaagaaagcatggtatatatacacaatgggatgctattcagcgataaaaaggaatgaaatcctgtcatttgtggcaacatgggtgaacctggaggacattatgtgaagtgtagtaagccaaacacagaaagagaaatgccatatgataacactcatacgtggaatctaaaacgttgttctcataaaagtagagagtaaggtggggttaccagagggagaggaggcaggggatagtaagagattggtcaacaggtacaaagctatagttagataggaggaataagttctggtcctctgttgcatagtgtggggtgactagagttaacaataatacacattttaatatagttagaagaaaggtttttttttttctttttttttattgatgcataatagatatacatagctctggggttcatatgataatttaatatactcatgtagtaaagaccaaatcagtgttcttggtatacccatcaccttaaatatttgtcttttctttatgctggaaaaaaaagaggcttttgaatgttctcatcacaaatgataaatgtttaagatgatagatacattcatttctctgatttggtcattacacaatttttatattatcaaaacatcatgttctataccataaattactatgtgtcagtcatactttttttaaaaagaatttataataagggatactattcctgtactagattttatccaggtgctagtgttattatattaataacccctggtattcacatactaactcttcctggagtttagatagtataacaaacacaaggacctccccagaatgtctttaagaataaggaggagcctgaaaataaggggtgacttaacttgtactaaaaaattattacaggccaagcgccatggctcacacctgtaattccagcactttgggaggatcgcttgagcttaggagtttgagcccagcctgggcaacatagggacaccctatctctacaaaaattacaaaattaaccatgcttgatagtacatgcctgtattcccagctacttgggaagctgaggagggagatcacctgagcccaaggaggttaaggctgcagtgagccaagatcacactgcactccagcctgggtgacaaagtgagaccctgtctcagaaaaaaaaaaaaaaaaaaaatatatatatatatatatatatatataaaaacaaattgacagtatataacataattttagatttatttatttgtttttttttttttttgagatggagtcttgctctgccacccaggctgaagtgcagtggtgtagtctcagctcactgcaacctccgcctcccaggttcaagagattctcctgcctcagcctcctgaatggctggaattacaggcgcctgccaccacacccagctaatttttgtattttagtagagatggggtttcaccatgttggccaggctggtctcaaactcctgaccttgtaattgtgatccgcctgcctcagactcccaaagtgctgggattacaggtgtgagccatcacacccggccagaatttcagattttttgaaaacaaagcgatattattttgacatccttaaaatagttagcatttgccttctatgtatttgtgaatgagatctcaaaatataatacttttcataagaaaggtcgcagaaataatatatgtcagcattttaagaaggggtatgattcgttttctataatgctaatcaagtaaaatgagaatctcagtgaagtggcacataataaaaatcttaaaatttttcatatccttttatcacagtaagacaaatgtttgttaagaaggaaagaaactaagaaagtatttgaggtcctaggtgagcccaaggcacaaggcagatgcagaagatcctcaggtctttgtatcttcgatcacccacataatgttgcagtaataatggttgaaacaaaaagaggtttcatgttaagtgaactaaaaattctgttagcggccgagtgtggtggctcacacctgtaatcccagcactttgggaggctgaggcgggcagatcacgaggtcaggaattcacaccagcctggtcaacatggtgaaaccccgtctctactaaacatacaaaaaattagccaggcatggtggcatgcacccgtagtcccagctactcaggaggctgaggcaggagaatcgcttgaacccgggaggtggaggttgcagtgagccaagactgagcccctgcactccagcctgagcgacagagcgagactctgtctcaaaaaaaaaaaaaaaatctgttcgcctcgtaaccatactagtcatcatcctcagtaattgcgatgttaccccagggacccagatggtcctctgggttccctgggctcttgaatatatcaacaacattcacatttaggaggactgcaactgcttcattttgtgctgactgctgtaaccctgtaggtatatttctataataagatatgaccatcagttgtcgtaatatctactgaagtgtctcaaatatgtatatattttagatgtattaaataacactatctttggcttagcaggtttttcagatttgtacattattgggcaaatgttattgtatatcctaattattattgttaattattaattaattattgttaatgtctctgaaaatgaatggtagcttaagctattttgccagaatattcagacctgagagttttggtgtactttttcctgtgaaatattatggtttgtacttagttgaaggaacagagtgtaagcaatttacttacctttgggggcaggatgttgagaaagaactggagatgcagatcagcatgaggcaggagatggaattggctatgaagatgctggagaaggatgtctgtgagaagcaggatgccctggtatctcttcggcagcagctggatgacctcagagctctcaagcatgaacttgcctttaagctgcaggtaggggaaatatgaggaatagactcactggctctctaaaatcctggggcttccctcctcccatctgatcctccagaatcacactttaattacaagaggaaagaatcacatctcattttgatgctagctgccagtaaactactttcagaatcagacaaccatgggatcctgtattgctgttctagaaaaccatggccacttttcacattatagtagaggatgagggtcttttttatcctatagggtaatttctactctgcagtctaccgtgccagctaagttatatattctattagcttttacactggaatgtgatacattgatgaactattactgtgatcacactgcatataacaatactaactttagataaattgcttttttttccatttcaggattaactgatattgaaatatatgaacatttctgttttcccacttaccattagattcaaaaggcatgtgtggttgtattttaggatttatgttatacaggttgtttatcgttattttccataacagagttcagacttaggagtaaaacagaaaagtgaactaaacagtcgcttggaagagaagactaatcagatggctgctaccattaaacaacttgaacaaaggtaaaagtcctgtttctttaatgaaacactttggattgtcagtgctgaagtgaaaagaatgtgctgtacattcggcaaatagaaaatacatgaaattcttccaaattagcatcagacattctggtagaaaaaagccagttgaatgttatgtgtgttttctaaggtatgactgaaatgtttttaggaaatgtcaatcacttgactagcctttaaaaaaaaaaaagaaaggtcagccttttatgactgttttgaacatcagaactcttaatccatgtcagagtcatgtgttagaggaaggatacttaaaagcatggaaggactcttaaatgtatgtatgtaattctgtgattttattgttcatcactgaagtctttgaatacttggatgctaggggatatagaggcactgagagataggtgtcctccaaggatctattctggatctttctctcccttctttaacccttttctcttatctcccttttctttctcctgggtagttctgtagcttccactgtcacctccagtgtgttttcccagctcttaccttcatctggagaccagtcttgagttttcatcctttgggcagctatcttccaccagtatctacaattcagtctgcccaaagcacatcttcttcctatgctactctctttctgtgcttatgtgaaaccaccattttctctctggcaacttagcagccaagagaaatggctgagtcttcaaggatgaatgtgacgtggtacccaaggtcatttgatgtttctacccttaacacctgtttgtcacccttcttgcacttgagcaaaactaaactgctggtccctgtacttcccatttttcccatttatttctttcccaatagttccaccaattagaaatgtcctaattcttcccactcccttattcgtcagatacatttttaagtttaggctcaaatgccacctccccagagtttcctctgatacctctttgcagctagaaatgatctgtctttctgggaactcccatagcttcatactcatatctatctatactgcttatggcacttctcactgtctactgtaccttttaactctttatatatgtctcctccgatgcgagtgtaagctccctgagattagttaacgaatcttttaagttcccgtattagatctgtcgcagtgccttgaatatacaagcattcattcagtagatatatgaatgaatggattaatgggtgatttcttatattcagatgattcttaaccagtaagggtcctgaacagcagtgcatattaatgttaactcaaaacttaatggcaaatttataaataaacctgaaacctcttacatagccaaatacaaatgtatcagtctacctaggaaagatggttaggtacttgctcataaacagttatatgtttatgatttaacaaaatgattttactgttcataaattgtgcttttgaaatgaaatgtatcaaatttcttttcaatgatgttttgacttggaatttaaagcaaacagaaagagaataatgacttatctctttgagtattaagctgacttattctcttgctatttttgtgtttcctgtttatccattttctcattctcctttcacttcattgtcatttttattttatttagtgaaaaggatttggtgaaacaggcaaagaccttaaatagtgcagcaaataaactgatcccaaaacatcattaggcatttttaagttggtcacgtcgcaagtccgatatcacaacttaattgtaaaaggaagaaatctgaaagttactacatttaagctctgattctatataaaatgtcaccaaaaagttgactttgaatttgttggacttttaaaaaaccagttggaaatataggttgggtttttttcttattgttttctccccagggttagaaaaattggtataagttcctaattaaaagctgaataaactttgagaaattatttctgagttgaccaataaataaaaataccactttctttaaaaaagcctagggaattgaagctctgtacatatactaatgatgcctttacaacccagtccttgataataccagattctcggtgcattgttcatgtctgtatctgcaagcctgttctgccattgcagtgtgatgaacctagaggtaactaccatgtgaacttgaactcttctaaaatagttctgtgtctcttagaccatgaccccttttcacttttgttatataggtttaatccccaagccaaggatagtacttagtatttcactacacttctattctcagtaaccaagattgcttgcaactttttttgccttggtgacttttgaaaaaaaaagaaaagaaaaagcagcatccttatatttctttaaaatacatagaaataaagttagtaattaggtaacctatgataacataataatgtggacgcctggggaaaccctcctcatgtttgtcatcttctacctctgccgttttcctgcaattccgcttcctacttaggcagttcagagagaacaattctaataaaaacactcctctcctattaacaaaaaatgatgcagtacccatttttcgtatcctgcttttcttatattggagtaaaaaggacagggtatagacatgaatgatgatattctgcctggcctgtcatttcttacctggaaacatttacttaagagtttctgttactttttgttcagatggggatttgctaaaggttctgggaagctaataattgaattattagaaaaacatttcagaataggaagtaaatgataaacttatattctttattattatttagtacaaaaatagattcccagtagatatccacaagcaatattagcagggcttctgtttctaagtgaccacagactaaccctttctaggctttaacattgtaaataatcctataaacagtttgattttttaagatgatttttgatttgaagagacaggctttacataagccttcattccttcaaaaggtcctgacaaaatacttgggtttttttctctttttttcattctggtatgctttgcagcatttcagctgctttggtggggacacagataaccccttcgcttccagctcttaaaattctttatctttttcttggcaaaaccagaattaagagtgtaagatagattccatgtgtgcttatataggtccctgcacagattggacttgaaccaaaattaagtccaaagaacatatgtttagaccaacttcatggaagtggaagatcctgtgctcttgaacttattttaattcttataatttgcacctatataaacaaagctcctactgtattcttctcttcatcaaccttttgtggtgatgggttgccttttctacgagcatttggaaggagtgatcaaataccgaaattgaactttctaaaacctacacatagcatgcgtttaaattctattatataaagccccaagtgctttaccttctaaaacatgcttctctataggtgcaaagttataagatatgtagaagaaaacatccatcagaatcttctggagaatatggtcagagtcttaaacaggcccagtgctgagttctttgtccacttagtcacacatcttttgtgggaatgggaaaggaaggagacagccaaactctgacaaaggcttttccttatagaataacccaaagcctaggtgagggttgatatataatgtcccatgatttaatatatgtggtttgggggaaaggacaagaaaaaactataattccacatataagaaggtagttgcccatttacaagttccagttatgtgtgtaaaacagaaaaattaagtaccaaacctattaggaaatttttttaaaaagtggatttaacttaaattactgtgtacttgaggttggctttggatatggattttctaaaaagtgatgttttattgtttatcatctaatggctgtaaactgtagtactagaataaaaaaaatggaaaatcagcttttcctctgcctggttcaccttcatcttacttttctttagaatttgtttcttctccatcttttcccccccataatttcttcacctgtgtcctgcaaagtttttttcctctctctgtctctctgtgcattcttccttgggttattttattttgtgttgtgaacttggtcttcttccccaccatggcttttgttttttatcacaagttcatgtggctcacatccagattgcgccaggctgagcgaagccgccaatctgctgagttggacaaccggctcttcaaacaggactttggagacaagatcaacagtctgcagctggaagtcgaggagctcaccaggcagcggtgaagagggggtagcttgagctgacagggtggtcatgggtaattcttagggtagacagcaagaaaaggggtctcatgacttccagccaggttggctctgtctttgcaatgtcctttctctggaattggaattcagaaagcttcacgtacttcaacattccccaaatccgatcaacatgctttgtgatcaaagaattaggaaattagagcccaagatcccagataaatagtaattattagccaaaataacactaataataatatgtaatatttcctgaattcttactgtgtgccagatactttaggcacttcacatgcaaactctcctaatatcttcatatcaaccctattagtgatattattgcctccactttcagattaaagtagagcttaaggctgggcgcagtggttcatgcctgtaatcccagcactttgggaggccaaggcaggtgtatcacctgaggtcaggagttccagaccagcctggccaagatggtgaaaccccatctctactaaaaatacaaaaatttgccagacatagtggtgggtgccagtaatcccagctactcgggaggctgaggcaggagaattgcttgaacctaggaaatggaggttacggtgacctgagatcatgccactgcactccagcctggcaacagaacaagactccatctcaaaaaaaggtagagattagacaggttaaatgtgtccagattcacacagttaagcttagaagtagcaacattatcatttaaaaacctgtctctctgacagcaagcccttaaccattcgtaattactgcactttaagacaaggggttggcattctttagagaatatgtctgtatagaattccaatttttcatccttttcctctccaacttacctcaggaaccagcttgagttagaactaaaacaggaaaaagaaagaagattacaaaacgacaggagcatcccaggaaggggttcccagaagtcagaatccaagatggtaatatttgctattcccttgttcttttacttaatttcagtttaaattttagaggctaccttgatagtcctgtcagttttcctttacagatcacatacttagtggctgtgtcctcaagtatgtagatagcaaactagtaattatgtgaacaaatgaaagcttgattctgagtctgcctctaggatactttctccaacttgatttcatttggaaagggggattttaataatcacagtgaccctatttcccttttaataattttttaagtaagattattttggtgtcttaacaaaaatatatgtttcttggatttctgctaaataataattttaataaaatagtataataatccctctccaaccctgaattcccctttaacagaattttcctcaatgtggatttgcttctgtatacctttttcaaatcatgaggatttcattttgagtatccttaaggaacttctcgtgggaataattagggaattaggcttgaggaaaggaaggtaatacagaataaagagcaaaagtagaaatttctacataataatcttagaaggagacccctccagcacctccagtgatgaaggagctacaattgggtaagatcatctctggggcccaggaaataatgaaatcagaaaaacataaaataactttttctgtaaaagacagtgaaaaaattgccttctgtgtgtacatattatacaaggcgacttcaaaaagatcatgggaaatggaattaaaaggtaaagatatataaactttatttctcaacctaagttccatcaagttcaagagactttagtaagtgatgatactagtcatgtaggccatccctgaagaactgagggtcctaggaatttaatcatatcaatacaatcttttttacattattaactgaagaaaaattggtgcactttaatgatgttttaagattaggaaacaaaaagaaatcagaggcaccaaatcaggactgtaaagtggatgcctaatgatttcccatcataactctcacagaattgccattgtctgatgagaggaatgagttaggagcatatttctggtggaatagcactctctgttgaagctttcctgggcatttttgtgctaaaactttggctaactttctcaaaacattcatcacaagtattagccaggtgtggtggcacatgcctctagtctctagtcccagctacttgggaggctgaggcatgagaatcacttgaacctgggaggtagaggttgcagtgagccaagatcacaccactgcactccagcctgggtgacagagcaacactctgtccccaaaaataaaaaaaattaaaaacactctcacaataagcagatgttggcattctctggccttccagaaagtcaacaagcaaaatgccttcagcatccctaaaaactgttgccatgacctttgcttttgacccgtctgcttttgctttgattgcaccacttccacctcttcatagccattgctttgattgtgctttgtcttcaggattgtactatgaagttgttacatctcctgttacaatttctcaaacaaatgcttcaggttcttgatcccacttgtttataatttccattgaaagctatacttttgtctgcagctgatacgggcacaacagttttggcacccatcaagtagaaagtttactcaactttaatttttcaaccagaattgtataagcctaaccaattgagatatctgtggtgttggctattgtttctactgttaattgttggtcctcttcaattagagcatgaacaagatcctcacaaattgatgtggatagtctgctactgcaggcttcatcttcaacatcatctggccccttcttaaagtgagttatccttttgtaaactgcccacttctttggggacaatcctaaagcattgtccccaaaagctttttgtaaagcatcaataatttcacaattcttccatccatgcttcaccaccaatttgatgtttgttcttgcttcaattttagcagaattcatattactctgataggggctcttttttcttttcttttcttttcttttttttttttttgaaacagagtctcattctcacctagaactgagtacagtggcacaatcatgcctcactgcagcctcgatttcccaggctcaggtgatcctcctgcctcagcctcctgagtagctgggactgtaggcacacaccacaaaactcagctaatttttgtatttttttggtagagtcagggttttgccatgttgtccaggctggtcttcaactcctgggctcaagcgatatgcctgcctcagcctcccaaagtgctaggatgacaggcatgagccaccgtgcccagcccggggttcttttcaaactgatgtcttatcctttttagtgactcaaaccaaatcctgattagatatattaaaataagttaatacaagtttattttggtgcgaaatatttttgaagtccatgcacagtcttttcgtaatacgcgttttccatgaactttttgaatacctctagtatataacaaagcaggaagagttcataaactatttaaaatttctagagagtgagctgctaatttactggcaaatagaaaacaatggtatgtggaaatttattaaatagtaccactactaataatttaaagtgtacaaagaaccactctaggccaggcacggtggctcacacctgtaatcccagcactttgggaggccaaggtgggcagatcatgaggtcaagagttcaagaccagcctggacaacatggtgaaaccctgtctctactaaaaatacaaaaataagccgggcatggtggtagtctcctataatcccagctactcgggaggctgaggcaggagaattggttgaacccgggaggcggaggttgcagtgagccaagactgagccactgcactccagcctgggtgacagatcaagactccatctcaaaaaaataaaaaaataataaaaaaaaacactctgtgtagcatgctatctttattattttagtttagtgaacataaaatctaaaaggcttacaaaagtttacttaaaatcttggcctacctcaccctatttttccaatgaggttttaagtttttcagtcttcagttgttgcctgcagtggcatttccaggaggataagtattgacctctcttccttgattcttgagtggtgtaagaacacacatctcagctgggtggctcacacctgtaatcctaacactttgggaggccgttggcatgaagattgcttgatcccaggagtaagagactagcctgggcaacataggaagacctcatctctacaaaaaaatttaaaaattatctcggtgtggtggctcgtgcctatagtcccagctgctcaggaggctgaggtaggaggatcacttgagcccaggaggttgaggctgcagtgagctgtgatcatgccactgcactccagcctgggcaatagcatgagaccttgtctcaaaaaacaaacaaaaagaaaacacattccacttttggatgcacatgggcagcagtcgaaggcgggcagcagtcgaaggcaagcagcagtggttgtgtgtgcctcagaaaaaaatgtagcccttagaactgcccagcaccttgccaggcacagtggctcatgcctgaactttgtgaggccaaggcgggtggattgcctgagcccaggagtttgagacaagcctgggcaacatggtgaaaccccatctctactaaaatacaaaaaagtatctgggccttgctgcgtgcacctataatcccagctactcctgatgctgaggccagagaatcgcttgaaaccaggaggcagaggttgcatgaaaccaggaggcagaggttgcagcgagccaagatcgtaccacagcactccagcctgggtgccagagtgagagtctgtctccaaaacaaacaaacaaaatttgcccaggcagggcttaagagtattggtagaaatgcagtttgaggctgggcgtggtggcttacgcctgtaatcccagcactttgggaggccaaggtgggcagactacctgggtcgggagttcaagaccatcctggccaacatggtgaaaccctgtctctactaaaatacaaaaattagccatcaatggtgggcgcctgtaatcccagctactcaggggctgaggcaggagactcgcttgaaaccaggaggcagaggctgcagtgagccgagatcatgccactgcactccagcctgggcgacagagcaagactccgtctcaaaaaaaaaaaaaaaaagagaaaagaaaaaagaaatgcagtttgaaactttacatctgtcctgccaagtagaaaattccttgagttgaacaggctatagagatggtggcactgggccgggtgcgatggctcacgcctgtactcccagcactttgggaggccgagacgggtggataatttgaggtcaggacttcgagaccagcctggccaacgtggtgaaaccccatctctactaaaaatacaaaaattagctgggcatggtggcgtgtgcctgtaatcccagctactctggaggctgaggcacaagaatcacttgaatccaagtggatcacttaaggtgaagagttcgagaccagcctggccaacatggtgaaacctcgtctctagtaaaaatacaaaaataagccaggcacggtgatgcacgcctataatcccagctactcaggaggctgagacacaagaatcgcttgaacccgggaggcagaggctgcagtgagacgagatggcaccagtgcactccagcctgggcgacagagcgagactctgtctccaaaaagaaagaaaaatattgtggcactggggcatcaacttgattgaacgtccagaggattatagtctgctgtatatggccatccttggttttaccagtttttcagagctcagtctggggaaaagaaaaaaaaaattatacttcccctaagaagtaactgatatctggagccaactttgcaagtaagtagaatacattctgaattttatttgaatctcaagaattaaaatattactttgaaaatcatttgtcacaaactgtcagaataattaagaaactacttagagcaaagaatgaggaaacatagcttgaaagttagatcccttccctaataaaaaaagctacttagctttatacccaaactaaggcattgcagaagaaaatatttgcaatatcattatttagcattctgaataattaataaattgggctgttttcttttggcaggatgggaagcacaaaatgcaagaggaaaatgttaaactaaaaaagcccctggaagaaagccacaggtgtttgttaatcaagtattaactaagatgtaaagttattctggggtggtgggaaggagggagttctttatatacattggcattgacaccgaccagacactgacttataatattaatatgccaggaagacatttgaagtggaagttaataataaaacgtataacatgtattaaaccaaacccattaggccatttcagaggaaagaaggatgatcaggctgtcctctcttccctgattaattcccaagctcagattatcacttaagaggttatttcccacctttactgaattggtatcccaggaaaataaagtataagtcatacatagcatttcttaacttcttaaatatatttgagtatgacttgtttctacctctgtgctaaatttcaaataagtggctgggcgcagtggctcacgcctgtaatcccagtactttgggaggccgaggcaggtggatcacctgagattagaagttcgagaccagcctgccaacatggtgaaacccggtctctactaacgatacaaaattagtcgggtctggtggtacctgcctgtaatcccaactacttgggaggccgaggcaggagaatcacttgaactcaggaggcagaggttgcagtgagccaagatagcgccactgcactccagcctgggcaatacagtgagactctgtctcaaataaaaaaaaaagttcaaataagtactctgatttctcttatgtctcatctctcatttttcctttatcttgagaatctcaaacagcttaacttcattcctttatcctaactctgtctgatttgctcatgatgaagagcataggatagtttcaaggaagctgactttttatagttattttagcaggttagaaatataattaaatattacatagtgccactgcattaaaaagtgaaggaggtccagttacatgacattctggaaaagacaaaactatggagacaaaaaaaaaaaaaaaaaatcagtggttgccagtggtaagagaaggaaggaacgaaccggtggagcacagaggatttttagggcagtggactactctgtatgatactatgatggtggatacatgtcattatacatttgaccacactatagactagacaccaccaagagtgaaccttaatgtaaactatagactctgggtgatgatgttgtgtcagtgtaggctcatcagttgtaacaaatgtaccactctggtgcagcatgttgacaaagaggccagggatggggcaggaagcatgtgggaagtctctgtactttctactcaatttgactgtgaacctaactgctctaaacataaaggtctactttaaaaggtggaggaagaggttagtgatgaggaatgataccacagtgaggttttgagagaactatacagctgtccctagccaggcttcgtcaccttaagaatgaggtagtgtgtcatctggagcaaaagtagctgctggagaagagaaaacacacagtccaatagtaagctaattatgcaggtgcttggcctaaatgtccctttctggccttgctcccaaagagcatggtttgatccagagctaactttaaactatcacccatctcacattacagaatggcataagcaaagagaagggaactagaagggccataaaattaacctgggcttccaggtgcctttcagggtcagcctcgttccaaactaaaatcaaatcatttacttgagcaaccaggagtgtcttaaatgccaacttctgatttaggtcctgagaatatggaacagtgcttccttatatctgaattgtgctctgcaacttagaatttgtttcacatttattatctccttatgattcagtattccttacaaaagtacctaatgcaactttacagatgagaaaactgagaagcagagaggctgggtgacttatccaagttgcctctgtttatcatgtctactgtttttaagtcctttggctctgcactacctattagcaacttccaggacttattctggccatagctgcaatcgttagacataccaggcttcctgggattatgatggcaaggaacatcggaaaacctggtcaccccatggtgtatgtctggtggtcacactgctactcaagtgaaaagaataagaaccattgcaatctgtagtgcattttccctgtaaccgagagcgggctttgcttcacctctcatttaggctctagtccatgctggaacatcggagttagctcagcttagtccctcatgaagaaatatttcaacctgaatgggttttctggtgacagtctcattcatttccccttcttgggttaatttgctaaagctcacatcttaagaatatttgggactgatacacaacatgtgataatggataatggatagatttccataatatcaaatagaaaaaaagctactaaaatatatggccagtgaaccattggagttttacacattgggaaacataaatgctaactattttgatagcaaaaaggaatgtaaaatataacttcaaatctatttttaaatgggaacccttatataataagtcaagggtcagattctagtgattcattttaagaagcaaagtttcctctccttggaggtcaaaattaataattatgttgttctaagtaatataaaagacctacagtatttcttgtttgaaaaaaatgtttgtattctgagctttttattgaaatgatataaatgaaaatacatgaagttcctatttgtcacaattttttacttctccattgtaggctgcaaccccaccctatggatgaacaggtaacagagcctcctgtttcaaaacatcttgtatgaattatgaagttggttgtaccgtgcctagccagcaaataaggtagcatgggcggaagatgagtgaatacagtgtgccatccttctaacaataccctgaacaaatatgtattgcctgaagctcacacaggaagtagcacagctttgagcagtttactaagtaaacatcagttctcacctattttaaattatccctgacataagatctaggagagctcactttatgtccctttcctctagtttttccttacataaaatggagagaaaaaagatgttttgatcacttagaaataagctaacataaatgattgtaaaacactttgttaatctaatagtatatgataagcccatgagaaagacagtgaatgctactgtgtctgagtcaccctgtcatttacctcttaggttataaaataaaataagtcctactgctttcctttttttttttttaaatggagataaggtcttactcacattgcccaagctggggtgcagtggacgatctcagctcactgaagcctcaacttcccgagcttaggcagtcctcccacttctgcctcccgagtagctagggctgcagagattaggtttcaccgtgttgcccaggctggtctcaaactcctgggctcaagtgatcttcccgccttggcctcccaaagtgctgggattacaggtgtgagcttccatgccctatgcttgccattctttttttccttttttttttgagacagagtctcactctgtcacccagggtggagtgttgtggcacaatctcagctcactgcaacctccgcctcccaggttcaagtgattcccctgcctcagcctcccgagtagctgggattacaggcgcccaccaccatgtccaactttttttttttttaatatatatatttttggtagagatggagttttgccatgttggccaggctggtcttgaactcctgacctcaagtgatctacctgccttggcctcccaaagtgctggcattacaggcgtgagccaccaggcccagtccccagtgctttccattcttgatggtagagtgaacaagaggaatgggatagtgttaaaactttttactctatacttgcatgtgtttgaattttctttttagaaatcatgttattataaaaattaagagctggaagcataatgataggattatccgagttgtattatggtggtaggactacctatttataattggtttagtttccagatagtctatagtgtgattatattaatattgtaggtaaaaaatgcatattctgaaagtactaatatttctggcactaagaaaaactaaccagctccctgtgtggtttaggatcagctgctgctctctgaaaagccacagttgtgtcagctatgccaggaagacggcagcctaacaaaggtaactgtgatgagaaacggacaggcttttcatagggatgtctacagcagcccccagtccctccccaggagtaacagggactttcccgcatagagtgcagagtgcatgcagagtgctgggagtggggtgaaaagcaaaaggggcaagcatttactgggtacctgttttttcagtcataataattcatgtcagaaaattcccattaaaataaacataaatagccaggcgcggtgactcacgcctgtaatcccagcattttgggaggccgaggcgggccgatcacaaggtcaggagttcaagaccagcctgatcaacatggtaaaaccccgtctgtactaaaaatacaaaaaaaaaaaaaaaaaaaaatagccgggcgtggtggcctgtaatcccagctactcaggttgctgaggcaggagaatcgcttgaacccgggaggcggaggttgcagtgagccaagatcacaccattgcactccagcctgggcaacagagcgagactctgtctaaaaataagtaaataaataaacaaacaaaaataattatgtaataaagcaaataagcagatagaaatgtataagtaaatattgagtgcctgctgtgtagaatgtgctggagaaagagtaatgaacaaagtagaccaagtctctgttcttgtcaagcttatgtccttcatagctgtcattttatagatgaagaacgttgaacatctaatgctaactacatttcccaaaattaagtcataagtgatgaagcccagcttccaacctagctttcgctccaaagtccacagtcctttcagcactttatcctgctcagaacaggatatgagctctccctgctagaccacttgttttccacccgatcctcaagggtgcctgcctgagcatcttcccagtttgttatcctagagtaggcagagttaaggaagtattcagaaagaatgagtgcccttgatagctggaactgtgtcttgttcacagaatcccccagcatctaatatggtacccaatccatagtagatcctcaagaaaagttatgtacaaatgagtgtatgaaacacatgcttggaagagatacaggaaacaggctcaaattctggatcacaacctgcatagcaccatctgtgatcatgcaaaattttaataaattataatatgacctagtcttaaattcacagaatcagataacaaatgaactgcccttatagaactggaagttacaattatagaaatatgttacaaagtagaacaaactgttaattctggctttcctcttctaagccatgcaatattagcttctgtatgtcagacaaaaattcttcttaggctttcagataaaagcaaccccctactcctctcaacctcaggaagatgaattatttgggatgaaggtagcacttcatgggagaaattattctttacagctttttatataggacccttggagctttgtgtataccaccctatcacagccttactgctgacattgctatagtgacttcttgctctctgtgcttgaccattaaagatgcaaaacatttaggaaaacaaaataatttccctatgaacaagatgcaggaagctgtgctcctgctgcattgataacccagtggatgtgcttacagagcaccagagaccacaggaaagcataaagcacatcagtgtatttattaggaattatactttcagttcatactctggacatttttaaatcttagcctgttcactcaatccattgctctttcactgccttatttggagtatgcgcaggtacttgcaaactaattttaaaactaacctacctcaaagtgagtatggggaacagatgtgtgaaggatattctaaagataagtgacttgtatgttacctgtttttatttttaactctatggcactgcttcttttcatttaaatctaaaaactagacggtgaacttttttgtagattgggcctgtgttcagatactacctggcacatagtaaacattcagtcattgtttgattaggcattgagcatttgccatatttggctttttatatcccatgaatccttatgccttgctcatcttctattccccgcctaacctcctcttctcatagaatgtgtgtaagaactgcagcggaaccttctgtgatgcctgttcaacaaatgaactgcctcttccttcaagtatcaagcttgagcgagtttgcaatccctgtcacaagcatctgatgaagcaatattctaccagcccatcataagactggaggccaagacctggaccaaaacgtttatgcaggctcctctgtacctgtgttttagctgtcaggatctcatagagcccagttcttagagtcaactaaagagttgataggaatttactaggtccagggagaaaaggcagtggttggggttactggaaattttgctcattttctctaatgactgtatgaataaaagtgaacttacttgagcctttctcttctaaatctaaacaacctgatattgaaggtttgctttatagcatatctttggaaaggcaactcatttttatgattagtgatactggggtggatttaataggagagagaatccaggcagataagaataaaaaggaaaatgatcatctccttctatagcatttgcagattcaagggggagaggtagatgctgagatcaaaatgacagttgttacttatttttc

SEQ ID NO: 15797 - DNA, 64199 bp, Homo sapiens
gtgccttcgtgctaccgataaagttggcggttacacgacaaaacgccgccaggtatttcgccaggtcttccacttttcaagcactagacacacctgaccgccttacagggcccagcgggggcgggtaaggaagaggcccagggcccgagggtcgggaggcagtcagcccagccggagggaagcggaaggtggggagtgggaagaggaggacgctgccccctaggggagccgagtcacaggctgggggccggggcgggaggggctggaggaggcggccggtagcgaggccgcgccgtcgggcggggcggtccctccagctggcttggaccctggcggggcgggctgtgggccgagcggcggagcccaggcgccagcccgtggccgagaagaaaggtggcggtggcggcggcggcgcagcggacgggacggggcggcggctcctcgccctgaccctctgctcccccgcccaggcccgggcgcgaatcggaggctgcggcgaaggaaggagtgagcatggctgagaccccgccgccgcccaccgctggtgccgaaagttgcagcgaggagccggcgaggggcggggagtggcggccggaggagccgcgccgcgctcccgccgggggcacggaccgagagggcgaggcggggccgccgccggcctcccccgccgggcagtcggagcccgactcgccggtggccgcccccttcttcctgctgtaccccggcgatggaggcgccggcttcggagtgcgcccgccgccgcagcagcagcgctcctggaggaccccgccgtcccccggctcaccgctgcccttcctgctgctgagctacccgagcggcggcggcggcagcagcggcagcggcaagcaccgtgagtggcggaggggcatggggacgcccgcggggaagggagcattcggctggggagggccggcccggcccccgcggagctccgcctcccgcggggtgacccgagccgggtggccgggaggcgggggctttaggggctaccctcgggaagctgttctcccgaggcgcccggtgaggaggcagcgggacgaccgcggttcgggcgccggattctacctccgcgtctccccaggccgcggctcctgcctggcctggtctctctcccgtcttgggctgggcgctggtcttcgccggcctcccacgtgcttgggcgggggcgagaagcggcctgcctgcccccctccacccggggcgccctggccctgtcccgggtcccgggctgggaaccttccccgaaggagtctaagagggggcggcgcccggagaccccgtggcccctctgacccgcctttttcgggctcccggcgccgcggcagctgagtaggtgtggctgctgcgccgccgccgccgccagtgcggccttagtaatactagtaactaattttttacgagcgttccttccatgccggtaaatatgacagatccgtcccccggattggaaagagaaatcggagcggtgcatgagaagacaagaagggaatgtgtggctttggaaggctacctcccagggttatatcggttgtcgggaagaggcctccacttttaaagccactggcacacgcgagcgctctgaatgcagctgacccacactccgtgctgtattttttattagtgaactgtttactgtgctggcaaacgagtagggccctagagtcgtcaatgaatataaggactcttagaggaatgttaaatctgattttcaaatacaagctcttacagtatgaaaatgtggctgacgatacaaggcatgctgtaagcgccaaatactttgctgtatgagttctggaaagggagacagaaacttgcctgaagcgatgagggaaggacctttcccaccatacaccctatatttttaaagcacaagtacaaatcttttagctgctctgccctgccaagaaaccctgactcaccttttctgccccgatccatctcctaggaaaagataatatttattgattatttcctatgtgcatgtgttgtgataatcatggttaataagtttgtgtgcgccaaactgaatgccactttttcagatgcggaagctcgatttatcccaagtaacagcttaagagaaggaatgcagttgacccagattgcttttctgctaaacccatgctctttaaatctaacaagagatccaaaactgtgatggtgggtgacaggttaacaggaagggtctatgtgattcagctggaggttgcccagtgttcacacctccttattacttactgagtaataagtcagtgggcagacactgaccattgactgtcttagtgaagccatagtttgtgtgttggagtggtctgcactaatgtgcagatggattgtcagctcatggcagaagtgagtcttcctatacagaggaggcaaagataagaatcttctcaaggagactttgcttttgttttctgaggaatccttctactttgtactttaaacaccgcctctttttttgtttgcaccaaaaatgttttctttctgtgtaatctacatattaagcatgctactatagaaagaagactgtcatttctctgtaacagttatggtacaaggtttgatgtagaggaacttttcaactattgaacagtatcaattgtgggaattacctgaatttcagttgactggactccctcattgttaaaggttatctttatgttattaattattgtagaaaataacagtattttgttactcttatcagttaatactgttgcttaagcatgatcaagatcgggactagaggacttaaagctaaagtttcatgagcgtgatctcagtctctaccttaggatactagcaaatgtatggtgtttttttgtttttgagacggagtctcgctctgtcgcccaggctggagtgcagtggcatgacctctgctcactgcaacctccgcctcccgatttcaaacgattctcctgcctcagcctcctgagtagctgggattacaggcacctaccatttttagtatttttagtagagacgaggtttcaccatgttggccaggctgttatcgaactcctgacctcaaatgatccacttacctcagcctcccaaagtgctgggattacaggggtgagccgccgtgcccaggcggtatggtgttttttgttaccacgtaagttctaatatttcctcatggtctttatttttgaaatagtttattgatgtgtatgtgttcagaaaagttactgggaatatatacgtgtcccacttcctctgcttttaaagattagtcactgagaacatttcatattagcaaaaaaaaaaaaatcactattacatgttttatttaaatataaaattgattcaaaatagttttttgttttggactgagtttttgtttttacctgttacatttatatgtgctttagaacgtaagcatacttacagaaaggaacactctagatatgaataaaaagttccttgttaccctgcagagtcaatggaatattgctttctgtaatgtatctggatatcagaactttgattctcttgactactcatttaagaaattagagaccaggccaggtgctggtggctcacacctgtaatcccagccctttgggagactaaggtgaaggatcacttgagtccagaagttcagggctgcagtaagctgtgactgcaccattgcactcctgcctgagcaacagaacgaaaccctgtttttaaaaaaataaaaataaaatacatgaacacttgagaccaaacagtttttgtttttttattttgtgtttttgagacagtctcactctgtgctcaggctagagtgcagcagtacaatctgggctgactgcaacctcttccttccaggttcaagagattctcctgcctcagcctcccaagtagttgggattacaggtgcgcaccaccaccccagctatttttttttttgtattttagtagagaccatgttggccaggctgctctcgaactagactcaagtgatccaccctcctcggcctcacaagtgatgggattacaggtgtaagccaccacacctggccccaaacagtttttaaaagacttcttaattacgagaatggtacatggactcaacctcaatgcctagtgaatattacgatgactggcatctgcctctttagcaacccaatttttaactctcagtaatgtatttgctaaaagtatataaaatattatagctttgaaagactgtgtattaaggtggtattatctttttattttagaaatcttgagtgtacttagaggttttaaaaattaaattttacatttgagttcagaagctctgtttttaaataacagtgctgaagaatagcaaaaatgtgtgagactggaacggtggctcaagcctgcaatcccagcactttgggaggcctaggcaggagtatcacttgagcccaggaattggagaccagcctgtacataagcagactctgtctctacaaaaaaaaaattttttaaattaaaaataagttagctgggtatggtggcacatgcctctggtgccaactactcaggagtctgaggtgggaggatggcatgagtctgggaagttgaggatgcagtgagtcgtgatcacaccactgtattccagtcatggtaatagagcgagatgctgtttcaaaaaaaagtttgtaaatagaaggtagcctaaacttttcagggtttgtcacatgaattgttttgttccaaaatcttgcaggatataatatccatgaaatcaatctgcttcaatgcagtgtgaaaggagacttctgatgtgccttgttgaggattatgtctctttctgagtctttgagtgctggtaatctgctaggtttttatacttctaactttaaatctcataaaactctctgccatgccttttaaaatttgattttataaatgtacaagtaatacatgaatctatgctcattgtttaaatgtttcataatacataagtacagttacaaagtgaactttcctctttgtggacctccagcaccctctccccggttccttattggaggatgcccacttttgagtttggggagttttcatcctgaactttttcatgcatttacagacatgtatgtttttatatttcgtggtggctttatcctcttggtgtatgtatgaccttccatgccagtttctcagcaactacaatttgtaaggaggatctgcttgcaggccatggtgtaatacttttaatgctttccttttccatcctgccgttagagatcgtcttgtgaatggacaggatagacaaaagatggcttccctttagtgttggttggaagagtcaccctgctgtttgcacagttaacagcttctatttagttattcttttctccttccaactcccacaactacggcaaacattgttcaaggcaatgctatgcaaatagcccacatccttgcccttgtcttttctctcccagttaaggcagtgtccaaaaaagtgtcccactcaccaagtagcagctttctgtatttttaagtgctgttttgagataggaggaaggctagaagaggaatagaagaaaaagaatcttgaaaaggactggcagcgttactatgactacccactacaaagttgagtatacttaacagcgagtgccatgattaagccccggatagtgcagagaatgaggtacctagaagcctttgtctctgacagatgcacttgaaaaatccattgtatggggaaggaggttcgaaatatacatgtaaacccaggaattagtgtttaaggggagaaaatttatgcttgcagtttcattaacatatatacacacacaagtatacagatatgtatatatcatatatattgcatgcatgcatgtatgtatgtgtagattgtatatgtgtttgtgtaaaatatatatattttagtttttcctctgtggacatttctgttattgtctctcttcttttttaattgtttagtagtactctagaaaacagtaaaggtcgggtgcggtggctcacgcctgtaatcccatcactttgggaggccaaggcaggcggatcacctgaggtcgggagttcgagaccaacctgaccaacatggagaaaccctgtctctactaaaaatacaaaattagctgggcatggtgacgcacacctgtgatcccagctactcaggagtttgaggcaggagaatcacttgaacccgggaggtagaggttgtggtgagccgagattgcgccattgtactccagcctgggcaacaagagtgaaactccatctcaaaaaacaaaaaaaaagaaaaagaaaacagtatacctggtcaggaattgaacacatgttttttgttttatttattaaaatttttaatttatataaagagatatgtcaatgggccaggcatggtggctcatgcctgtaatcccagcactttgggaggccaaggcaggcggatcacttgaggtcaggagttcaagaccagcctggccaacatggtgaaaccccgtctctactaaaaatacaaaaaaattagccaggtatggtagtgcacgcctgtaatcccagctactggggaagctgaggcaggagaaccgcttgaacccaggaggcagaggttacagtgagccaagatccgccactacactccagcctgggccacagagcaagactccgtctggaaaaaaaaaaaaaaaaaaaaaaaaaaagaagtatgtcaaagaagagccaaagtgaaaataaacaatttttttaaaaaagagatgaggtctcactgtgttgcccaggctggtcttggactcctgggctcaggtgatcctcctgcctcggccttccaaagtgctgggattacaggcatgaaccaccatgtccggcctcaagcacgtgttaatcagttcacctgctgtatgcttctttaaactttgaaaaggcaaaagtactttattgtgttttgtaaacatagaggcgtctgcccaggctggaacatatgagggaaatggtcaaactttcagaaccccaaaagattgggcatggttaccttcatactagtagttttggaaacagcagagtgatgtgtgactttttaaaacacagattttcggtattttcaatgtagatcagtgtcctcatttaccattctgtgattcataaatctgttagccctctgctcttttccaaccctgttaagaaggcagagagccattttctgatccattaagtgccttttgtcaaatagtagataaaaagcacccacccacatacaaacctcagaaatgtagcatctttccaaggatgtgtaactgccagagatctggagtttaggtgttcagtgtcttggtgcagttggctccttccacacacagctgacatgaccttggacctcctgagctactgagggacaggtagctgggtcatgcccccgtttccttcctcacgactaaacactctgcttgccttcctgattctgcctttgtgagcagggctccctgaactctcacagtttgtcttcccagccaattctccccttcttttctgccaccacctttttgttgcacctattcttctggcctggcattatcaaaaagtcaaatcacgctttttattgacagaacaacaatttcagaatatcagatgtaatctttgagtctttctttggttgctccccttctgataatcatagactcattctttgtagacagagttttcttttttcttcccatcttagttttattctggacactagagagtcctaaaaggctcttcattatataacaatttttttttgtagttctgaaacccaaacaattaccaataaaagatgtgactgtaagataatactactactagtggccaccatttgtgggatatttttgtgtgccgtgcagagagctagaaacttcacatgtaatagtacttagcacttttttgaactgaagccagggaatgaattcatattcctcaatagtcagccttcaaagcgcatgttcttaatcactgtacgttccctcaccaccaaggtcttaaagaagctggtttgagtggagagcagtaaaggttgctgggtaggagggatagcagaggaaaggtggcaaagaaagcaactttggggactaaaagacaagtattggcctcaaaacatattcacttgactatattctgtcttgtatcttttcccttttttaaaatttttcatagaaatctacatgtttaagaggtaggattttatcaagaagctaagagaccatatttttctagtatgggctatagatagtaaaaagtctagatgtatgatgatggaagtgtagcagaataaactggatgaaataatttttttgttggcaatatttttcaaaattccttaaataattaaaagaactaactaaaaaatgggctgcccctttatcattgcacaataggcaacctgtagccaacataaataaaagtagaatcccatttttgatgaattttacaggacatcacacctattacatgtctactcaatccttactaattttgaaacacactccctactttgtgaagtggctcaggttatgagctgtagaatttgttgtgggaagtcagtagcacaccgtaagcattaaaaaattggtttgaaattgtgtgaaaggaaatttttttttgttttgtttgcttttttgagatggagtttcacttttgttgcccagtttggagtgcgatggggcaatcttgcctcacagcaacctctgcttcccgggtttagctgattctcctgcctcagtctcctgagtagcagggactatgggcatgcaccaccacacccacctaatttttgtattttagtagagacggggttttgccatgttggccaggctggtcttgaattcctgacctcaagggatccgcccgccccaacctcccaaagtgttgggattacaggcgtgagccaccatgcctggccaggaaatgtttttagagttacaaagcaaagcagtggtacttgagaaggtaagtagcaatatggccatgccccctactgtatttgaataattgtgaaaaggttcatagtctccctaaaacttctcaaggctgctggccaaggtggcattccctctctttgcaaagccttttttatctgacatgctccctaccgaccggacaagatactcagctttgtcagagggagtggtggggcgggggtgggaaagtttggaagaaaggtgtgggaaccttatgatgtgtaggaaaggagagcctggcaggccaagacagcaaaaagcaggtggaaagctgaagtcgttgtagcatgtcgccttttagagtgtgattcttctaacttcagagtctgtttagggactctccacagacatttatctacttctgctgtcttttttatgaacttaggaaatctgatcacttgaggtgagaatgcttggtaaaattctgacccatctctcttccttcctcaaaatctgagagataccactgtaaccctctgctcacatctcctttttactttcctttgcctctgtcccataaacgtttatccttactgactttcattttatgtgttgatagggtttttccagaactctcaaaggagaagcacttatcatagtgcagttatggtgacatttacttactgcttactttgtgccaagtgccatgctaagcatttaactccgaaatggttaatattattatccccattttgttaatgtagaaatgggcacagagaagtaacttgccaaggttactcagcagctaggtggtggacctaggattcactgtgagcatgctgactccagagtccacatgctatgtcacactctttcatcacctcccgtaactggaatcaggtcctagattagaggcacgtcttcaggcaaccagccctctggttccatattctactcactaatgccctatttactaaaaatgagtaaattaatgaaactcaagagtcaccaatctgatagaaaaaatggttgtatatgtaaaaaacgctgaataggtccatttataacagacattaagactttcctaaacacctaaaattgtctgtttcttgtctattgccttgttctttcttctgcatccctagcatatgggaggtaccctgtacatgttgagtgaatgaatctgttatgtacatgtaatgaagccagtgttagactgacctgtttgttggggcataaatatggtttgattttatagaatttgggggttttcacaattgaagtgaaacatgagggtggaaaaatgccattgcaaggctatatacatatctataccagcaagtatctattgagagtctggtatttggtaggtactattttgagtagatacgtaagaggtatgcaaaatgcatatttctttggtggagcttctggtctttgtggagctagttatttagtttcattttacaactgagtaaattgaggcaagaggaggataaatttcccaaggtcacctactaagtttttgatagctttacgtctgtgtaaattattgcctacagccactgagccatgaaatcagttttacttttcagggtagaggttatttttaatcttatgctggttaattttaacaagtgaaaagatgatgcattataatactcctggtagtgtttgtttctaacaaagtaatgataaatcaactttctgagtatatcagtttatagttgttgtcaactttggttaatatctataaagtgacactgagcctatgaagtgtataaacttaaaattgaagaaatcttggaatcagaggtagacataatagattgtggttctgggaaaggaggtgggagggtgtactggagcatgtgaaataatcatgatcattgagttgaataatcatataatttaacagaaacatctgggctttccaccaatgtcatcatgatgatgattcatcaaagataccctttcatggctggatgcggtggctcatgcctgtaatcccccagcactttgggaggccgaggcacgtggatctctcgaggtcaggagttcaagaccaggctggccaacatggcgaaaccctgtctctactaaaaaaacaaaagttagccaggtccggtggtgtgtgcccataatcccagctacttgggagtctgaggcagtgaggcagaagaatcgcttgaacccgggaggcagaggttgcagtgagccgagatcgtgccactgcaccctaacccgggtgagagtaacactatctccaaaaaaaaaaaaaaaaaaaaaaaaagctaccctttcatgctaacagcaactagtgaaatagggggaaaatgagatttttcttcttaaattatgaaactgtgattcaggaagctgccaaacagaactttgtgagctttacaaatttagttgcacaacttgacaaattttaggaagaagtttctattctgcattatgaaaatcagaaataacccagatgcctaccaacatgaaaatgaatcagaagaccaggcacagtggccaatgcctgtaatcccagcactttgggaggccaaggcgggcagatcacgaggtcaggagatcaagaccatcctggctaacctggtgaaaccccatctgtactaaaaatataaaaaattagccaggcatgaatggcatacacctgtagtcccagctacttgggaggctgaggcaggagaatcacttgaacccggcaggtggaggttgcaatgagccgagatcgtgccactgcactccagcctgggtgacagagtgagactccatctcaaaaaaaaaaaagaaaataaatcagaatgtgtttttgttattgtttttttgagacggagtctctctctcttgcccaggctggagtgtggtggcatgacgtcggctcactgtaacctccgcctcctggcttcaagcaattctcctgcttcagtcccctgagtagctgggattacaggcacgtaccacattgcctggctaatttttgtatttttactagagacggggtttcaccatgttggccaggcaggacttgatctcctgacctcaagtggtccacctgcctcagcctcccgaagtgctgggattacagacgtgagccgccgcgccctgccgaatcagaaattttttgtacatgcattggaacactaccttgtaatacagcagccaaaaggataaactacatatgcacactacggtttggatgaatcttagaaaatacagcattgaaggccaggtgcggtggctcatgcctgtaattccagcactttaggaggccgagatgggcagatcacctgagttcaggaattcaagaccagcctggccaagatggtgaaaccccatctctactaaaaatacaaaaattagctgggcatggtggcaggtgcctgtaatcccagctactcgggagtctgagacaggagaattgcttgaacctgggaggggacaggttgcagtgagccaagatcatgccactgcactccagcctgtatgacaagaacaaaactctgtctcaaaaaaaaaaaaaaaagaaaagaaaagaaaaaatacgcattgagtgaaaggcttagaaagttttatagagcatgaaacactttctataagaaagttgaaaaaaactgaaactaaacatattgcttagaccttcatatatttgtgacaatatttttgaaataagataatgatttacacgaaattcagaaggttaccttgaaatgagaggcaggagtttagaagcaagaaggagcacataagtacatatgttggtccatttctccagttgagcaagggtttcagggatattggttatattctttaaggacttaaaattatacattaagtttgctatttttaaaaagcgtacaatgcatcattttagaaagtgattccccccttcatttatctttttctattttggaatttatcaggtgttcttaatgtgtccaactagtatgtaaatgtggagggaactcagagacagagtggtagtagggtgaaccaagtacatagtggaagcattttatctaccctttgtgagcccatgacagaaaagtccatactgggttctcagtttgtcagaatgtgcccacttactaaaagcctgaacttaatatgtaagttggggggcctagaggaaggtatgggttgtgcagcattaaggtgtaaagtatggaggctgataaaaaaaatttcttcaaatcttaaatttgttgaaactcatctttaggaaatttcatgaagagactttgcgtgtgtgtgtgtgtgtttgtgtgtgtgtgttttaaatgtctttttattttctctgaataaaatttaacatccggggatgaggaagagttaggatagagtgctgaagttgcagagtgtagaaggaacatggactttggaggtatctagacagaagtagcttggagtaacagatctgctactcgctaattgtgtgattctgggccagttacgtggctgaactttggtttcattgtgtataaagagaaggtatcaatctctgttttgcagtgcttttgtgaagacttgacatggtatttttttttttttttttttttttttttgagacagagtcttacactgttgcccaggctggagtgcagtggcgcgatcttggcttactgcaacctccgcctcccgggttcacgccattctcctgcctcagcctcctgagtagctgggattacaggcacccaccaccatgcccagctaatttttttgtatttttagtagagacggggtttcaccgtgttagccaggatggtctcaatctcctgacctcgtgatctacctgcctcggcctcccaaagtgctgggattacaggcgtgagccaccgcacccagccctttacatggcatttgtaaagcacctaacagaaaatagaaatttaataaatgatagctattttaggtaatttttccacaatatataacagagacattgagcctgtcaagttaacctttgtcttatagtagcagccgagtacaaatatcctttaagaggaatgtaacttctgactttgaagtgtgactcttatttgctttgaatccatcataatgtggaaaatacagactgtttaagcagctagaacgtagtattttttggatcttcattttggatttgaacttcacacaggcctattcttttagggccacagactgaactcccacccgcctcacaaccatcttacaaataggtgccattactcacaaatgggatcaaatgagaaaatagttcaatacagctcatacagtaattactctgtatgtgagaaaaaaaatcaaggtttgaatatcttactgatggcttaactttaacttcatattcaaagctaagatgtttacttagtaaagaccaaaatgtaaaaacggtactaagcaatatctaaaatcttttttttttttctttgagacggagtttcacaggctggagtgcagtggtgcaatctcacctcactgcaacccccgcctcccaggttcaagcgattctcctgcctcagcctccagagtagcagattacaggcatgtgccaccacgcccagctaattttgtatttttagtaaagatggcgtttctccatgttggtcaggctggtcttgaactcccgacttcaggtgacccgcctgcctcagcctcccacagtactgggatgacaggcatgagccaccgtgcccggccgtagaattgtttttataagtttctacaaatagcactgttttcatagtaacttctttgcctgtgaacaatggataactgttcgtgctgaagactcaatggtgtttacctaaagaacagcgtagaagtacagtttttcttgcccacccccgggtcttatttctgaaatggctgccaacacctcaaactggtagatctgggaaattcaaggataccaatacaggcatgtttttctttccttgccaaaaactttagttgttttgggcttgcctctctgtgtcctctacctggagagaggcagggtgggatggatcttccgaaggaatgttaatcaagtttcttgctcactaaccttgatgttcctgttgtgttggtatgttgcaatcaatctagatctgttcaagttagtaaatgcttactggggtgaagagattgttgtggtttgtgacaaggccaaattcaggttttggaccccagacaatcacatggcattcggatttattcatgtattccttgttctgttttaagaacatatcagtgatctagagttttgatatcacacatacagatagctagggctgtttggagttgtggttccaggaatgtcccatgtaatttgaaggttttaatgactacttactatgttttgaagtattgcatgatataaagtgaatctataaactgtccccttattaatatataatatgggaatatttttggctagaaaggaattgaactgaattaaatgagaatgtgttaaatgaaggcttgtgttcagtatttggatatgaaaattctgtttcctggaaaaggtgtttctgtcttactgctgcgtgcctagtgcctggatcactacctggcatgtggagcacctcttagtgaatatctgttgaatgaatgaatgaatgaatggctctgagtctagatgtagggtaatgatgagagagaatgagatagaaataaaaccaggagtattttgctttccttagtaacttactgattttccccaattataaataagcctatatatatgccttcttacattgtaccagtataccctccttcttttttttattttgagacagggtagagtgcagtggtatgatctcggctcactgcagcctctgcctcctggcctcacgtgattcttccacctcagtctcccaagtagctaggaccacatgtgcgcgcaaccataccttgctaatttttgtttttgtagagatggagttttgccatgttgcccaggctggtttcaaactcctgagctcaagccattcacctgcctcagcctcccaaagtgctgggattacaggcacatgccaccacatctgactaatttttgtatttttagtagagatgaggtttcaccatgttggccaggctggtctcgaactcctgacctcaggtgatttgcccgccttggcctcccaaagtgctggtattataggcatgagccaccgcgcccagccatccgccctgtcttcgtaacaatatgaaaatgccagtttctctacagaatttgattattagcatttttttctttcagttcagtctcaaattatgatgaagcatttgagattttaacaatattcaaggagaatttttttagttttcagaaattaggtaaatcaagatgtccctctgataacaatccctagaaaggaatagtctcaggtcatatttcttgaatttgtatgttcctccttaaaattggaacccttcaatacaaaaacaaacaaacactttctttcaattgtccaaaacattttcaaagaaaattcttattcttctctttgtaatttatgtagttcataaagcaagtacctgcccttttgctaccaaggtataaatgcctcattggataatatagggccgtgtgtgtgtgtgtgtgtgtgtgtgtgtgtgtgtgtgtgtgtgtgtattaagaaaatataattgtcttcagtatcttatcgaatgggaggattttaaaaatataacatggtttaatctgcttagaaacatatttcatgcttaaggctgggcatggtggctcacgcctgtaatcccagcactttgggaggctgaggtgggaggatcatgaggtcagaagttcaagaccagcctggccaagatggtgaaaccccgtctctactaaaaatacaaaaattagctgggcgtggtggtgggtgcctgtaatcccagctactcgggaggctgaggcagagaattgcttggacctgggagctgagatcacgccactgcactccagcctgggctacagagcaagactctgtctcaaaaaagaaaaaagaaaaaaaaagaaacgtattttatgcttaatacagaaacttgataaatacaacaaaatcaaaaaggggggaaattgccattaattgggaaagattttacttttttaacttgaagttttttttttgcatttctgcctaacctaaaaggtcaggtttttgtaccttggagaaggaaattataaatgcccaagaataagatatttaaattgaaaatctactttagcttttctttttatctttttgttttttttccctctgagaacctcaattttttatgctttagcttttcttaaaacataacatttagcatagtaaagaattttaatagctatgtagataagaatgaaagaggtgaattatatgcttgttaaattaatctaactgcctcttttaccatctttactatagattattatccggtattaattgtcatccttttattcagtccttgatcccaaagtaagaagaattgatgaggatatgtgcattgtgttatgtctgatcacagtttgactagcacagtctggaagtgggttgtacaggatgagagagagaagcctaattgctctcccagcatcagcagcatctataaagcatcctgggaattgcttgccctacgttcagagcagctggtcacatgagcctgaattttcagttcagttcattagtcagccattttggtcaacaccctgcttactgcgcacggccaatcctatgagaactcagcatcccagctcatctgagcagatcctggaagtgatttctgcagctcaggattttttttttaagctacattgaaaatataggtttattttttgttcaggtttttcttttatattttttttctgcacaaaggaggaggatttttcacttactcatatcgaggccagatttttaaagccagctaaggcagcatcagctgtgcgggatttaaagcctatagctcagctgaaaaaaaaggtggggggcagggaagggaagataaaaggagaggaagctgggagaagacaagcatcatcttattttgctatgtggtaggaactgtctataagatagtgtagaattgtttatcttgagcagtttgttcttaacctataaggtatttttccttttttttttttttaaacctcccccacccttttcctgaaagctttgtttcagagctttgtattgggtttttttggtgaggaggttgtatttatttttttggtgtgtgtgtgtgagtgtgtgtgtgtctgtgtgtgtgttgtggtcccagctgagtcatcatgtctgctctgacgcctccgaccgatatgccaacccccaccactgacaagatcacacaggctgccatggagaccatctacctttgcaaattccgagtgtccatggatggagaatggctctgcctgcgagagctggatgacatctcacttacacctgacccagagcctacccatgaaggtatggtcagatcctgtccgctagtatttcaccagcatcctcattgttatgggggagggctgggaggatcagggagaggtagaaagaacctacactctcaactgttaacagtcctgaaaaccttgcatccttacttaccacccagctccccttctcttgctcatgggggaaagataattttttttcttgcccctttaggtatcctttcaaaagatgctggatactcgtttagagttctttgtctttaagcctctaaataaaacatttgaggtcacttatcacatctgattctattcaataatgagaaagctattaattttgttcatatatgaaaatgttatagaaattgtagtgatttataacactaagttaagacaacatgactataattataggattgtacatgatgaatacagtagaaacaccagggtatttggtaatggtatcctcaccattatatgaggatacaattttaagcaagttatgacatctaggaaatgtttgataaaacatttttttaacaatatggattattaggttagatgagaaaataacttttcagcatttatttattgaatatggactcctaagaaagcataatgcctggaaaggttaaatatgattaatatggcatccctatagattacaatagaatggtaatattggaatctattggccattgctttttataaattatttgtggtaactattatgatccatttgagatttccactgtcagtacctctgagatctttgtggtctcttgacttgcgacttttttccaggactcttgctaatttatgagaggttttctgcttctaccctttaattctcttaataccacagaaagagagctgatttgaatcatagctacaaatcgttttgtttttaatacagttgcttcttagctaaggtttattctctgtccttatactgatgaaaaaaaacaaaaaacgcttgcatatgaggagaaattctttataaacatctgcctgatagttaggcacatcgacaggacaaagaagaccataggtgaattgtacctagcagatggggttaggaaaggtgattctctgcctttgaccttgagttgaaatcttatcatgactcagaattttcccattgtgtttgataagcattttatcttcccagtcagccttagccttgagaaagttttagggatggttaataacacagaacacaaagcagtcattttgggtgtgtctttaagaacaatgtttaagtggtttttaagaccctttgcatcttttaacaattggtttgttaattagacagctttctttggctgtatgtttcgttatgtgcacaagttataagacatcagctgaaattccatgcaatgccagtactatttattttttattattattttattctatattttcatcaaaacatcgttacatccaacaattccagtactacttaaaacagcctccaaagctttaaaagtctttagggaagaaaaatacagttttagaaggctaccaagaagtcttctggcaactgcctcagtttacatattttgtttgaaaaaaatgtattcccgtccaatttgagagttatacaatatgaaatattccctttatcatgaaatctagtttaccagtgtctcaaaaataatttttaacaattttaacacctcaaatatatgtttttggagcaggattcctatggataagcaaaagtgagctgtttggttcatgtaagcgtttttagcagcgccatttgaattcttcatagagaaatctgtagcaacacatttctcagtatggaaaatgtgtgagagctataatctaagtaataaattgtatgtctgctgattaaagaaatcagataaatacagagtttccaagacctgtaatcaactatagaggatttggaagaaaatagagaaatgccgacagtgcattttagaattttgccttaaattgggcaagaaagctattattttaaattactagaaatgaaaataaagaaagcatagtcccatgaaagcctgtgagtattactgccttgctccattaccaaactctggatatttaaacagtcatttggtcccaagaaatacccacttttatgttaataccactgatagttattagatttaatttagctataagcatttaagtggtggtcaccaggcccatgattatgtgaatctcaccttgttcacaaaatggaactcctgatgtctggacgcgggagtattcagactgctttccgggctgattcacagagggaaaaacatctgaccacccaaatcctagagtgaagtctcctcactcccacaaaagaaaataggcaaacagcataatgttccctcttaaaatgatgtagactgactgtgtgtactcagcaatagaggctctgtggcttccatattttattttcttaaaaccagagttcctggcccttcactgagcagtccgcagtataggcctggacctagagtttctgcctactttaacccttaaataaatgaaaataaaagcattcacttcattatctcaatgcttattggtggtcaatgagggattatctctcttttgtcttatatactcttttttttttttttgagacagagttttgttcttattgcccaggctggagtgcaatggcgcaatcttggctcactgaaaactctgcctaccgggttcaagcgattctcctgcctcagcctcccaaatagctgggattacaggcatgcgccaccacacccagctaatttttgtatttttagtagagacggggtttttgcatgttgatcaggctggtctcgaactcccaacctcaggtgatacaccctccttgacctcccaaagtgctgggattacaggtgtgagccaccatgcccggcttatatactcttattttcaaaagccaacagcaaatctacaacaagtttaattgcaaatagatttcccctaaaggcaagagcctgtgattgactccacaggagaagggtcaggagaggcttcattaagtgagaccttaagagataaacaggtgatcaccagaccgacatagggagggcatttcaaacagtacacagtgagctggcccagccagggaatagcaacaggagcacagagggcttctgtttggcacaacagggagcaagactggaaagataagcaggggcttgactgtagaaatcttattcatactgaaaagcctgcacttgattctgtagtgaaaagctactggtgctttatgtctgggagtaacataaaataagatttgtgtttggaatgatcactctggcaacagtgtagtgaatggatcagaaggatataagctctcagggacccctaactataacttttaaaatggtctgggtaagagatgacaatctcacattaaggtagcaagagtgaacaccaaaggaacaatccctggaaaagcagaatgtacccgatgactgaggggctgggtggctggagaatgaacataaggcagtgcctgggatgactctccaacttctggctgcagaagctaggttccctttaccagtagggaatatagaaggaagagaacatttgagttgttgatgcttaatagattgtgactaacaaaagcactaccatcactcttttttttcttttttttgagacagtttcgctcttattgcccaggctggagtgcaatggcgctatctcagttcactgcaacctccacctcccaggttcaagcaattctccttaactcagactctccagactccccaagtagctgggattacaggcatgcgccaccacgcccagctaattttgtatttttagcagagacagggtttctccatgttggtcaggctggtctcgaactcccgacctcaggtgatcgcccgcctcagcttcccagagtgctgggattacaggcgtgagccaccgtgccccgcccattactctttcagttgagccttctacccgccccacagaagcattaatcagatttatacttttccagattacatatcctggcttaagtctgtaccctaatttacattaagagttggaatcctcacatggaaaggcgggggtgaagataaaaggagtgagacttaaatggacattcagagatgtgagaatgtggcttactttcttactttgcttgtgccatgtcagtgctagaggagcagccttgtttatagaaaattcattttgcattttcttaatttagggaaacatgtaccaccattgaaataacctctcagacttttgtttgtttgtttgttttactttgtgaaagcgtagtgggatttctttccttttttttttttttttttttaaccgaagcaatgttggaagtaagtggaatttcaaagtaaaggaacttttaaagcaccatgaaaattttagagaacatgtgttctctgtttttttcaagaatggaagcagaacgcttcagttagacctttaagcatcattatattaatttcagaaatggtgttattactgagatgaagtggtatattttatttttgcgattttttttaagtcacatgctcatatgtatctgaatttcttggagtaacattctcaaaacaagttacatataattctaggatcaggaaagtaataactttttttttttttttttttgagacagagtctcactctgttgcccaggctggagtgcagtggcgagttcccagctcgctgaaacctctgcctcccaggttcaagcgactctcctgcctcagcctccctagtaactgggattacaggcagacgccaccacgcctgggtaatttttgtatttttagtagagacggggtttcaccatgttggccaggctggtcttgaactcctgacctcaggcgatccacccaccttgccctcccaaagtgctgggattacaaaaaattagctgggcgtggtggcgggtgcctgtaatcccagctactcgggaggctgaggcaggagaatcgcttgaacccaggaggcaggggttgcggtgagccgagatcgtgccactgcactccagcctgggcaacaagagagaaactctgtctcaaaaaaaaaaaaaaagatttttttaaagaaattcaccaatacatgttatgtatacgcatgtccacatacgtgaagggcagggatagtattaccttcagtattattgagtgtttaacaacaaaaccaactatagctatgactcagtttataacacgtttacccttaataagtttacctaattagaaatgtatatgttaataaaaatttttacactttaaagaggatttttaaagaatgaaatcctgactcatttgttgtctcaagtgactacagataccccttgaattaagatggggttatgtcctgagaaactcatcctaagttgaaaataccataaaatgaaaattcacttaacacacctactctactgaacttaatagcttaagtagcttagcctctcttgccttaaacatgcttagaagacttaaattagccaacagttgcgcaaaatcatctggcagcacagtaccctgtagcgtattggttgtttaccctgatctgtggctgatcgtgtggctgactaggatggtgtggctgactgggagctgcggcttgctgccgctgcgcagcatcgtgagagaggatcacctggcgtattgctagctcgggaaaaaatcaaaattcaaaatttgaagtagggtttctactgaacacatatcactttctcatcgttgtaaagttgaaatatcggaagttgaaccctcataagccagggactgtctgtgaattgaaattagcctaaaagacagcagtagtatcatatttcaaaaaagaaaatgttattttgcatatactgcctttactctgtaaagtgtttcagacagatttttttaaaatataatttgtgatctaagtccaattccttgttcttaaactaaatgtccagcttttggtctattttcttttttcttccacattcctactctctgttatcatttttcggatatttatatggtttgagtggcaggcaagttaaaaatcgcaatttaaaataatttttgtgtgcttttcaaagtgaagctaagttggatttttttaaataagacttttttccgattacaaaaggaaatttgttgtggagatttggatatttctttttttttttttttaaatgaggccttgagatttggaaatttctaagtagaattttgacacagaattcaaaatgactgaagaaatctgctggatacctaatgagtctctttagagttgggtggataaattagtcaatggaaaactttattgctgtcaatatggggtatatttgagaacagtaaaggaattagtacaataatggggttgatttggcaattcgtgttttagctactgtgatggtcattaatttagagataatataggatagtggttaaaagtatggattttgtggcttggacctggacctggattcagttccttacccagtactcagtagtcatgtgacgttgcacaagtgatcacttcatgcttgagtttttttgtttttttttgagacagagtctcacagtgtcacctggactggagtgcaatggcacgatctcagctcactgcaacctccacctcctgagttcacacaattctcctgcctcagcctcctgagtagctgggattacaggcgcataccaccacacccagctaattttttgtatttttagtagagacgaggtttccccatgttggccaggctggtctcgaactcctgacctcaagtgatctgcccacctctgtctcccaaagtgctaggattatagatgtgagccatcatgcttgagtttttctctcctcttaactgggaatattaacggtaactacttcagaggttaggaggattaaatgagatacttaatgtaaagcaccctataaatggtagctatttatattagtagttattcatgaagcagtagctgaagccacagcagtttaagccggattcttcaatacattgccattttattttatatttctatttttatatctatctttatagagtagtctgaacaagttatttatcagactaaagatgaacattagtagtagcttaaactcaagttttagcattgtcctttcttggacctctataaataagaaaataattgattaaaaatccacaagttatcagttatccaggaatatgcatttttgtttctttcgttttttttttttttttgagatggagtctcgctcttgtcacccaggctggaacacagtggcgcaatcttggttcactacaacccctgcctccccagttcaagcgattctcctgcctcagcctcccaaatagctgggattacaggcacccaccaccatttctggctaatttctgtatttttagtagagacaggttttcaccatgttggccaggctagtcttgaactccttgaacctgcctcggcctcccaaagtgctgggattacaagcgtgagccactgcacccagccaaaatatgtgcttttctattaaccttcttttagggataaggagtctgacattgagaggtgatgcacagatgatcagttgaatgcaataaaatatacatctggcctgattagttactttccgctaggaattatttactccaagtgttaaaaatgtattctctcatttaatttttacaacaaccttttgagcctaggtacaactattacccccaatttacaaataaactgacatttggccaggcgcggtggctcacacttgtaatcccagcactttgggaggctgaggcgggtggatcacctgaggtcaggagttcaagactagcctggccaacatggtgtactaaaaatacaaaaaaaaaaaaaaagattagctgggcgtggtggcaggtgcctgtaatcccaactacttgggagactgaggcaggagaatcacttgaacctgggagacagaggttgcagtgagccgagattgcaccaccgcactcactccagcctgggcgacaagagtgaaactccatctcaaaaattaaaaaaagtaaaataagctgacattcaagggtgtaataaccggtagaggcaggattcaaactcagactaccaatggttcaacccatacacaacactcctgtcccagaattctagagtgtaagtccaacaataggcctgcgtgtaataagaggagtcttcttcccagtctctgatgacatatttgcagaagttttatacacaattgaacacagcattggcagcttaagtacagtcagcatgcagataaggccaaaagcatcccagctgggacatgcttggtgattgccatctttttttttttttttttgagacggagtctcgctcttgtccaggctggagtgcagctgcgcgatttcggctcactgcaacctccgcctcctgggttcaaacaattctcctgccttaggctcctgagtagctgggattacaggtgcccgccaccatgcccggctaatttttgtactttagtaaagaaggggtttcatcatgttggcctaggcttgtcttgaactcttgacctcaggtgatctgtccaccttggcctcccaaagtgctgggattacaggcgtgagccaccaagcctggccagtgattgccatcttttaaagtggagactgagttttttgtccacatgttttctttttcctcttttcactcacttttataaagtaaatgaaaatatttacataatcgtgcatatactaccaaacagcaaaaatagtacactgctgaaactgacctggctggcaagtgacacctctatatgctaaatttagctttctgaagcagatgtacaaaagcaataagaaaagcagttttgttttgtttttgttttgagacagagtttcgttctgttgcccagtctggagtgcagtggcgcagtctcggctcactgcaacctctgcctcccaggttcaagtgattctcctgcctcagcctcctgagtagctgggactataaatgtgcaccaccatgcccggctaatttttgtatttttagtgcagacagggttttgccatgttggccaggctggtcttgaactcttgggctcaagcgatcacccgcctcagcctctgaaagtactgggattacaggcatgagccaccgcacttagcctgaaaagcagtttgtgatagcagtaatgttcacgattatggattgtttgaaatagtagctacaggtaatcattattcttttagccaagcattctcatgcccttctttggatgattttttcaatgttttttcaaactccttttcaacatacttacctgttccagtcagactgtgcttcagtaaaatcctgattattctttttgttttactattctgacttgtgattcttcatgcccgtgttatatcaggaagggtaatggacccctgactcccttcatctacaagtccttctctaacagatctcacacctttcatgtcctgaatcactggttagcatctgggacatttgtttgaatatgctagaaatcattccccagttatttaattcatgggattccttatttctgaaattatatagaaagttcttcagggcaaaccttttctttggcgttcttcagaaggccccatggtactgtgtactatttatcgtagatatccaacaaacttctggtgaactcagtgattccctattactccataaaatcattttaaaagaaaggatttgcatgttactgtaaagacacatgcacacgtatgtttattgcggcactattcatagtagcaaagacttggaaccaacccagatatccatcaataatacactggataaagaaaatgtggcacatatacaccatggaatactatgcagccataaaacaggatgtgttcatgtcctttgcaaggacatggatgaagctggaaaccatcattctgagcaagctatcacaaggacaaaaaaccaaacaccgcatgttctcactcataagtgggagtcaaacaatgagaacacatggatacagggaagggaacatcacacactggggacctgtcggtgggtagggggctggggggagggatagcattaggagaaatacctaatataaatgacgagttgatgggtgcagcaaaccaacatggcacatgtatacctatgtaacaaacctgcacgttttgcacatgtactccggaacttaaagtattaaaaaaaataaaaagccaggtgcagtggcgggcgcctgtaatcccagctatgtgggaggccgaggcaggagaatcacttgaactcgggaggcggaggttgcagtgagccaagatcgcgccactgcactctaacctgggcaacagagtgagactccatttcaaaagaaagagagagagagagagagagaggagagagagagagagagagagagagggagggagggagggagggagagagagagagagagagagagagagagaaagaaagaaagaaaaatggattttgtcttcctccattacacacaatttaatttatggtttctaatgttttctttatttttaattgtttatctcatattctggaccgactgtatattatttggaaaatataagtttagaataatgtaataatttgttgtttaaatatatcttaataatacgtagtattgataaaaatatgggacgacttggggcctctgctagtgggaatgtgcattggtacatcctttatagaaatcattttatcattgtgaatcaaggaccttaaaaaattaattctcagtaattgtaccagacacctatcctaaggaaataataagagatacaaacaaaaagtttatgtatgtactgtatatttatcacggtattctgacttcctgtaacacactcttgagagcaacttaaatagcctaagaggaaaattattcaataagttgtagaacaccttacactaaaaattattgtggaacaatatttgatgtgtagggtaatgtttggatataactttaaaagctgtctcttaagctgcatatttactatagtcacaatttttttaagtataggtatacataaacacaagtaaaaggaaatgtatcaaaaatataaaaattgattatctctggatagtggaattatgggtgatttttataatattctttatatttctttatatctcccaaatattctacaagaggacatattactctaatatgaaaacaaatgttcctttttcaaaggaaaaatctttatgaaaattaacgggtgtgcaatcatccatccaacagatatttgtattatatatcagtaccttctatgacagtttcacacatctgtgagtgggaacatttgcctcacagcagagctactgctttagattcaatttccattataattttttaatatttctattaggcattttattttgggtttttttcaaacacagacctgtgtttatttactggcatgctctgttttcatagctgtttaaatgctgtttgcagtgtatggggtggcccacagtgtctagatttagaagcatttacagcatttgatttattcctttcctaagtgtttggaaaataaaacctgagtcattgggattctctttttcacagaattgtgttattgttctttgctttcactgtggcacacccccttttgtaattggcccttggtgagattacagaaacatttgttgccaccagtgcagtcagccttagatttacactgtcaggttctctgagctgtgattatgtgttcagaaggcagtctcagtgaacttctcaaagtgagaaggttgtagcttttaatacagtctcagaagcctatgggacaaagttttctggacacggttcatcccttcttgttgctctgccctgaaaataacctggctagtcaccctttcaaggtaagttttacccacttagcttccaggattttgtaaaattctaaatctgggtgagaaatatcagtagctctgtacttgtatgccagttcctatctaaaccacgaaagaggtgcatgctgcctctgatctgaccgtaacatactctgcataaaatcagcttttccttcctgtttcaggactactttcagtttcttcctgtctctttgatactcttgcactagcgttggcttcagtgcactgtcattaaccacagtgccttacagtattttcttctattggtgagccttttctggacctttcgtgaaacagagcttctacttgaatctttaatttgtgcccttcataacagaactcacattaactcttctttgggttatcagcttctgacacccaagagtcatttgtcctaaactaatcactgaaatatgaatcattttccaaaaagaaatgctgtgccagagaagataattgccactcagtgatagagctcagaacggaattcacgttgtcagattcccaagcctgagtaccaaccaagatctggttggaaagagcaagtgctgtcgtctgagaacatccaccatattctgtactcttcagtagctgttctgtgttttgcttttttgatggtgcccctcctgagggggaggtggagagtatataattgggcatgttttttcattgtggttcctctagtccccaccagtcaactgtgactactatgaagtgcttttgagtacagggctgtaaatactaaaatctgttcctttgcaatttttggtatttgagcttttccagagaacaaatagaaggatttgatgagcttagaaatacatgtgtagaggaacagtgaaaaagacttcttcccaaatggctgctaagtaattatatatttttcatcataattaaatattctcaaaattgtatgtcagtgtgttgaaaatagtgttttcaaagaaaatattggctgggcgtggtggctcacacctgtaatcccaacattttgggaggccaaggcaggcggattgcttgagctcaggagttcaaggccagcctgggcaacatggcaaaaccctatatctacaaaaaaaaataaaaattagctgggtgctgctgggcactgtggctcatgtctgtaatcccagcactttcagaggtcgaggcgggtggatcacctgaggtcaggagttcgagaccagcctggccaacctggtgaaaccctgtctctactaaaactacaaaatattagccgggcatggtggcggatacttgcaatctcagctactcaggaggctgaggcaggagaattgcttgaatccaggaggtggaggttgcagtgagatgagatcacatcactgcactccagcctgggcaacaagagcaaaacttcatctcaaaaaaaattagctgggtgtggtggtgcatgcctgtggtcccagctactcaggaggctgacgtgggaggatgggaagattacttgagctcagcaggtcaaggctgctgtgagctgtgattgcgccacagtgctccactgggtggcagagttcagaccctgtctcaaaaaaaaaaaaaaaaagaaaagaaaaggaaagaaagaaatgtctttagcattattatgtacagatatttttaatgaaaacaactttagttatagaggtgatatatttgcattgtaagtcacaagatacagaaaagtataaaaatgcaaaataatagaatgcacctacatttcaaatacctagggataaccactgttaagatttagtatcagattctctttttcaatgtatacactttttcaatgtatacactgaaggttcacttgcaaactcaaaattttatacatgtaagatcataccacacctgtgctgtgtgacctgccttttttcctctgcaatatttttccatatgggtaaattgaaatttttgtcattttgtttaatgtcttcagttattggatgtgctataatttcttttcttttcttttttttttctgagacggagttttgctcttattgtctgggctggagtgcaatggcatggtctcagctcactgcaacctctgcctcccgggttcaagtgattctcttgcctcagcctcccaagtagctgggattacaggcgctttcgaccatgtccggctaatttttgtattttcagtagagacagggtttcaccatgttggccaggctagtctcaaactcctgacctcaggtgatccacccaccctggcctcccaaagtgctggtattacaggcgtgagccactgcgcctggcctggatgtgccataatttctttgactatttctttattacaggcatttaggttgtttctaaatttttctacccaagacagttttagaaaaattgttatgtgtataacttgaatatttaaccaatttttagtttttaatttttatacacattgccaaactactttaaacaattaaaacaaattttgaatagcatggtatcataaactttcatattagctactcatcaaagcttggttttgtctttcctgcttgcagttggttgcgtttttctcatgctgtattaacatctgaagtttccaaaagatacagttgtggttttcaagacagttggttcagcagctgaaaacctcatgatattactttctctactttttttttttaagctaacagtagtgtcctaagcaaaagagagtttttactgttaattgtgcaatgagaaactgcatgtttttctaagattgctagaatttgctttttgggatgaaaaagctgcatgctgggatttcctttttctttcttatacagatataaaactaagagtgtatgtgagatgtactacattttgtctgagaatcccacagtgtccagtcctgtggacagcagcttcccagctaaagtatcttagagacattatctctgccagcatagccattccagcatgagagcaaagggtctactggtcagggctttctttcctcatccgctcaccccccatcaggctcagccctccttagcgttctagtgtcacctagctgctcacctaagaatctgttttatcttcacttatgtcactaatattaattcctcttttttttttttttttttgagatagggtcttgctctgtcaaccaggctggagtgcagtggtaccatctcagctcactgcaatctccacctggattcaagcaattctcctgcctcagcctcctgagtagctgggattgcaggcacacaccaccacgcctggctaatttttgtatttttagtagagacagggttacaccatgttgccaggctggtctcgaactcctgacttcaagtgatctgcctgcttaggcttcccaaagtgctgggattacagacaggagccaccatgcccagcctattaattccttttttttttttttttttgagatagggtttcactctatcacccaggctggagtgcaagtggtacaatctcagctcactccagcctccacctcccaggctcaagcaatcctcctaccttggcctcccaagtagctgggattagaggcatgctgcactaccacacctggctatttcttttgtatttttggcagagacagggtttcgccatgttgtctaggctggtcgccgcctcctggactcaagcgatctgcctgccttggcctcccaaagtgctgggattacaagcatgagctaccacgcccagccttaattccttgtaaagcttatgtcatacttatttagatctcaagggcattgtctatgggtgtttcatcttttttttttttttttttttttttgagacggagttttggtctgtcacccaggctggagtgcagtggcacgatcttggctcactgcagcccccgcctcccgggttgaagcaattatcctgcctcagcctctggagtagctgggactacaggcatgcgccaccacgcccggctaattttttgtatttttggtagagacagggtttcactgtgttggccaggatggtcttgatctcctgacctcatgatctgcccgcctcggcctcccaaagtgctgggattacaggcgtgagccaccgtgcccagccagatgtttcatctttttaacttccattgcattagtaaagtcttttgctcaccataaatgctcaataaattttattttattttatttttattatttatattatttgtttttattttatattactttatttatttttgggtctcactctgtcacccaggctggagtgccgtggcatgatcatagcttattgcagcctcaaactcctggcctcaagagatcctcctgtttcagtctgtcaagtagcctggtctccctatattgagtaggctgttcttgaactcatgggctaggcgatgcacccacctctgccttccaaagtgctgggattacaggcatgaaccaccacacccagcctcagtaaaattaaaatggctgaagtgttgatgacttaatgtgttaccttttctagggctatttgtctttttttttttttttgctgatatttttgtggagaaagtagaccttggcccaaattactggtttattagaacaaaacctcaaagcatttatgaaaattaatatatgacaattgctttgttaccaagctaataatactatggttagtttaatagcacctcagctgttaatttgtcatttggtttatttaggttgactaattttttttcctgtttttaatatttagcttagctggctttttaaaattccattcactctattgtctttgaataattacggcaaatatagagaaatccagttgtaagtgtaaagttgacattgagtacctatgctttgctaagtacttcaaatttattagcttttattttcacaatagcccttcaaggagttatatgtgatgtgtctgggtttggggcttcagaaaggtgttgccttaagaaaccataataaaattctaaaaattaacactaaatcaaagacacttggtctcaaggggacaaaataacccccaggccttgtaaaatctgtcacttggttgcctatagcaatactgctagagaaaggctacctcaagaagagatttcacaaccatggatacataaacaaaggcgaagcattttttagcccattcaagcacttccctgtagaaaaggagcttcattcagccagttgcctcatccagagaaaaaagaagtacaagaggggccaggctcaccttctaccagaccatgtactccagaacttaaagtataaaaaaaaaaaaaaaagccgggtgcagtgggggacgcctataatcccagctactctggaggctgaggcaggataattgcttcaacccaggaggcggaggctgcagtgagctgagatcgtgccactgcactccagcctgggtgacagagaaaaactccgtctcaaaaaaaaaaaaaaaaaaagatgaaacacccatagacctgtttcaggtctaagaatgaaaaaaaatcaatagactaattatgtagctctgaaaagatttaagctggtggcactgtaaacatctacccttaaggtacatagtgactcaaaggaccttgaggtataaaagaatggcatgttacctattgtagtaaagtcctgagcatgccaaggtaaagtggagaacagctttacatggaaaagacagaccttttagtttctgggggagaaaagttctcttaaattaattgcatcactctgatacttaaaactttaatctctgttttaagaagaaaacagaaaatatgtctgtttgtaacagaaaaatgttctagatgggatatgcccaaggaaaagtccgagatccctggtatccaccacgcattcctacctagaaattcactttccagagcctttttctatacaaatcttggaggctcttcatattttgctttactaaggtaggcttttatcttcataggtgacaaatagagtttctaattaaatacaatacaataaagaacaaaatgggaatattccctctattgacttttgcaaggtcacagcaagtctgtaaagtaataatgtggatggtaagagtccattctcatgaatctgtaatcctacataatatagatttgtggcacattatattgtcaaaggattgaacctgaaaatgacttctgcaaatatgtctatatataatgtatttcagcactaatttactataaaataatagtagccaactcacagtatttttttttctgtatgagacactttccatttgctttacatatatagacacataattccaaaattaaaaaaacctctggaaatgaaaagcatttttcacaaatttgcctgaacttatttggtgttacaacatgatgtgaatttacttgaggctatttatagtctttattctacttaatctgaatattcatttcctgcagaaatattaatgtgcttgattgtaggttactgcctcagatcctgctagttctgtatggtgaataaacatctggctttattgaattatatgtgatttattttgtgtatcttcaaagtagcctcctttatttttgttttggggaaggagaattgggggagggggagttggaaaaagtatttggattttttttttttttaagaaaagtcactagtttgcatcataatatttgtcctgaatctaaaagaaatatatcgcacatacttttcaattccctgaagtgatcaaaataatagttgagttagattaatgtcgcctacacttagaatacaaagagcctttgattttcaatagaaaaataaatctgtgttgctttttaataggatatgcatctttgtttccctttatttgaaactttgaaattgctaatcttagctttgaaacatatttaataaccgtagttgctatctctgcttatttggttgtactcccagcccttgtcactgttaatcgctgtgataagtagaaagaatcctaggaacctccctttcagttatccctttggaaatcttgtttttaatagcacttttctttctgggcttgcatgacattttatctttcttttcctttctttttgccgtttgcaaagactcttgggaggatttgacagatttggtggagcaaatgcgcgatgatacagaaggtgcgtgccacaccaacatctttcagctttttctccttgctttttaaaattttctaaccaccttttaattgttttccgtaagaggaaatgtcagctttaggttttatttcccatggcaataagtggaaatcttaatgttttggttccaagtaaaatagtgtcaatgtatgtttatgttgcttttgaaagatatttgctgaataacgtgtttaaaagggacattatttcaagattatatcaagtttttgccatggctgttttttcacttgtttgttgagaaagtgtaaattttattactcatgcaaatacatgtatatatatttctgtgaatttcacagcagccaaaagcaaacagatcccaggaatctagtggttggcctggaatgttgctctgatttgtagatttccataacattacacacttaagctttgtcatgtcatagcattcttttctggtgtaattattttttgttaattttttcttcttcatacaagagactgaaacatggaatggtgtgattatctttttaaagtagcacacatgttctaatgtggaaaggttccccaaaccaatcagtgtttcttctgtatcaaggcagctaactatagggagctcagagcgatttacacattttatactaaaaatagaaaaattgagatttgaatctactttatcattttacatgttcccgctttgctgtagcacacacccctgacacacacacatccaccactctgtccagactgacctttcctgcccacctcctcctctcctactttgttcctgtgacatctcatgtatttatacccttccccctccgcctgtgccacctgcgaacccttcagtccttatgggatttccacaatttactctttgacagctttggcccacattcttttctccattcacttgctgctgcagaacttggagcttaaggaaggctttttacttattctctaattcttgtgtgtttatcaacctagttaaagggtaaactccttgagaacagagattgtcttaaacttcttggtatccttaatcagacctgggacgagtactgccctcagtagatctggtcattaccaaacaaaatcaaggcagctttaccctctctgttgatgcccaagagtatcttctgtttcagcccttgcctttgaatgtgtgaattctgaaatcctgagtgtcatctcttttcctttggtcaaactatttttatgccatctttgattctgcttttaatataactgattacatatagttcagtgaaagaacaaatcagtattgtctagttgattgacagttcacagacaagaaaaaagagaaggatgttgattcatttagtgtgtaatgtttactattgtgttagctgctattattattattattatatttatttatttattttgaaatggaatctcactccatcgtccaggctgcggtgcagtggagcgatctcatctcactgcaacttctgcctcctggggttcaagcaattctcctgcctcagcttcctaagtagctgggattataggtgcataccaccatccctggctaatttttttgtgtttttagtagagacggggtttcaacatgttggccaggctggtctcgaactcctgacctcaagtgatccacctgcctcagcctctcaaagtgctgggattacaagtgtgaaccactgtgcctggcctattatcattattattaattattggctaggcaccaccaggtttaaggctttaattcctttgatagactagatattaaaggaaaatgctacataaagtttatccccttcttgagaactttaccatgactcatcacaggcaagattctatttctttaatacaaagtattaataatgcaagagtcaagcttactgtgagagtcagactccttttttttaattttgtttttgctgggatttttgtcgatggttattataggtgaactccaaaagggagagaagatgaactttaacagtatagtacataaaatatccagaaaatgttgattatgtcagtaccttcatgatcttaatagatttccagtcaagtgatatatggtaatgttgatcaagatcctctttacagaaaagtctttctgaaaagtagttaaaaaaaaaaatgagaatggggagagggagatggcttcactttaactcttttgataatttcattcttcttgatatccttctctgcttttcttgcctcatggtctcaatcacagttatgtaaaattccagcatttcacacaactgtattacgtaacttggagatgttataaataagtgctagtactaagaagaaataagttatggagtattacctgcacataacacacaatagcaattcagggtctgggaagaatcctcatttcagactcagaaaaagctgatgatatatgcaggctcagatcttttctggagaccttcaactgctaagctgttttcaatgctgtttctcatctgttattgcagatgggccataacagttggcttttttaaaattttattttattttattttatttttttgagacgaggtatcactctgttgcccaggctggagtgcagtggcatgatcatagcttcctgcagcctcgaactcccaggctccttcctcagcctcctgagtagctgggactacaggcatgtgccatcacacctggctaatttttatgtatgtatgtatgtatgtatgtagagacagggtctcactttgttgcccaggctggtctcaaactcctaggctcaaacgatcctcccacttcagcctcccaacgcactaggattgcaggcttgagccaccgaacccggctatagtttgctttttaatagatagagtgttaacactggcttctggcctcctaaaaatttttaaaataacagactctagtgggttgcagatttgaactggtcgttgtttttgttttttgtttcagttctgtcacaattgaagcttcttattttgaatttttttttttttttttgagatggagtttcgctcttgttgcccaggctggagtgcaatgctatgatatcagctcactgcaacctccacctcccagattgaagcaattctcctgcctcagcctcctgagtagctgggactacaggcacatgccaccacatctggctaatttttgcatttttagtagagacagggtctcaccatgttggctaggctggtctcgaactcctggcctcaggtgatgcgcccgcctcaggctcccaaagtgctgggattacagacatgagccactgtgcccagcccttttgaatttttttagaagatgggagtcttgctgtgttgcccaggctggagtgctgtggtgcaatctcggctcactgcagcctctgctagtgattcttcttgcctcagcctcctgagtagctgggactacaggtgcacaccaccatgcctagctaatttttgcattttttagtagagatggagtttcaccatgtttgccaggatggtctcaatctcctgacctcgtggtccacccgccttggcctcccaaagtgctgggattacaagtgtgagccaccgcgcccggcctgaactattttttacagtgatgattagtttcatattctatgtgtttgtaacttatatctactagaatatgaagtgtcttcttagggtacaattgtatgatgtacaacacctattatattgcatctcctttccttatatgctagtaatttgtgtctaaaatgttttgaaactcactagggaaattatgaacattaaattaaataatgaaaggcacatagcttattacctttagtttttcaataaatatcggatttctgtctgtactcattacaagccttttgaacagattttgtaaatttgcagtggcccagattactgcccgtctctctgaggattaaaatagtcaggacagtacttgaatttaggcaataatatacctgtgtaaaatattacctaccaaaattgcatactggttccttggcatttgggggcagagggtgttaagacttgatgcatgttgaaaaacagaagaaacatatcttaagagattttattagcttctagcactgtgccacatcgtcattcaataagcttattaagttaaacaaaattgttataatggcttagagtggtggttcacttctataatcccagtactttgcggggccgaggcaggcagattacttgacgtcaggagttcaagaccagcctggccaacatgacaaaacccgtctctactaaaaatacaaaaaattgctgaggcgaggaattgcttgaaactgggaggcagaggttgcggtgagctgagatcacgccactgcactccagcctgggcaatagagtgagtctccctctcaaaacacaacaacaaaaaaattggcggggcgtggtggctcacgcctgtaatcctagcactttgggatgccaaggtgggcggatcacttgatgccaggagttcaaggccagcctgggcaacatggtgaaaccctgtctctactaaaaatacaaaaagttagccaggtatggtggcaggcgcctgtaatcccagttcctgggagtctgaggcacgagaatcgcttgagcccgggaggcggaggttgcagtgagtcaagatcatgccactgcactcaagcctggttgacagagcaagactccttaaaaaaaaaaaaaaaaattagccaggcatggtggcgggtgcctgtagtcccagctactcagaaggctgaggcaagaaaatcacttgaagctgtgagttggaggttgcagtgagccgagattgcaccattgcattccagcctgggtgactgagcaagactgtctcaaaaaaaaaaaaaaaaaaaagttatgtacatggaagaccataataattgcagtagctaacaacttttttccttagtatattccaagcacttctaaatggttacgtataagaacttgtttactcttcagaaccctgtcaccattttatagataaggaaagtgacacatacagaggttaagaaagtttcccagcaaaatactactcagttgtaaaaaggaagagaccactgatacatgcaacaacctgaatgattcttcggagaattatgctgaataacaaaaagtcaattttaatggttgcatactatatgattctatttacataacagtcttgaagtgatgaaagtatagaaatgaagaacagattagtggttggcatgggttgaggatggagtaggggcaaggagagatgtgggcatggctataaaacatcaatatgggggatccttgtcgtgatggaaatgttcagtgtcttgactgtaattcaacatcagtatactggttgtgataatgtactacagttttgcaagatacccttgggagaactaggttaaaagtacatggtatctctcgatattatttcttacaatttcatgtgattcctcaattatctcaaaacagaaaatgcaacaagagaaaaaacttttcccaaggtcacacagctagggaagagtttgaatagagttcaaactcccacagaccagctttagagcttgtgctgttaaccactacaccaaaattgtttaaacttatttgacacaagaacaactgtaaaaatacatcttcatcagaactcagtacacacatcatttatttgtatgtatcttaaaacaaaagtttcatgaaacaatacatagccttactatataggacattaaattgattttgtgacccactaaagggttgtgacctttgtttgaaagacactccagtatcctgtgctgcctctctggtatatacatccatttgtacggtagccactgtctaggtgtgtgcaaaaaaaaaaaaacaaattcctgaaaggactgttttggctctgtttccagcctgtaatcgtgggcatactttaaaggctgggctagtaaccttgcatccttctatttctctttaaaacatctccttgtgaaagcatcttttctcataactgctattattgtcctatgctgatgactctctaagtccaaacttccatttgcatttacaactaggtgatcaaaaatatcttgaaagctgggcatggtggttgcattcctggagacccatctattcaggaggctgaggtgggaggattgcttgagcccatgagtccaagtccagcctgggcaacatagtgagaccttgtctttaaaaataatatgttgagaatccttccacataaatatcctttatgatatccaaaaccaagtttattttgccctttatctccataacagttactcaactttttcatttccctttatagcacactcttccagtctctcagggcaaaaatgttggtgttattcttgaccccttcatttcctttatcttttctatgactatctgaacttgaatcactacagttcttcgtggcagaccattttgattctcttccctcaaattcattttgcgtaatcttctcagattagtcatctccaaacaaaattttaggcacgctgattctctgctcaaaactacagtggttcccattgcttcctccattaatatccaagtctagtttcagagacctctttatctgactctaccctacctgtgttttccagttctccccagtaagaactccctcttccactcttattttctccacctgacttcacacacccattccaaccacttggaataccgtccttcatgtgttctgtgataccacgacatttaggatctacctcaagtactgcagtatattgagatttatcacacttttattcatattacttttggtgttatctcatttgaagtacaaatgtacaatattccagggagttaaactaaggacagtggttattcctggtttttgtcaggtctgaggtttacctgctttaacaaattaataaagcctcttgctgtttcttggatgctggcaaaagacacaagactcctaggtcagagataaaggactttattactcatgacagtgcaagcagcctgagcatctgcatatctgtgccagttcttcttggaccagagtcccatggggtgacactggatggctcagtgacatgcttcacacgtggtaggtttgtgttgcagatgaagaaggccaagttgggagaacccattgtttttataggaagcagtaggaaagcttcgtctctcattatcaggttcataaatggcccaggaaagagtggtcagggccgtatagtcttgacataacccagtaaagaaatgtaggtgcccaagaggtccaaggaggattgtcttccccaacattttacagatgaaacagaagaatgaggatttcccccaacatcactcagggaatatgagagagacagatctaacccttctagatcatagatctaactgcgattgccctctcacatccatttacattgtttttcttttcttttcttttcttttttttatacctaggtaaagcccaaaacatttaaattatttctatgcaataaattgagcaaaccaaggaattcttgggttgtatttaccacctaaatttcttatgttgtatcaaaacaacgaaggtttgtcctaacttctaaatgtttccagaaatcttctaggtattcttctgcagcatggaattctcaggtaaaggtaactgaagaagtctgggaaactttccaaaactaaaattgattatattatgatatgggagcccaatgaagaagaaatcagtgtgtttcctagggaactcttgtgcaagctaatatatttttttttaatctattaaagattagagaaatgtatacctaaccaagaatgagtaagagtatatgaaaataatggttttggttaagtaagctgactcatttcaatgctaaagcccatcaaaagggtttttttttttttttggttatatacggaggtagaagaaactacactagtttcttcttaccttcttacaggaggccagcagctaaaccttgacctggagtaagagaaagcagaattacttttttcttgtcttgtcttttttttttttttttgagacaggatctcactctgttgcccaggctagaaggtggtggcacagctcactgtagcttacactttccaggctcaagccatcctcccacctcagcttcccaaggagctgggactacaggtttgcaccaccacacccagctaattttttgtgtgttttttatggagagggggtctcaccttgttgcctagcctggtcttgactcctgaggtcaagctatccatctgccagcctcagcctcccaaagtgctgggattacaggtgtgagccactgtgcccagccagaattttacttttactttaaattttttacttttaattatgaaacttttttttttttttaaagagacagggtctcaaccctgttgcccaggccagagtacagtagcatgatcatagctctcgtagctctctgtaactttgaactcttggttcaagtgaccttcctgccttacctcagccccgagtagctagggctatgggtgcgtaccaccaagtccagcttaattacacaactttttatagtacgtaaaaagaatagcttaatgaacttaaatatctccatcaccagcttcagtaattattgccaatcttatttaatctaatacctccatttttgtttctggagcattttaaagcaaactccaaacattacatctcagcacctgtaaatccttcagtgtcagagctaacaaaattaacaacaaagtcttatagtgtctcagcccattttcaaagtctgttgattgtctcaaatatgtctttttatagttggtttatttgaatcaagaaacatacaagttatatattattattatgtctaaaaactttagtggtttttttctaataatagccttattgaggtacaattcacataccataaaggtcaccactttaaagtgtacaattcagtggtggttagtatagtcacaaagctgtgcatccatcaccactctctaatcgaagaatattttcatcaccttttctaaaaagaaactctgtacccattaataaccactctctattcttcctcctcccagccgctggcaaccactagtctattttctgtctctgcagtttttttttgaggggcttcttcaagtatttacatatgtctctctccatagatttgcctattctgggcattttatataaacaaaaataaaatatgtggtcttttgtgtcaggcttctttcacttagtatatgttttcaagggttatccatgttgtagcatgtatcgtaacttcatttctttttatggattaataatattgtatgggcatatcatattttgtctattggttggtggacatttggcttgtttcactttggggcaaattatgaataatactgtgaacattaatgcatacattttgtgtggatatattttttaaataatttcagctcttgttttagattcaggggctacatgcgcaggtttgttacatgggtatactgtgtgatgctgagatttggggtatgatggatcctgtcacccaggtagtgagcatagtacccaacagttagtttttctgcttccctcccaccaccctctagtagtcttcagtgtctattgttggcatttttatgatgtgtggacatgttttcatattgaaaatgttgaattgctgggtcaaataactcatatgtttaattttttggagaattgccagactgccaaagcagctggaccattttacactcctacaagcaaggcacaaaagtttccagttttccacattcttgctaataccatttgcttcaatgaataattattattgttatcctagtgagtgtgaaaaggtatctcatcttgatttgtatttctctaattagcatcttttcatatgctttctggccatttgtctatcttctctgcagaaatgtatatttcaagcctttgcccattcttttttactaggattatttctcttctgttgttaaatcataataattatttatacattctggatattggatctgatttgcaaatattttctgccattctgtgggttgtcttttcactttcttgatgatgtcgtttgaaacacaaatgtttttatttttgatgaagtccaccttacctattttttcttttgttgctaaaccattgcctagcctatggttataaaatatttagacctgtgtttccttctaagagttttatagttttagctcttacactttggtctcagatctattttgagctttttaaaaaattattttgcatttggatatccaattatcctaccaccatttgttgcaaataataatttttgtaattttagtagagatggggtttcaccatgttggccaggctggtcttgaactcctgacctcaagtgatccacccacttaggtctcccaaagtgctgggattacagacgtgagataccgcgcccagcctgatcttttaaaatttcttgcagcaaagttttatagttttccatgtacaagtcttgtacttcttttgttaagtttattggtaaatatttttctggtgctattgtaaatggaattgtttttaaatttctttttcgaattgtttgttgctaatgtatacaaatataattaatttttgtgtattgatcttgtaccttacaaccttgccaaactcattttatgtacatactttgtgtgtgtgtgtgtggattccttaggattttttatatacaagatcatgtcatctgcaaatatagttttacttcttccttttcaaactggatgcctttcatttccttttcttgcctacttgccctggcaagactcgcctatacaatttggttagaagtagcaaaagtgggcatccttgtcttgttcctgatctttgagaaagccttcagtcttttgccatcaagtttgttagctgtgagttttttgtagatgccctttgtcaagctaaggaagttctttctcttcctagtttgttgaatgtttttatcattaatggatattggaacttgtcaagtactttgtctgcttctaatgaaatgaccatgtgatgtctttctttactctgttaatttggtgtattacactgattgagttttgtgtgttggaccgaccttgcattctgtgattaatcccacttggtccagttatataatccttcttatatgtttctggatttggtttaccagtattttgttaaggatttttgtgtctgtattcataaggagtattgatctatagttttcttatgatatctttatctgatttggtctcaaggtaatattagtgtcatagaatgagttcggaagttctctcttctaatttttggaatagtctgtcaaggattggtgtcaattccttaaatgactggtagattttaacaacgagactatctggtcctggcctcctctgtatgctatttttttattattattactaattcaggatctttacttgtaggtctgttcagatttcctatttcttcttatgtcagttttggtagtttgtgtctaagaaattgtccattttgtctagattatctaatatgttgacatacagttgtccgtagtattcccttataatccttgtttctgtaatgtcaatactactgtcccctctttcattcccgattttagtaatttgaatcttctcccttttctactgatcagtctagctaaatgtcagtattgttaatcttgtcaaagagccaactttggattttattgatttttctcagtagttgtttttgctttttaatttatttctgatctaatctttattatttccttcctcctagggctttctacttatatacatgtatgttggttgcccttgatgaagccaactgtgaaatcatggaattataatatgctagctaggagagtgatctaggccagtgcttctcaaactttaatgcacatacagattgcttggggatctagttaaagtgcaaaacctgattcagtggtagtgttgaagtctacagcttcccttgtctaaaagctttcctggttatgccagtgttgatgttctgagaccagagagtagaaaggatctagttcatttggtatcaatcatttgtgggattttccaaacagaacatgtcatttctctggttccaggtatattaatatgtctctccctttgagaatcagtgctgctatatgtcattatgactattatgaatgtgcatggtttccaagggaaaaaactgaacaagcccaaccctctcattttactgatgaggaaattgaagcttcaaaggggtgagatttcttgcctgaagtcatataataggttaattggctccatggatgagtatattaatcctttctgatgacaagtcctaactcagtgaagttcatcattgattatactgttaccaagaaaaggtagcaatgaggacaagtaaatttatggttaatttttttttttttttcgagatggagttttgctgttgtcgcccaggctggatggagtgcaatggcacaatcttggctcactgcagtttctgcctgccgggttcaagtgattctcctgcctcagcctcctgagtagctgggattacaggtgcctggcaccacacccagctaacttttgtacttttagtagagatggggcttccccatgttggccaggctggtctcgaactcctgacctcaggtaatccacctgcctcggcctcccaaagtgctgggattacaggtgtgagccaccaagcctggctggttaatttttttgactaacccctttaacagatttcaatccagagaaaatgttacttaagtaaattttcttattattgagtagaaatatgatacctgagacgccattaagaatagatagatatagttatggatatagatatatagatattctaagggtcctaagactctattataatttttttttttttttgtaaatgaggatagaataaaagttcatgattgtctcatacaaataagtgtcatcaggctaactaaatggtgttttattacaaggtctttttcagtactttcacttctttctttcacaattaaggactcattttctgtccagttttatacgctaaggtctttttagtactttcacttctttctttcacaatcaaggactcattttctgtccagttttatactctaagaacaattattgcaaaagttcaaaatagatttatttaaaattattgttcttcagtcattcccaacatagagtaagcttttctttctatatgtttctgttagtttgttgtttttaatctcatattaaagcttttttttttttctttttttcttgagacgggggtatcactctatctcccaggctggaatgcagtggtgtgatcttggctcactgcaacctccgcttcccgggttgaagcgattctcctgcctcagtctccctagtagctgggattacaggcgcctgccaccatgcccagctaatttttgtatttttagtaaagacgaggtttcactgtgttggctaggctggtctcaaacttttgacctcagatgatcctccctgagccaccgcgtgagccaccagcgtgagccactgcgcccagccaaaagcttttacacatctttgaaaagtcttctgtgtgataaccattttgtttcttatataagataaaagctttaatctgttagataataagaaaattctgaagaataactatgattgtgctacatattaatatcaattattctctgccaagaattgcatataacatacttaatactaatattaaatatatctttcttttccttcaattatttagaaaacatttcaagattttgctgtatgaacattagtcattgcattataagaagataaaatggcaccttggtgacatgatttgttttcagaacaatatgactcactgtcactgttagctatatgacttcagatcacttttatcatcactattaactaaatgagctacatgactctgtaaagtttattaaaatacccttatatggaaattagcagtcttgaagagatacagtgaagaatcacatgctttttgaaagaacattgaggtcgggtacggtggctcatgcctgtaatcccagcactttgggacactgaggcgggcggatcacgaggtcaggagatcaagaccatcctggctaacacagtgaaactccgtatctactaaaaatacaaaaagttagccgggcgtggcagcaggtgcctgtagtcccagctactcaggaggctgaggcaggagaatggcgtgaacctgggaggcggaacttgcagtgagctgagatcacgcctctgcactccatcccgggtgacagagcgagattctgtctcgaaaaaaaaaaaaaggaaaaaaagaacattgatttgagaaccagtcaacataatgtattattttaactatagtcacttccacatgatttctttagtccagtgctcttgctgtattccccaccaatgtgatctgcaccatcgtccatctaatcgccaaaactacaaatagggaagttactctccattctccttgactatgtccagatagtcaagctatgaaatgctaacgttctaccccagaatgtctctccatgctgactccctcttctccatacagccccactgctctagttctaccctttattatttattttcctctgccattgcagtagacccttacttgcccctcagctttgagttcatgcacccttccaatcatcttccaaaaggatgcaagaatggcttctctaaaattcaaatttgtgacatcacatcccacgttaaagtcttcactgactttaaggtgaaatctgtactccttaaacaaggtccttagcagtctgcccttgtctctttctcttgtctcatctctaatacttaaacccctggcattttttcagtgttgtttttcttctgtgtatgttatgttcttccatacttctgtacctttacctaagctattccttccatcctgttcccttcacatctctactgctaccccttccttacgtgactcctttctttttatcctttaagattgaactcaaaagtctcatcctctgaggatttatagaaacacacggggcccctaaaattgaaggaaaaatagggagccaggtcagatacctttctcctatgcatattcccctggtatcctgtatataccattgttggagttcttactgcagtgtagttgcagtacttctcagtcttctccacagaagtgcacccaatgtcagaggaaattgtattatgcttacagcctgcctgaaaccctaaattaatgacatcaattatcttagttttaagaaatgtagaaaactaacatttccatagaataggtttatgtcatttaacaaaaaaaaaatttttttaattagctgggcatggcgacccatgcctgtaatctcattactttgggaggctgaggtgagaggatcacttgatcttaggagtttgggaccagctgggcaacatagggagaccctgtctctacaaaaaataaaaaaaaaattagccgggcatggttgcacacacctgtttattatcccaggtactcaggaggctgagatgggagaatcacttgagcctgggagattgggactacagtgagttgtgatcgtgccactgcactccagcctgggtgatagagcaagatcctgcctcaaaaatcaaaacaaaacaaatggaacatttaaaattatttgttctgggccgggcgcggtggttcatgcctgtaatcccagcactttgggaggccgaggcaggtggatcacctgaggtcaggagtttgagaccagcctgaccaatatggtgagaccctgtctctactaaaaatacaaaactagccgcacgtggtggcacatgcctgtaatcccagatacttgggaggctgagacaggaaaatcacttgaacccaggaagacgaggttgcagtgagccaagatcgcgccattgcactccagcctgggcaacaagagtgaaactccatctgaaaaattaaaaaattaaaataaaataaaatatttgtcctggaataaaattgatctttgttaaatatgattatgtttatcctgaaatttcaggtgtttgctgtacactgccctatttgttctctataagtttgtattaaccaactgcgataaatagtaagcactttgatggcagggactaagtctattattacctctgtatttctagcattaaaacaatatctaacacatagtagatgttcaatatgtattgaaaaaaataattgcatgaaagttctctattggaatgatagtgttaaatgccagtgttgtgaacattttaaaattttaaatcatttttctcataggaaaagcttgactgatgatatcatgaaagtcatgcatgttttaaaatggctttctggcttatacaatataacagaatctttttttactttatatagttaaaagtacaaaatacacagaaaagaatcctatattataagtattcagctcagtacaatgttacacacacaacatgcttgcataataaacacccataccaacaaacagaaattcacctgccctcagaagcccctccatactctgtcaggtcattgcagccctttttaacaggataggttagttttgcaaaatcattttacacttgaatagtatttaagacaagtaatgttgaatagaaaatattctgtgacaaatcaggttaatgatttaatattcattattagcagccaacattatttgtaggccaggtgtagtggcttatacctttaatcccagcacttcgggaggccaacatgggaggatggcttgaggccaggagttcaagaccagtttgagcaacatagcaagactaaatagccatacttttgtatactattcagcacaaaaatgttaataataagaattaaataatactcattttagcttttgtgttcatttacaatgagcaatatattctttttaaaatttttgatgtgtaataattatacatatttagggatacagactgacattttggctcatgtatacaatgtaatgatcaaatcagggtaattagcatatctcttgcctcaaacacttatttattaattttgggaatattcaaaatcctctcttctagctatttgaaaatataaaaaaaaaaaaattattgccaggcgtggtggctcacacctgtaatcccagcacttgtgggaggccgaggcaggtagatcacgaggtcaggagatcaagaccatcctggttaacacagtggaaccccatctctactaaaaatacaaaaaattagcccagcgtggtgtgggtgcctgtagtcccagctactcgggaggccgaggcaggagaatgacatgaacccgggaggcggagcttgcagtgagccgagatcgtgccactgcactccagcctgggcgacagcaagactctgtctcaaaaaaaaaaaagaaaattattgactatagtcaccatacaatgctacagaacactagaacttactcatcttatctagttgtagctttgcatctgttaaccaacctctccctatcttcccctcctccatactcttttcattttctaataatcacaattctactctctacttctatgagctcaacttttttagcttccacatatgagtgagaacatgtggtatttatctttctgtcccagacttatttcacttaacataatgtcctttaggctcatccatgttgccatgaatcataggatttcattctttttatggctgaatttgtgtgtgtgtgtgtatgtgtgtgtgtgtgtgtgtgtgtgtgtgtataccacatttctttattcatgttgatgacacttaggttgatttcatatcttggttattgtgaatagtgctgaattaaacatgggaatgcagctatctctttgttatatcgatttcctttcctttggataaatatctggtagtgggattgctgaatcatatggtagttctacttttagttttttgaggaacctccgtacagttttccataaaggctatactaattgacattcccaccaacagtgtataagaattcccttttttctgcatccacaccagcattttttattttttgtcttgttagtaatagccattctgagtgaattgttacttttaagctcttatctctaacaatcaaattactataacagatttttgtttcactttcatttgtttagattagtagttctcaatgtggaaggacctgatttaatctcccaaagaatatttggcagtgtctggagacatttttggttgtcttaacccaccaaaaacagttgtcagtgctactgacatctagtgttacccactactgggttgctgtgaaaattagttttcagaacagagccccataaaaatgaattatctagcttaaaatgtcaacagtgccaaggttgagagtagtgttttttaaagaatgggtaggttgtttatgtttgatggaagttagtttaaatagattgtagcaccttactaatggagtccatgatatcagaaatttaattcccatagacgctagttaacctgtctgtagttcatgcactccagacctcagccagatgtcttaaacatttctgctgcagattataagaagaacaagatgagaaaatgtagatgggttggtataaatctatcactacttctggaaaaatgtctcaatatgatattttttacttaacccaagtctatctctcaccacatgactagttctcactacgttggaatcagcttgtaaactttgactagcagcattgtttaatcttgttataagttcctgaattaatggtctacaggcttgaggcagagtgaatgcctcaaagttatgggcaggcagttatctagtaccaaccatagtctcctgccatctattgggaggtgtcaggtgggaaggctagtagccctctacacatattcatacccacaccccagctctattttttttttttgagtaattataggaggtcagaaacactagaatgtacatacatgctggtaataaatggaaattaatatctgatagttttcttcatggctgtctttcagggcatagttttccatgtattttgctgtcctcttgtgagaatactacccttgacaagttgatctacatttaagctatggccacatttaaactatggccctaaaacatttgttgttatgcaagaaagaattaatggtgatatataccaattctgactctcacataaagtgtttctccaaaagtaacctcagacaacataacaacaaaccaagatttatatagttggaattgcaaatccgtaagtccttaaacttaatgagaagattaatttggaatttgaccatttgactctgctcatttaactttgaaagcagatataaataaaaaccttgtatgaagaaaattgcttgggataatttgcattaaacagtctgttttttgctaagtggcttatttgtattatggaagcatagccttattagtatttttagtcttcctaagaagaaatggaatacatcatagagctctaggccttctttagttttcagtacaaatttggtatatttggtgtttgggaggatatacatggcataaggtaaagagagcattagctttcacgtcagatccaggtccagattctgccacttataaactgttacaccttggaccacctagctattatgggcctgctttagcaccggaaagaagggagaatacctaaatatgatgagagaataagtaggtaaaataatcatgtaaaagaatggtcaggaggagtctggcctctggctctgtcatttattattgtctgtgcccatgggccggctgcaactatttgattgacctaaaatgggatggtgacttgcccgaggtcatacagtgagtcagggcagagcagctgaagctttactctctaagtctcattttccttccctgtaaaattgttgtattggtgactgtctcacagcatgttgtaaggagagatggagatcataattgtaagaggtagcccacagtgctggcacagtgtaagcaccaataaatgaaggtaatgagtacaataaaatgtgtcacttagcccctttccccaaatagtttatccatctggttgatgagagccatacactgtatgctaagacttaaaaatgtgggagttgattaagttctagtactgcattatactaataatgctagtgcatagtttaaagaataataaaataccataatgcaaagtttgtttaagccctttaccctttttttcctacattggggctttatttttagagcacttcacaaattatgcagagaaaagaggggtaggcaagaatggaagcagagagagcagtgtgaaggtagtacagtagggagttatgacagatgcttaggttagggtgatagcagaggtggtggtgagactattaaaagactactcagccaggcatggtggctcacgcgtattatcccaacactctgggaggtcgaagtgggaatatcgcttcagctcaagagctcaagaccagcctgggcaacaaagtgagaccatgtctctacagaaaatacaaaaattagccagtgtgatggcgtgcgcctatagttccagctacttgggaggcagagacagaagggttacttgagcccagaaggttgaggctacagtgagctatgatcatgccactgcattccagtttgggcaacagagcaagaccctgtctcaaagaaaaaaagaaagaaaagactactcaaggcttgagatttgataaaatagttcattttactgcttcattgaggatattcttaaaggaaactggcattttttttcacagtgagtacatggtggagaagaatacaactaatactgaattttaaaatgtgctatttctagtaaccagccttcatcttcttcccctttggctgcagatcctaattatctcatggctaatgaacgcatgaacctcatgaacatggccaagctgagtatcaagggcttgattgaatcagctctgaacctggggaggactcttgactctgactatgcacctctccagcaattctttgtggtgatggagcactgtctgaaacatggcttgaaaggtaggccatcaccccaaaatgcaaatatgcatgcagctgttttctagcaatgcatactatagaagaaagcattctttgtggagccaaagaataagaggcttgaattaataatattaatccattggaatgcagtcttttataggagcagggttatggttgactcaatggacttatagggctttaaaaatacagatcattaaatgttacagttggaggggccattataagtaatcaagtacagtacagtagttctgtttgacaggtggaaataggcctgcccagaatgagacatgacttggtcaaggtcacacattgagttgtggcagagtaggtgctagaactcaggtctcccgactcttgggtcagtgttctttccacttaactataagcttttgagggcagtaactggtcttgttcacccttgtttcctttcttcttgccttctcaatattcttttcttgttgttttttgtttgattgttttttttaaatctgtatgcctatgcttaccaacttcccaatattccatagcctatttctggattacatattcttttctattgagctgttttcttcattaataccacacaattttaggcactaaattgttaaaatgttttattatattatagggctaggccacaaactgtttgtgaaagaagaagggctgagtcttgggaagtagagaatttttttattttcacaaaatattatctattctaaaagcatgaatgaatccaaaaccatcttataacctaggattggtttcctgaaaagttgtgtgtgtatgtgtgtgtgtattgagagtgcgcttatgttgtaaagaatattaaaatactgctttatttttgttgccttagctaaaaaaacttttctcggacaaaataaatccttctgggggcctctagaactggtagaaaagcttgttccagaagccgcagagataacagcaagtgttaaagatcttccaggacttaagtaagtctaaggttgaattccatttctcaggaacagcattcttattaactatcccttgaagagcaagactaaagacaattatgtacgaataatttattttataacaatccaaaatgcatgatgtcatgaataggtgctgacaggagagaattggtatacagaatattgagaaaaatgtgctcttgagggataattattcatctaagagagattgtctttttgttgaaatgccaaacatttgcttattttttaaagcacttgggagaatcatatctaagggggtggcatgctgtacttgacttagggaaaaaaggtattcagtgggtttgagagtcaagattaaaacagctgtcaaattaacctgaagagctagtgactgtagcctgccttagaactataaagtagtgaccaccttcccaaatgagactggtttaattttaatcagacagaggcctagattgcctgtgtccacattcatgctttggacatttatataatccacactgaatttataaggatttgctattattgatctgatggaacatttttagttgggtctcccagaggctgtgtcttcaaattgtagttacattcagtaattctttttgaaagcatttgttccgggtcacattagcccacacacaaaaattccttgcatgggaatgtactgggagaggtcctgaggagcacctcagtgtgcttgttacactggaataccattagcaagaataagtgaactgattctactgtagcctttgcttctggtgcttatgttttcagttgtttgatttctgtgtttttgtaggacaccagtaggtagaggaagagcctggcttcgtttggcattaatgcaaaagaaactttcagaatatatgaaagctttgatcaataagaaagaacttctcaggtatgaacaccttcttgaactttcttctttccttggtatgttctacatcgtataaagtcaaaccatataagttcactatttttgtagatcagaaacatttgattcataacagcttcactgatactttctctcatacctcacacacatatcctcccaaatggatgatttatgttatgtgtgttctgtctgtcactgtggcatatattggtcctttccaaggcaggccaagacttacctctagaaaacagaaggcaccttagcatgtgcccaggctcaataagacaagaacttgacatgtagcattaaattcaaatatagcacaaaattggacgggtgcagtggttcacgcctgtaatcccagcatttcgggaggccaaggtgggcagaccacttgaggccaggagtctgagaccagcctggtcaatatgtcgaaaccctatctctactaaaaaaatataaaaattagccgggcgtggcggtggacacctgtaatcccagctacttgggcggctgaggcacgagaatcgcttggacctgggaagtagaagctgcagtgatccgagagcgtgccaccactcttcagcccgggcgacagagtgagactctgtctcaaaaaaaaaaaaaaaaaatgtgtatatatatatatatatttgtaaaatcacaaaatcttccagtagatcatagatacaactgggagaggcaaaacaacattattttatccgtctttattatatgattccattgtataaaggtcaaaactaggtaaaatcaatctatggtgatagaaatcaggataatagttaccttgaagaggtgggggtagagattggaagagagaaagaatccgatttctaggatttcagtactgttctctttcctgatcatgatagtgattacacagatagatgtgttttttgtgaaagttcatggaactaacagttagctgagatttggaaatgtgtgaatgttggaattcagccatattccacttctgaacagttcataaggttaggcttttgggacaataaactgtcaaagaaccttgttcattccagttctactcagtttccttcagaggctatcaaagaacaaaaatagcatgtgatcagtttttgagagaaacagtaaatttgcagctcattcacttgctgtttttgtgctattttgtcatttgttaatatcttttttttttttttttgagacagagtctcactctgtcaccaggctgtaggctgtagtgcagtggcgctatctccactcactgccacctccgcctcccgggttcaagcgattctcctgccacagcctcctgagtagctgggactacaggcgcacaccaccacacccagctaatttttgtatttttagtagagacggggtttcaccgtgttggccaggatggtctcgatctcttgatctcgtgatccacccaccttggcctcccaaagtgctgggattacaggcgtgagcccagcctattaatatcttttatagtgaatcagaaaagaaataaggaactaatatcagtgaattatattgattgttaacagtgattgaggttgacctttacccccaggtaacttgttgaaaacaaattgattgcagtgttgttttaatcatgatgtcaaattgactgaaaatgaataattcaggtcactgggttttcgtgttttgttttgttttgctttaagagactcgcgctctgtcacccaggttggagtgcagtggtgcaatcacggctcactgcagcttccacctcccaggttcaatcgattctcctgcctcagcctcccgagtagatgggactataggcatgcaccaccacacctggctaatttttgtatttttagtacagacagggtttcaccacgttggccaggctggtcttcaactcctgacctcaagtgatccacctgcctcagcctcccaaagtgtggggtttacaggcgtgagccaccgcacccgcctgtttccatttttttaaaaaatctaaaagactattttttagagtggttttaaatttatagcaatattgagtagaaggtacagatatttttcatacatacccttcccccctgtacaacctccctcattatcaacatcccacaggagtggtacatttgttacaattgatgaacctacattgacacatcattatctcccaaagttcatagttcacattaaggtttactcttggtattgtatgttttatggattttgacagatgtataatgatatgtatccatatgtcattatagtaccatacaaaatagtttcatggccctaaaaaatcctctgtgctccacctattcatctctctgtcctccaacccctaataaccactgatcgtactgtgattgtactgttgttaccaggggtttactgtctctgtggtttttccttttccagaatgtcatgtagtgggaatcatagagtatatggccttttcagactggcacctttcacttagtaatatgcatttaagtttcctctgtggcttgatagctccctttttttttgttctttgagacagagtttcactcttgttgcccaggctggagtgcagtggcacgatctcagctcaccgcaatctccgcctcccaggttcaagtgattgtcctgcctcagcctcctgagtagctgggattacaggcgtgtgccaccatgcccggctaattttgtattttttttttttttttttttttttttttttagtagagacagggtttctacatgttggtcaggctggtctcgaacttccgacctcaggtgatccacccgccttgacctcccaaagtgctgggattgcaggcgtgagccactgcgcctggcgatagctccctttttttagtgctaagtcatatgccattgtccattcatttactgaaggacatcttggttgctcccaaattttggcaattaagagtaaaactgctataaacacatgtatgcaggtttttgtgtggacgtaagtttttaactcagttgggtaaataccaaggaatgcaatagttagatcatatgaattacatcactggtttttttgtgtgtgtattagtaatttaggtgcattataagcagtatttaattatctatgggtcttcacgaatttttttttttgagacagagtgttgctctgtcacccaggctggagtgcagtggcacaatctcagctcactgcaacctccgcctcctgtgttcaagcgattctcctgcctcagcctcctgagtagctgggattacaggtgtgcaccaccacacccagctaatttttgtatttttagtagagatggggtttcaccatgttggccaggctggtcttgaactcctgacctcaagtgatccacccgcctcggcctcccaaagtgctgggattacaagcgtgagccaccgtgcccagccaataatttttatccattcagatttttttttgtttttagtagagatggggtcttactatgttgctcactctggtctcaaagtcctgggctcaagcagtcctcccgccttggtctccccaagtgctgggattacaggtgcgaaccaccatgccgagctaccaaacaaatgttttaagatgcataaaagattgcaaaattatctgatggtgcatcacaagtacaaatatgtcagaaaagtctgaatacctgcttcaaccacaatactgttcagtcacgtctttctgccagcctattatttaaagaatctattcatgcgcctattatttttttcttttaaaaaattttttctccagtgccacttgccaacatccacctattattctaaaagtaaaatatttactaaagcctttctttttgtagttttttttttactatttttgtagatggctataatcaaccatgatgactatgattcaaccatgaatcaaccatttttgtccttgtctctggatttttgagatttttgttacaataaggaattctgtggatttctcttacagtgaattctacgaacccaatgccctcatgatggaagaagaaggagccataattgctggtctgttggtgggtctgaatgtcattgat

SEQ ID NO: 15798 - DNA, 40861 bp, Homo sapiens
gtaattggcccttggtgagattacagaaacatttgttgccaccagtgcagtcagccttagatttacactgtcaggttctctgagctgtgattatgtgttcagaaggcagtctcagtgaacttctcaaagtgagaaggttgtagcttttaatacagtctcagaagcctatgggacaaagttttctggacacggttcatcccttcttgttgctctgccctgaaaataacctggctagtcaccctttcaaggtaagttttacccacttagcttccaggattttgtaaaattctaaatctgggtgagaaatatcagtagctctgtacttgtatgccagttcctatctaaaccacgaaagaggtgcatgctgcctctgatctgaccgtaacatactctgcataaaatcagcttttccttcctgtttcaggactactttcagtttcttcctgtctctttgatactcttgcactagcgttggcttcagtgcactgtcattaaccacagtgccttacagtattttcttctattggtgagccttttctggacctttcgtgaaacagagcttctacttgaatctttaatttgtgcccttcataacagaactcacattaactcttctttgggttatcagcttctgacacccaagagtcatttgtcctaaactaatcactgaaatatgaatcattttccaaaaagaaatgctgtgccagagaagataattgccactcagtgatagagctcagaacggaattcacgttgtcagattcccaagcctgagtaccaaccaagatctggttggaaagagcaagtgctgtcgtctgagaacatccaccatattctgtactcttcagtagctgttctgtgttttgcttttttgatggtgcccctcctgagggggaggtggagagtatataattgggcatgttttttcattgtggttcctctagtccccaccagtcaactgtgactactatgaagtgcttttgagtacagggctgtaaatactaaaatctgttcctttgcaatttttggtatttgagcttttccagagaacaaatagaaggatttgatgagcttagaaatacatgtgtagaggaacagtgaaaaagacttcttcccaaatggctgctaagtaattatatatttttcatcataattaaatattctcaaaattgtatgtcagtgtgttgaaaatagtgttttcaaagaaaatattggctgggcgtggtggctcacacctgtaatcccaacattttgggaggccaaggcaggcggattgcttgagctcaggagttcaaggccagcctgggcaacatggcaaaaccctatatctacaaaaaaaaataaaaattagctgggtgctgctgggcactgtggctcatgtctgtaatcccagcactttcagaggtcgaggcgggtggatcacctgaggtcaggagttcgagaccagcctggccaacctggtgaaaccctgtctctactaaaactacaaaatattagccgggcatggtggcggatacttgcaatctcagctactcaggaggctgaggcaggagaattgcttgaatccaggaggtggaggttgcagtgagatgagatcacatcactgcactccagcctgggcaacaagagcaaaacttcatctcaaaaaaaattagctgggtgtggtggtgcatgcctgtggtcccagctactcaggaggctgacgtgggaggatgggaagattacttgagctcagcaggtcaaggctgctgtgagctgtgattgcgccacagtgctccactgggtggcagagttcagaccctgtctcaaaaaaaaaaaaaaaaagaaaagaaaaggaaagaaagaaatgtctttagcattattatgtacagatatttttaatgaaaacaactttagttatagaggtgatatatttgcattgtaagtcacaagatacagaaaagtataaaaatgcaaaataatagaatgcacctacatttcaaatacctagggataaccactgttaagatttagtatcagattctctttttcaatgtatacactttttcaatgtatacactgaaggttcacttgcaaactcaaaattttatacatgtaagatcataccacacctgtgctgtgtgacctgccttttttcctctgcaatatttttccatatgggtaaattgaaatttttgtcattttgtttaatgtcttcagttattggatgtgctataatttcttttcttttcttttttttttctgagacggagttttgctcttattgtctgggctggagtgcaatggcatggtctcagctcactgcaacctctgcctcccgggttcaagtgattctcttgcctcagcctcccaagtagctgggattacaggcgctttcgaccatgtccggctaatttttgtattttcagtagagacagggtttcaccatgttggccaggctagtctcaaactcctgacctcaggtgatccacccaccctggcctcccaaagtgctggtattacaggcgtgagccactgcgcctggcctggatgtgccataatttctttgactatttctttattacaggcatttaggttgtttctaaatttttctacccaagacagttttagaaaaattgttatgtgtataacttgaatatttaaccaatttttagtttttaatttttatacacattgccaaactactttaaacaattaaaacaaattttgaatagcatggtatcataaactttcatattagctactcatcaaagcttggttttgtctttcctgcttgcagttggttgcgtttttctcatgctgtattaacatctgaagtttccaaaagatacagttgtggttttcaagacagttggttcagcagctgaaaacctcatgatattactttctctactttttttttttaagctaacagtagtgtcctaagcaaaagagagtttttactgttaattgtgcaatgagaaactgcatgtttttctaagattgctagaatttgctttttgggatgaaaaagctgcatgctgggatttcctttttctttcttatacagatataaaactaagagtgtatgtgagatgtactacattttgtctgagaatcccacagtgtccagtcctgtggacagcagcttcccagctaaagtatcttagagacattatctctgccagcatagccattccagcatgagagcaaagggtctactggtcagggctttctttcctcatccgctcaccccccatcaggctcagccctccttagcgttctagtgtcacctagctgctcacctaagaatctgttttatcttcacttatgtcactaatattaattcctcttttttttttttttttttgagatagggtcttgctctgtcaaccaggctggagtgcagtggtaccatctcagctcactgcaatctccacctggattcaagcaattctcctgcctcagcctcctgagtagctgggattgcaggcacacaccaccacgcctggctaatttttgtatttttagtagagacagggttacaccatgttgccaggctggtctcgaactcctgacttcaagtgatctgcctgcttaggcttcccaaagtgctgggattacagacaggagccaccatgcccagcctattaattccttttttttttttttttttgagatagggtttcactctatcacccaggctggagtgcaagtggtacaatctcagctcactccagcctccacctcccaggctcaagcaatcctcctaccttggcctcccaagtagctgggattagaggcatgctgcactaccacacctggctatttcttttgtatttttggcagagacagggtttcgccatgttgtctaggctggtcgccgcctcctggactcaagcgatctgcctgccttggcctcccaaagtgctgggattacaagcatgagctaccacgcccagccttaattccttgtaaagcttatgtcatacttatttagatctcaagggcattgtctatgggtgtttcatcttttttttttttttttttttttttgagacggagttttggtctgtcacccaggctggagtgcagtggcacgatcttggctcactgcagcccccgcctcccgggttgaagcaattatcctgcctcagcctctggagtagctgggactacaggcatgcgccaccacgcccggctaattttttgtatttttggtagagacagggtttcactgtgttggccaggatggtcttgatctcctgacctcatgatctgcccgcctcggcctcccaaagtgctgggattacaggcgtgagccaccgtgcccagccagatgtttcatctttttaacttccattgcattagtaaagtcttttgctcaccataaatgctcaataaattttattttattttatttttattatttatattatttgtttttattttatattactttatttatttttgggtctcactctgtcacccaggctggagtgccgtggcatgatcatagcttattgcagcctcaaactcctggcctcaagagatcctcctgtttcagtctgtcaagtagcctggtctccctatattgagtaggctgttcttgaactcatgggctaggcgatgcacccacctctgccttccaaagtgctgggattacaggcatgaaccaccacacccagcctcagtaaaattaaaatggctgaagtgttgatgacttaatgtgttaccttttctagggctatttgtctttttttttttttttgctgatatttttgtggagaaagtagaccttggcccaaattactggtttattagaacaaaacctcaaagcatttatgaaaattaatatatgacaattgctttgttaccaagctaataatactatggttagtttaatagcacctcagctgttaatttgtcatttggtttatttaggttgactaattttttttcctgtttttaatatttagcttagctggctttttaaaattccattcactctattgtctttgaataattacggcaaatatagagaaatccagttgtaagtgtaaagttgacattgagtacctatgctttgctaagtacttcaaatttattagcttttattttcacaatagcccttcaaggagttatatgtgatgtgtctgggtttggggcttcagaaaggtgttgccttaagaaaccataataaaattctaaaaattaacactaaatcaaagacacttggtctcaaggggacaaaataacccccaggccttgtaaaatctgtcacttggttgcctatagcaatactgctagagaaaggctacctcaagaagagatttcacaaccatggatacataaacaaaggcgaagcattttttagcccattcaagcacttccctgtagaaaaggagcttcattcagccagttgcctcatccagagaaaaaagaagtacaagaggggccaggctcaccttctaccagaccatgtactccagaacttaaagtataaaaaaaaaaaaaaaagccgggtgcagtgggggacgcctataatcccagctactctggaggctgaggcaggataattgcttcaacccaggaggcggaggctgcagtgagctgagatcgtgccactgcactccagcctgggtgacagagaaaaactccgtctcaaaaaaaaaaaaaaaaaaagatgaaacacccatagacctgtttcaggtctaagaatgaaaaaaaatcaatagactaattatgtagctctgaaaagatttaagctggtggcactgtaaacatctacccttaaggtacatagtgactcaaaggaccttgaggtataaaagaatggcatgttacctattgtagtaaagtcctgagcatgccaaggtaaagtggagaacagctttacatggaaaagacagaccttttagtttctgggggagaaaagttctcttaaattaattgcatcactctgatacttaaaactttaatctctgttttaagaagaaaacagaaaatatgtctgtttgtaacagaaaaatgttctagatgggatatgcccaaggaaaagtccgagatccctggtatccaccacgcattcctacctagaaattcactttccagagcctttttctatacaaatcttggaggctcttcatattttgctttactaaggtaggcttttatcttcataggtgacaaatagagtttctaattaaatacaatacaataaagaacaaaatgggaatattccctctattgacttttgcaaggtcacagcaagtctgtaaagtaataatgtggatggtaagagtccattctcatgaatctgtaatcctacataatatagatttgtggcacattatattgtcaaaggattgaacctgaaaatgacttctgcaaatatgtctatatataatgtatttcagcactaatttactataaaataatagtagccaactcacagtatttttttttctgtatgagacactttccatttgctttacatatatagacacataattccaaaattaaaaaaacctctggaaatgaaaagcatttttcacaaatttgcctgaacttatttggtgttacaacatgatgtgaatttacttgaggctatttatagtctttattctacttaatctgaatattcatttcctgcagaaatattaatgtgcttgattgtaggttactgcctcagatcctgctagttctgtatggtgaataaacatctggctttattgaattatatgtgatttattttgtgtatcttcaaagtagcctcctttatttttgttttggggaaggagaattgggggagggggagttggaaaaagtatttggattttttttttttttaagaaaagtcactagtttgcatcataatatttgtcctgaatctaaaagaaatatatcgcacatacttttcaattccctgaagtgatcaaaataatagttgagttagattaatgtcgcctacacttagaatacaaagagcctttgattttcaatagaaaaataaatctgtgttgctttttaataggatatgcatctttgtttccctttatttgaaactttgaaattgctaatcttagctttgaaacatatttaataaccgtagttgctatctctgcttatttggttgtactcccagcccttgtcactgttaatcgctgtgataagtagaaagaatcctaggaacctccctttcagttatccctttggaaatcttgtttttaatagcacttttctttctgggcttgcatgacattttatctttcttttcctttctttttgccgtttgcaaagactcttgggaggatttgacagatttggtggagcaaatgcgcgatgatacagaaggtgcgtgccacaccaacatctttcagctttttctccttgctttttaaaattttctaaccaccttttaattgttttccgtaagaggaaatgtcagctttaggttttatttcccatggcaataagtggaaatcttaatgttttggttccaagtaaaatagtgtcaatgtatgtttatgttgcttttgaaagatatttgctgaataacgtgtttaaaagggacattatttcaagattatatcaagtttttgccatggctgttttttcacttgtttgttgagaaagtgtaaattttattactcatgcaaatacatgtatatatatttctgtgaatttcacagcagccaaaagcaaacagatcccaggaatctagtggttggcctggaatgttgctctgatttgtagatttccataacattacacacttaagctttgtcatgtcatagcattcttttctggtgtaattattttttgttaattttttcttcttcatacaagagactgaaacatggaatggtgtgattatctttttaaagtagcacacatgttctaatgtggaaaggttccccaaaccaatcagtgtttcttctgtatcaaggcagctaactatagggagctcagagcgatttacacattttatactaaaaatagaaaaattgagatttgaatctactttatcattttacatgttcccgctttgctgtagcacacacccctgacacacacacatccaccactctgtccagactgacctttcctgcccacctcctcctctcctactttgttcctgtgacatctcatgtatttatacccttccccctccgcctgtgccacctgcgaacccttcagtccttatgggatttccacaatttactctttgacagctttggcccacattcttttctccattcacttgctgctgcagaacttggagcttaaggaaggctttttacttattctctaattcttgtgtgtttatcaacctagttaaagggtaaactccttgagaacagagattgtcttaaacttcttggtatccttaatcagacctgggacgagtactgccctcagtagatctggtcattaccaaacaaaatcaaggcagctttaccctctctgttgatgcccaagagtatcttctgtttcagcccttgcctttgaatgtgtgaattctgaaatcctgagtgtcatctcttttcctttggtcaaactatttttatgccatctttgattctgcttttaatataactgattacatatagttcagtgaaagaacaaatcagtattgtctagttgattgacagttcacagacaagaaaaaagagaaggatgttgattcatttagtgtgtaatgtttactattgtgttagctgctattattattattattatatttatttatttattttgaaatggaatctcactccatcgtccaggctgcggtgcagtggagcgatctcatctcactgcaacttctgcctcctggggttcaagcaattctcctgcctcagcttcctaagtagctgggattataggtgcataccaccatccctggctaatttttttgtgtttttagtagagacggggtttcaacatgttggccaggctggtctcgaactcctgacctcaagtgatccacctgcctcagcctctcaaagtgctgggattacaagtgtgaaccactgtgcctggcctattatcattattattaattattggctaggcaccaccaggtttaaggctttaattcctttgatagactagatattaaaggaaaatgctacataaagtttatccccttcttgagaactttaccatgactcatcacaggcaagattctatttctttaatacaaagtattaataatgcaagagtcaagcttactgtgagagtcagactccttttttttaattttgtttttgctgggatttttgtcgatggttattataggtgaactccaaaagggagagaagatgaactttaacagtatagtacataaaatatccagaaaatgttgattatgtcagtaccttcatgatcttaatagatttccagtcaagtgatatatggtaatgttgatcaagatcctctttacagaaaagtctttctgaaaagtagttaaaaaaaaaaatgagaatggggagagggagatggcttcactttaactcttttgataatttcattcttcttgatatccttctctgcttttcttgcctcatggtctcaatcacagttatgtaaaattccagcatttcacacaactgtattacgtaacttggagatgttataaataagtgctagtactaagaagaaataagttatggagtattacctgcacataacacacaatagcaattcagggtctgggaagaatcctcatttcagactcagaaaaagctgatgatatatgcaggctcagatcttttctggagaccttcaactgctaagctgttttcaatgctgtttctcatctgttattgcagatgggccataacagttggcttttttaaaattttattttattttattttatttttttgagacgaggtatcactctgttgcccaggctggagtgcagtggcatgatcatagcttcctgcagcctcgaactcccaggctccttcctcagcctcctgagtagctgggactacaggcatgtgccatcacacctggctaatttttatgtatgtatgtatgtatgtatgtagagacagggtctcactttgttgcccaggctggtctcaaactcctaggctcaaacgatcctcccacttcagcctcccaacgcactaggattgcaggcttgagccaccgaacccggctatagtttgctttttaatagatagagtgttaacactggcttctggcctcctaaaaatttttaaaataacagactctagtgggttgcagatttgaactggtcgttgtttttgttttttgtttcagttctgtcacaattgaagcttcttattttgaatttttttttttttttttgagatggagtttcgctcttgttgcccaggctggagtgcaatgctatgatatcagctcactgcaacctccacctcccagattgaagcaattctcctgcctcagcctcctgagtagctgggactacaggcacatgccaccacatctggctaatttttgcatttttagtagagacagggtctcaccatgttggctaggctggtctcgaactcctggcctcaggtgatgcgcccgcctcaggctcccaaagtgctgggattacagacatgagccactgtgcccagcccttttgaatttttttagaagatgggagtcttgctgtgttgcccaggctggagtgctgtggtgcaatctcggctcactgcagcctctgctagtgattcttcttgcctcagcctcctgagtagctgggactacaggtgcacaccaccatgcctagctaatttttgcattttttagtagagatggagtttcaccatgtttgccaggatggtctcaatctcctgacctcgtggtccacccgccttggcctcccaaagtgctgggattacaagtgtgagccaccgcgcccggcctgaactattttttacagtgatgattagtttcatattctatgtgtttgtaacttatatctactagaatatgaagtgtcttcttagggtacaattgtatgatgtacaacacctattatattgcatctcctttccttatatgctagtaatttgtgtctaaaatgttttgaaactcactagggaaattatgaacattaaattaaataatgaaaggcacatagcttattacctttagtttttcaataaatatcggatttctgtctgtactcattacaagccttttgaacagattttgtaaatttgcagtggcccagattactgcccgtctctctgaggattaaaatagtcaggacagtacttgaatttaggcaataatatacctgtgtaaaatattacctaccaaaattgcatactggttccttggcatttgggggcagagggtgttaagacttgatgcatgttgaaaaacagaagaaacatatcttaagagattttattagcttctagcactgtgccacatcgtcattcaataagcttattaagttaaacaaaattgttataatggcttagagtggtggttcacttctataatcccagtactttgcggggccgaggcaggcagattacttgacgtcaggagttcaagaccagcctggccaacatgacaaaacccgtctctactaaaaatacaaaaaattgctgaggcgaggaattgcttgaaactgggaggcagaggttgcggtgagctgagatcacgccactgcactccagcctgggcaatagagtgagtctccctctcaaaacacaacaacaaaaaaattggcggggcgtggtggctcacgcctgtaatcctagcactttgggatgccaaggtgggcggatcacttgatgccaggagttcaaggccagcctgggcaacatggtgaaaccctgtctctactaaaaatacaaaaagttagccaggtatggtggcaggcgcctgtaatcccagttcctgggagtctgaggcacgagaatcgcttgagcccgggaggcggaggttgcagtgagtcaagatcatgccactgcactcaagcctggttgacagagcaagactccttaaaaaaaaaaaaaaaaattagccaggcatggtggcgggtgcctgtagtcccagctactcagaaggctgaggcaagaaaatcacttgaagctgtgagttggaggttgcagtgagccgagattgcaccattgcattccagcctgggtgactgagcaagactgtctcaaaaaaaaaaaaaaaaaaaagttatgtacatggaagaccataataattgcagtagctaacaacttttttccttagtatattccaagcacttctaaatggttacgtataagaacttgtttactcttcagaaccctgtcaccattttatagataaggaaagtgacacatacagaggttaagaaagtttcccagcaaaatactactcagttgtaaaaaggaagagaccactgatacatgcaacaacctgaatgattcttcggagaattatgctgaataacaaaaagtcaattttaatggttgcatactatatgattctatttacataacagtcttgaagtgatgaaagtatagaaatgaagaacagattagtggttggcatgggttgaggatggagtaggggcaaggagagatgtgggcatggctataaaacatcaatatgggggatccttgtcgtgatggaaatgttcagtgtcttgactgtaattcaacatcagtatactggttgtgataatgtactacagttttgcaagatacccttgggagaactaggttaaaagtacatggtatctctcgatattatttcttacaatttcatgtgattcctcaattatctcaaaacagaaaatgcaacaagagaaaaaacttttcccaaggtcacacagctagggaagagtttgaatagagttcaaactcccacagaccagctttagagcttgtgctgttaaccactacaccaaaattgtttaaacttatttgacacaagaacaactgtaaaaatacatcttcatcagaactcagtacacacatcatttatttgtatgtatcttaaaacaaaagtttcatgaaacaatacatagccttactatataggacattaaattgattttgtgacccactaaagggttgtgacctttgtttgaaagacactccagtatcctgtgctgcctctctggtatatacatccatttgtacggtagccactgtctaggtgtgtgcaaaaaaaaaaaaacaaattcctgaaaggactgttttggctctgtttccagcctgtaatcgtgggcatactttaaaggctgggctagtaaccttgcatccttctatttctctttaaaacatctccttgtgaaagcatcttttctcataactgctattattgtcctatgctgatgactctctaagtccaaacttccatttgcatttacaactaggtgatcaaaaatatcttgaaagctgggcatggtggttgcattcctggagacccatctattcaggaggctgaggtgggaggattgcttgagcccatgagtccaagtccagcctgggcaacatagtgagaccttgtctttaaaaataatatgttgagaatccttccacataaatatcctttatgatatccaaaaccaagtttattttgccctttatctccataacagttactcaactttttcatttccctttatagcacactcttccagtctctcagggcaaaaatgttggtgttattcttgaccccttcatttcctttatcttttctatgactatctgaacttgaatcactacagttcttcgtggcagaccattttgattctcttccctcaaattcattttgcgtaatcttctcagattagtcatctccaaacaaaattttaggcacgctgattctctgctcaaaactacagtggttcccattgcttcctccattaatatccaagtctagtttcagagacctctttatctgactctaccctacctgtgttttccagttctccccagtaagaactccctcttccactcttattttctccacctgacttcacacacccattccaaccacttggaataccgtccttcatgtgttctgtgataccacgacatttaggatctacctcaagtactgcagtatattgagatttatcacacttttattcatattacttttggtgttatctcatttgaagtacaaatgtacaatattccagggagttaaactaaggacagtggttattcctggtttttgtcaggtctgaggtttacctgctttaacaaattaataaagcctcttgctgtttcttggatgctggcaaaagacacaagactcctaggtcagagataaaggactttattactcatgacagtgcaagcagcctgagcatctgcatatctgtgccagttcttcttggaccagagtcccatggggtgacactggatggctcagtgacatgcttcacacgtggtaggtttgtgttgcagatgaagaaggccaagttgggagaacccattgtttttataggaagcagtaggaaagcttcgtctctcattatcaggttcataaatggcccaggaaagagtggtcagggccgtatagtcttgacataacccagtaaagaaatgtaggtgcccaagaggtccaaggaggattgtcttccccaacattttacagatgaaacagaagaatgaggatttcccccaacatcactcagggaatatgagagagacagatctaacccttctagatcatagatctaactgcgattgccctctcacatccatttacattgtttttcttttcttttcttttcttttttttatacctaggtaaagcccaaaacatttaaattatttctatgcaataaattgagcaaaccaaggaattcttgggttgtatttaccacctaaatttcttatgttgtatcaaaacaacgaaggtttgtcctaacttctaaatgtttccagaaatcttctaggtattcttctgcagcatggaattctcaggtaaaggtaactgaagaagtctgggaaactttccaaaactaaaattgattatattatgatatgggagcccaatgaagaagaaatcagtgtgtttcctagggaactcttgtgcaagctaatatatttttttttaatctattaaagattagagaaatgtatacctaaccaagaatgagtaagagtatatgaaaataatggttttggttaagtaagctgactcatttcaatgctaaagcccatcaaaagggtttttttttttttttggttatatacggaggtagaagaaactacactagtttcttcttaccttcttacaggaggccagcagctaaaccttgacctggagtaagagaaagcagaattacttttttcttgtcttgtcttttttttttttttttgagacaggatctcactctgttgcccaggctagaaggtggtggcacagctcactgtagcttacactttccaggctcaagccatcctcccacctcagcttcccaaggagctgggactacaggtttgcaccaccacacccagctaattttttgtgtgttttttatggagagggggtctcaccttgttgcctagcctggtcttgactcctgaggtcaagctatccatctgccagcctcagcctcccaaagtgctgggattacaggtgtgagccactgtgcccagccagaattttacttttactttaaattttttacttttaattatgaaacttttttttttttttaaagagacagggtctcaaccctgttgcccaggccagagtacagtagcatgatcatagctctcgtagctctctgtaactttgaactcttggttcaagtgaccttcctgccttacctcagccccgagtagctagggctatgggtgcgtaccaccaagtccagcttaattacacaactttttatagtacgtaaaaagaatagcttaatgaacttaaatatctccatcaccagcttcagtaattattgccaatcttatttaatctaatacctccatttttgtttctggagcattttaaagcaaactccaaacattacatctcagcacctgtaaatccttcagtgtcagagctaacaaaattaacaacaaagtcttatagtgtctcagcccattttcaaagtctgttgattgtctcaaatatgtctttttatagttggtttatttgaatcaagaaacatacaagttatatattattattatgtctaaaaactttagtggtttttttctaataatagccttattgaggtacaattcacataccataaaggtcaccactttaaagtgtacaattcagtggtggttagtatagtcacaaagctgtgcatccatcaccactctctaatcgaagaatattttcatcaccttttctaaaaagaaactctgtacccattaataaccactctctattcttcctcctcccagccgctggcaaccactagtctattttctgtctctgcagtttttttttgaggggcttcttcaagtatttacatatgtctctctccatagatttgcctattctgggcattttatataaacaaaaataaaatatgtggtcttttgtgtcaggcttctttcacttagtatatgttttcaagggttatccatgttgtagcatgtatcgtaacttcatttctttttatggattaataatattgtatgggcatatcatattttgtctattggttggtggacatttggcttgtttcactttggggcaaattatgaataatactgtgaacattaatgcatacattttgtgtggatatattttttaaataatttcagctcttgttttagattcaggggctacatgcgcaggtttgttacatgggtatactgtgtgatgctgagatttggggtatgatggatcctgtcacccaggtagtgagcatagtacccaacagttagtttttctgcttccctcccaccaccctctagtagtcttcagtgtctattgttggcatttttatgatgtgtggacatgttttcatattgaaaatgttgaattgctgggtcaaataactcatatgtttaattttttggagaattgccagactgccaaagcagctggaccattttacactcctacaagcaaggcacaaaagtttccagttttccacattcttgctaataccatttgcttcaatgaataattattattgttatcctagtgagtgtgaaaaggtatctcatcttgatttgtatttctctaattagcatcttttcatatgctttctggccatttgtctatcttctctgcagaaatgtatatttcaagcctttgcccattcttttttactaggattatttctcttctgttgttaaatcataataattatttatacattctggatattggatctgatttgcaaatattttctgccattctgtgggttgtcttttcactttcttgatgatgtcgtttgaaacacaaatgtttttatttttgatgaagtccaccttacctattttttcttttgttgctaaaccattgcctagcctatggttataaaatatttagacctgtgtttccttctaagagttttatagttttagctcttacactttggtctcagatctattttgagctttttaaaaaattattttgcatttggatatccaattatcctaccaccatttgttgcaaataataatttttgtaattttagtagagatggggtttcaccatgttggccaggctggtcttgaactcctgacctcaagtgatccacccacttaggtctcccaaagtgctgggattacagacgtgagataccgcgcccagcctgatcttttaaaatttcttgcagcaaagttttatagttttccatgtacaagtcttgtacttcttttgttaagtttattggtaaatatttttctggtgctattgtaaatggaattgtttttaaatttctttttcgaattgtttgttgctaatgtatacaaatataattaatttttgtgtattgatcttgtaccttacaaccttgccaaactcattttatgtacatactttgtgtgtgtgtgtgtggattccttaggattttttatatacaagatcatgtcatctgcaaatatagttttacttcttccttttcaaactggatgcctttcatttccttttcttgcctacttgccctggcaagactcgcctatacaatttggttagaagtagcaaaagtgggcatccttgtcttgttcctgatctttgagaaagccttcagtcttttgccatcaagtttgttagctgtgagttttttgtagatgccctttgtcaagctaaggaagttctttctcttcctagtttgttgaatgtttttatcattaatggatattggaacttgtcaagtactttgtctgcttctaatgaaatgaccatgtgatgtctttctttactctgttaatttggtgtattacactgattgagttttgtgtgttggaccgaccttgcattctgtgattaatcccacttggtccagttatataatccttcttatatgtttctggatttggtttaccagtattttgttaaggatttttgtgtctgtattcataaggagtattgatctatagttttcttatgatatctttatctgatttggtctcaaggtaatattagtgtcatagaatgagttcggaagttctctcttctaatttttggaatagtctgtcaaggattggtgtcaattccttaaatgactggtagattttaacaacgagactatctggtcctggcctcctctgtatgctatttttttattattattactaattcaggatctttacttgtaggtctgttcagatttcctatttcttcttatgtcagttttggtagtttgtgtctaagaaattgtccattttgtctagattatctaatatgttgacatacagttgtccgtagtattcccttataatccttgtttctgtaatgtcaatactactgtcccctctttcattcccgattttagtaatttgaatcttctcccttttctactgatcagtctagctaaatgtcagtattgttaatcttgtcaaagagccaactttggattttattgatttttctcagtagttgtttttgctttttaatttatttctgatctaatctttattatttccttcctcctagggctttctacttatatacatgtatgttggttgcccttgatgaagccaactgtgaaatcatggaattataatatgctagctaggagagtgatctaggccagtgcttctcaaactttaatgcacatacagattgcttggggatctagttaaagtgcaaaacctgattcagtggtagtgttgaagtctacagcttcccttgtctaaaagctttcctggttatgccagtgttgatgttctgagaccagagagtagaaaggatctagttcatttggtatcaatcatttgtgggattttccaaacagaacatgtcatttctctggttccaggtatattaatatgtctctccctttgagaatcagtgctgctatatgtcattatgactattatgaatgtgcatggtttccaagggaaaaaactgaacaagcccaaccctctcattttactgatgaggaaattgaagcttcaaaggggtgagatttcttgcctgaagtcatataataggttaattggctccatggatgagtatattaatcctttctgatgacaagtcctaactcagtgaagttcatcattgattatactgttaccaagaaaaggtagcaatgaggacaagtaaatttatggttaatttttttttttttttcgagatggagttttgctgttgtcgcccaggctggatggagtgcaatggcacaatcttggctcactgcagtttctgcctgccgggttcaagtgattctcctgcctcagcctcctgagtagctgggattacaggtgcctggcaccacacccagctaacttttgtacttttagtagagatggggcttccccatgttggccaggctggtctcgaactcctgacctcaggtaatccacctgcctcggcctcccaaagtgctgggattacaggtgtgagccaccaagcctggctggttaatttttttgactaacccctttaacagatttcaatccagagaaaatgttacttaagtaaattttcttattattgagtagaaatatgatacctgagacgccattaagaatagatagatatagttatggatatagatatatagatattctaagggtcctaagactctattataatttttttttttttttgtaaatgaggatagaataaaagttcatgattgtctcatacaaataagtgtcatcaggctaactaaatggtgttttattacaaggtctttttcagtactttcacttctttctttcacaattaaggactcattttctgtccagttttatacgctaaggtctttttagtactttcacttctttctttcacaatcaaggactcattttctgtccagttttatactctaagaacaattattgcaaaagttcaaaatagatttatttaaaattattgttcttcagtcattcccaacatagagtaagcttttctttctatatgtttctgttagtttgttgtttttaatctcatattaaagcttttttttttttctttttttcttgagacgggggtatcactctatctcccaggctggaatgcagtggtgtgatcttggctcactgcaacctccgcttcccgggttgaagcgattctcctgcctcagtctccctagtagctgggattacaggcgcctgccaccatgcccagctaatttttgtatttttagtaaagacgaggtttcactgtgttggctaggctggtctcaaacttttgacctcagatgatcctccctgagccaccgcgtgagccaccagcgtgagccactgcgcccagccaaaagcttttacacatctttgaaaagtcttctgtgtgataaccattttgtttcttatataagataaaagctttaatctgttagataataagaaaattctgaagaataactatgattgtgctacatattaatatcaattattctctgccaagaattgcatataacatacttaatactaatattaaatatatctttcttttccttcaattatttagaaaacatttcaagattttgctgtatgaacattagtcattgcattataagaagataaaatggcaccttggtgacatgatttgttttcagaacaatatgactcactgtcactgttagctatatgacttcagatcacttttatcatcactattaactaaatgagctacatgactctgtaaagtttattaaaatacccttatatggaaattagcagtcttgaagagatacagtgaagaatcacatgctttttgaaagaacattgaggtcgggtacggtggctcatgcctgtaatcccagcactttgggacactgaggcgggcggatcacgaggtcaggagatcaagaccatcctggctaacacagtgaaactccgtatctactaaaaatacaaaaagttagccgggcgtggcagcaggtgcctgtagtcccagctactcaggaggctgaggcaggagaatggcgtgaacctgggaggcggaacttgcagtgagctgagatcacgcctctgcactccatcccgggtgacagagcgagattctgtctcgaaaaaaaaaaaaaggaaaaaaagaacattgatttgagaaccagtcaacataatgtattattttaactatagtcacttccacatgatttctttagtccagtgctcttgctgtattccccaccaatgtgatctgcaccatcgtccatctaatcgccaaaactacaaatagggaagttactctccattctccttgactatgtccagatagtcaagctatgaaatgctaacgttctaccccagaatgtctctccatgctgactccctcttctccatacagccccactgctctagttctaccctttattatttattttcctctgccattgcagtagacccttacttgcccctcagctttgagttcatgcacccttccaatcatcttccaaaaggatgcaagaatggcttctctaaaattcaaatttgtgacatcacatcccacgttaaagtcttcactgactttaaggtgaaatctgtactccttaaacaaggtccttagcagtctgcccttgtctctttctcttgtctcatctctaatacttaaacccctggcattttttcagtgttgtttttcttctgtgtatgttatgttcttccatacttctgtacctttacctaagctattccttccatcctgttcccttcacatctctactgctaccccttccttacgtgactcctttctttttatcctttaagattgaactcaaaagtctcatcctctgaggatttatagaaacacacggggcccctaaaattgaaggaaaaatagggagccaggtcagatacctttctcctatgcatattcccctggtatcctgtatataccattgttggagttcttactgcagtgtagttgcagtacttctcagtcttctccacagaagtgcacccaatgtcagaggaaattgtattatgcttacagcctgcctgaaaccctaaattaatgacatcaattatcttagttttaagaaatgtagaaaactaacatttccatagaataggtttatgtcatttaacaaaaaaaaaatttttttaattagctgggcatggcgacccatgcctgtaatctcattactttgggaggctgaggtgagaggatcacttgatcttaggagtttgggaccagctgggcaacatagggagaccctgtctctacaaaaaataaaaaaaaaattagccgggcatggttgcacacacctgtttattatcccaggtactcaggaggctgagatgggagaatcacttgagcctgggagattgggactacagtgagttgtgatcgtgccactgcactccagcctgggtgatagagcaagatcctgcctcaaaaatcaaaacaaaacaaatggaacatttaaaattatttgttctgggccgggcgcggtggttcatgcctgtaatcccagcactttgggaggccgaggcaggtggatcacctgaggtcaggagtttgagaccagcctgaccaatatggtgagaccctgtctctactaaaaatacaaaactagccgcacgtggtggcacatgcctgtaatcccagatacttgggaggctgagacaggaaaatcacttgaacccaggaagacgaggttgcagtgagccaagatcgcgccattgcactccagcctgggcaacaagagtgaaactccatctgaaaaattaaaaaattaaaataaaataaaatatttgtcctggaataaaattgatctttgttaaatatgattatgtttatcctgaaatttcaggtgtttgctgtacactgccctatttgttctctataagtttgtattaaccaactgcgataaatagtaagcactttgatggcagggactaagtctattattacctctgtatttctagcattaaaacaatatctaacacatagtagatgttcaatatgtattgaaaaaaataattgcatgaaagttctctattggaatgatagtgttaaatgccagtgttgtgaacattttaaaattttaaatcatttttctcataggaaaagcttgactgatgatatcatgaaagtcatgcatgttttaaaatggctttctggcttatacaatataacagaatctttttttactttatatagttaaaagtacaaaatacacagaaaagaatcctatattataagtattcagctcagtacaatgttacacacacaacatgcttgcataataaacacccataccaacaaacagaaattcacctgccctcagaagcccctccatactctgtcaggtcattgcagccctttttaacaggataggttagttttgcaaaatcattttacacttgaatagtatttaagacaagtaatgttgaatagaaaatattctgtgacaaatcaggttaatgatttaatattcattattagcagccaacattatttgtaggccaggtgtagtggcttatacctttaatcccagcacttcgggaggccaacatgggaggatggcttgaggccaggagttcaagaccagtttgagcaacatagcaagactaaatagccatacttttgtatactattcagcacaaaaatgttaataataagaattaaataatactcattttagcttttgtgttcatttacaatgagcaatatattctttttaaaatttttgatgtgtaataattatacatatttagggatacagactgacattttggctcatgtatacaatgtaatgatcaaatcagggtaattagcatatctcttgcctcaaacacttatttattaattttgggaatattcaaaatcctctcttctagctatttgaaaatataaaaaaaaaaaaattattgccaggcgtggtggctcacacctgtaatcccagcacttgtgggaggccgaggcaggtagatcacgaggtcaggagatcaagaccatcctggttaacacagtggaaccccatctctactaaaaatacaaaaaattagcccagcgtggtgtgggtgcctgtagtcccagctactcgggaggccgaggcaggagaatgacatgaacccgggaggcggagcttgcagtgagccgagatcgtgccactgcactccagcctgggcgacagcaagactctgtctcaaaaaaaaaaaagaaaattattgactatagtcaccatacaatgctacagaacactagaacttactcatcttatctagttgtagctttgcatctgttaaccaacctctccctatcttcccctcctccatactcttttcattttctaataatcacaattctactctctacttctatgagctcaacttttttagcttccacatatgagtgagaacatgtggtatttatctttctgtcccagacttatttcacttaacataatgtcctttaggctcatccatgttgccatgaatcataggatttcattctttttatggctgaatttgtgtgtgtgtgtgtatgtgtgtgtgtgtgtgtgtgtgtgtgtgtataccacatttctttattcatgttgatgacacttaggttgatttcatatcttggttattgtgaatagtgctgaattaaacatgggaatgcagctatctctttgttatatcgatttcctttcctttggataaatatctggtagtgggattgctgaatcatatggtagttctacttttagttttttgaggaacctccgtacagttttccataaaggctatactaattgacattcccaccaacagtgtataagaattcccttttttctgcatccacaccagcattttttattttttgtcttgttagtaatagccattctgagtgaattgttacttttaagctcttatctctaacaatcaaattactataacagatttttgtttcactttcatttgtttagattagtagttctcaatgtggaaggacctgatttaatctcccaaagaatatttggcagtgtctggagacatttttggttgtcttaacccaccaaaaacagttgtcagtgctactgacatctagtgttacccactactgggttgctgtgaaaattagttttcagaacagagccccataaaaatgaattatctagcttaaaatgtcaacagtgccaaggttgagagtagtgttttttaaagaatgggtaggttgtttatgtttgatggaagttagtttaaatagattgtagcaccttactaatggagtccatgatatcagaaatttaattcccatagacgctagttaacctgtctgtagttcatgcactccagacctcagccagatgtcttaaacatttctgctgcagattataagaagaacaagatgagaaaatgtagatgggttggtataaatctatcactacttctggaaaaatgtctcaatatgatattttttacttaacccaagtctatctctcaccacatgactagttctcactacgttggaatcagcttgtaaactttgactagcagcattgtttaatcttgttataagttcctgaattaatggtctacaggcttgaggcagagtgaatgcctcaaagttatgggcaggcagttatctagtaccaaccatagtctcctgccatctattgggaggtgtcaggtgggaaggctagtagccctctacacatattcatacccacaccccagctctattttttttttttgagtaattataggaggtcagaaacactagaatgtacatacatgctggtaataaatggaaattaatatctgatagttttcttcatggctgtctttcagggcatagttttccatgtattttgctgtcctcttgtgagaatactacccttgacaagttgatctacatttaagctatggccacatttaaactatggccctaaaacatttgttgttatgcaagaaagaattaatggtgatatataccaattctgactctcacataaagtgtttctccaaaagtaacctcagacaacataacaacaaaccaagatttatatagttggaattgcaaatccgtaagtccttaaacttaatgagaagattaatttggaatttgaccatttgactctgctcatttaactttgaaagcagatataaataaaaaccttgtatgaagaaaattgcttgggataatttgcattaaacagtctgttttttgctaagtggcttatttgtattatggaagcatagccttattagtatttttagtcttcctaagaagaaatggaatacatcatagagctctaggccttctttagttttcagtacaaatttggtatatttggtgtttgggaggatatacatggcataaggtaaagagagcattagctttcacgtcagatccaggtccagattctgccacttataaactgttacaccttggaccacctagctattatgggcctgctttagcaccggaaagaagggagaatacctaaatatgatgagagaataagtaggtaaaataatcatgtaaaagaatggtcaggaggagtctggcctctggctctgtcatttattattgtctgtgcccatgggccggctgcaactatttgattgacctaaaatgggatggtgacttgcccgaggtcatacagtgagtcagggcagagcagctgaagctttactctctaagtctcattttccttccctgtaaaattgttgtattggtgactgtctcacagcatgttgtaaggagagatggagatcataattgtaagaggtagcccacagtgctggcacagtgtaagcaccaataaatgaaggtaatgagtacaataaaatgtgtcacttagcccctttccccaaatagtttatccatctggttgatgagagccatacactgtatgctaagacttaaaaatgtgggagttgattaagttctagtactgcattatactaataatgctagtgcatagtttaaagaataataaaataccataatgcaaagtttgtttaagccctttaccctttttttcctacattggggctttatttttagagcacttcacaaattatgcagagaaaagaggggtaggcaagaatggaagcagagagagcagtgtgaaggtagtacagtagggagttatgacagatgcttaggttagggtgatagcagaggtggtggtgagactattaaaagactactcagccaggcatggtggctcacgcgtattatcccaacactctgggaggtcgaagtgggaatatcgcttcagctcaagagctcaagaccagcctgggcaacaaagtgagaccatgtctctacagaaaatacaaaaattagccagtgtgatggcgtgcgcctatagttccagctacttgggaggcagagacagaagggttacttgagcccagaaggttgaggctacagtgagctatgatcatgccactgcattccagtttgggcaacagagcaagaccctgtctcaaagaaaaaaagaaagaaaagactactcaaggcttgagatttgataaaatagttcattttactgcttcattgaggatattcttaaaggaaactggcattttttttcacagtgagtacatggtggagaagaatacaactaatactgaattttaaaatgtgctatttctagtaaccagccttcatcttcttcccctttggctgcagatcctaattatctcatggctaatgaacgcatgaacctcatgaacatggccaagctgagtatcaagggcttgattgaatcagctctgaacctggggaggactcttgactctgactatgcacctctccagcaattctttgtggtgatggagcactgtctgaaacatggcttgaaaggtaggccatcaccccaaaatgcaaatatgcatgcagctgttttctagcaatgcatactatagaagaaagcattctttgtggagccaaagaataagaggcttgaattaataatattaatccattggaatgcagtcttttataggagcagggttatggttgactcaatggacttatagggctttaaaaatacagatcattaaatgttacagttggaggggccattataagtaatcaagtacagtacagtagttctgtttgacaggtggaaataggcctgcccagaatgagacatgacttggtcaaggtcacacattgagttgtggcagagtaggtgctagaactcaggtctcccgactcttgggtcagtgttctttccacttaactataagcttttgagggcagtaactggtcttgttcacccttgtttcctttcttcttgccttctcaatattcttttcttgttgttttttgtttgattgttttttttaaatctgtatgcctatgcttaccaacttcccaatattccatagcctatttctggattacatattcttttctattgagctgttttcttcattaataccacacaattttaggcactaaattgttaaaatgttttattatattatagggctaggccacaaactgtttgtgaaagaagaagggctgagtcttgggaagtagagaatttttttattttcacaaaatattatctattctaaaagcatgaatgaatccaaaaccatcttataacctaggattggtttcctgaaaagttgtgtgtgtatgtgtgtgtgtattgagagtgcgcttatgttgtaaagaatattaaaatactgctttatttttgttgccttagctaaaaaaacttttctcggacaaaataaatccttctgggggcctctagaactggtagaaaagcttgttccagaagccgcagagataacagcaagtgttaaagatcttccaggacttaagtaagtctaaggttgaattccatttctcaggaacagcattcttattaactatcccttgaagagcaagactaaagacaattatgtacgaataatttattttataacaatccaaaatgcatgatgtcatgaataggtgctgacaggagagaattggtatacagaatattgagaaaaatgtgctcttgagggataattattcatctaagagagattgtctttttgttgaaatgccaaacatttgcttattttttaaagcacttgggagaatcatatctaagggggtggcatgctgtacttgacttagggaaaaaaggtattcagtgggtttgagagtcaagattaaaacagctgtcaaattaacctgaagagctagtgactgtagcctgccttagaactataaagtagtgaccaccttcccaaatgagactggtttaattttaatcagacagaggcctagattgcctgtgtccacattcatgctttggacatttatataatccacactgaatttataaggatttgctattattgatctgatggaacatttttagttgggtctcccagaggctgtgtcttcaaattgtagttacattcagtaattctttttgaaagcatttgttccgggtcacattagcccacacacaaaaattccttgcatgggaatgtactgggagaggtcctgaggagcacctcagtgtgcttgttacactggaataccattagcaagaataagtgaactgattctactgtagcctttgcttctggtgcttatgttttcagttgtttgatttctgtgtttttgtaggacaccagtaggtagaggaagagcctggcttcgtttggcattaatgcaaaagaaactttcagaatatatgaaagctttgatcaataagaaagaacttctcaggtatgaacaccttcttgaactttcttctttccttggtatgttctacatcgtataaagtcaaaccatataagttcactatttttgtagatcagaaacatttgattcataacagcttcactgatactttctctcatacctcacacacatatcctcccaaatggatgatttatgttatgtgtgttctgtctgtcactgtggcatatattggtcctttccaaggcaggccaagacttacctctagaaaacagaaggcaccttagcatgtgcccaggctcaataagacaagaacttgacatgtagcattaaattcaaatatagcacaaaattggacgggtgcagtggttcacgcctgtaatcccagcatttcgggaggccaaggtgggcagaccacttgaggccaggagtctgagaccagcctggtcaatatgtcgaaaccctatctctactaaaaaaatataaaaattagccgggcgtggcggtggacacctgtaatcccagctacttgggcggctgaggcacgagaatcgcttggacctgggaagtagaagctgcagtgatccgagagcgtgccaccactcttcagcccgggcgacagagtgagactctgtctcaaaaaaaaaaaaaaaaaatgtgtatatatatatatatatttgtaaaatcacaaaatcttccagtagatcatagatacaactgggagaggcaaaacaacattattttatccgtctttattatatgattccattgtataaaggtcaaaactaggtaaaatcaatctatggtgatagaaatcaggataatagttaccttgaagaggtgggggtagagattggaagagagaaagaatccgatttctaggatttcagtactgttctctttcctgatcatgatagtgattacacagatagatgtgttttttgtgaaagttcatggaactaacagttagctgagatttggaaatgtgtgaatgttggaattcagccatattccacttctgaacagttcataaggttaggcttttgggacaataaactgtcaaagaaccttgttcattccagttctactcagtttccttcagaggctatcaaagaacaaaaatagcatgtgatcagtttttgagagaaacagtaaatttgcagctcattcacttgctgtttttgtgctattttgtcatttgttaatatcttttttttttttttttgagacagagtctcactctgtcaccaggctgtaggctgtagtgcagtggcgctatctccactcactgccacctccgcctcccgggttcaagcgattctcctgccacagcctcctgagtagctgggactacaggcgcacaccaccacacccagctaatttttgtatttttagtagagacggggtttcaccgtgttggccaggatggtctcgatctcttgatctcgtgatccacccaccttggcctcccaaagtgctgggattacaggcgtgagcccagcctattaatatcttttatagtgaatcagaaaagaaataaggaactaatatcagtgaattatattgattgttaacagtgattgaggttgacctttacccccaggtaacttgttgaaaacaaattgattgcagtgttgttttaatcatgatgtcaaattgactgaaaatgaataattcaggtcactgggttttcgtgttttgttttgttttgctttaagagactcgcgctctgtcacccaggttggagtgcagtggtgcaatcacggctcactgcagcttccacctcccaggttcaatcgattctcctgcctcagcctcccgagtagatgggactataggcatgcaccaccacacctggctaatttttgtatttttagtacagacagggtttcaccacgttggccaggctggtcttcaactcctgacctcaagtgatccacctgcctcagcctcccaaagtgtggggtttacaggcgtgagccaccgcacccgcctgtttccatttttttaaaaaatctaaaagactattttttagagtggttttaaatttatagcaatattgagtagaaggtacagatatttttcatacatacccttcccccctgtacaacctccctcattatcaacatcccacaggagtggtacatttgttacaattgatgaacctacattgacacatcattatctcccaaagttcatagttcacattaaggtttactcttggtattgtatgttttatggattttgacagatgtataatgatatgtatccatatgtcattatagtaccatacaaaatagtttcatggccctaaaaaatcctctgtgctccacctattcatctctctgtcctccaacccctaataaccactgatcgtactgtgattgtactgttgttaccaggggtttactgtctctgtggtttttccttttccagaatgtcatgtagtgggaatcatagagtatatggccttttcagactggcacctttcacttagtaatatgcatttaagtttcctctgtggcttgatagctccctttttttttgttctttgagacagagtttcactcttgttgcccaggctggagtgcagtggcacgatctcagctcaccgcaatctccgcctcccaggttcaagtgattgtcctgcctcagcctcctgagtagctgggattacaggcgtgtgccaccatgcccggctaattttgtattttttttttttttttttttttttttttttagtagagacagggtttctacatgttggtcaggctggtctcgaacttccgacctcaggtgatccacccgccttgacctcccaaagtgctgggattgcaggcgtgagccactgcgcctggcgatagctccctttttttagtgctaagtcatatgccattgtccattcatttactgaaggacatcttggttgctcccaaattttggcaattaagagtaaaactgctataaacacatgtatgcaggtttttgtgtggacgtaagtttttaactcagttgggtaaataccaaggaatgcaatagttagatcatatgaattacatcactggtttttttgtgtgtgtattagtaatttaggtgcattataagcagtatttaattatctatgggtcttcacgaatttttttttttgagacagagtgttgctctgtcacccaggctggagtgcagtggcacaatctcagctcactgcaacctccgcctcctgtgttcaagcgattctcctgcctcagcctcctgagtagctgggattacaggtgtgcaccaccacacccagctaatttttgtatttttagtagagatggggtttcaccatgttggccaggctggtcttgaactcctgacctcaagtgatccacccgcctcggcctcccaaagtgctgggattacaagcgtgagccaccgtgcccagccaataatttttatccattcagatttttttttgtttttagtagagatggggtcttactatgttgctcactctggtctcaaagtcctgggctcaagcagtcctcccgccttggtctccccaagtgctgggattacaggtgcgaaccaccatgccgagctaccaaacaaatgttttaagatgcataaaagattgcaaaattatctgatggtgcatcacaagtacaaatatgtcagaaaagtctgaatacctgcttcaaccacaatactgttcagtcacgtctttctgccagcctattatttaaagaatctattcatgcgcctattatttttttcttttaaaaaattttttctccagtgccacttgccaacatccacctattattctaaaagtaaaatatttactaaagcctttctttttgtagttttttttttactatttttgtagatggctataatcaaccatgatgactatgattcaaccatgaatcaaccatttttgtccttgtctctggatttttgagatttttgttacaataaggaattctgtggatttctcttacagtgaattctacgaacccaatgccctcatgatggaagaagaaggagccataattgctggtctgttggtgggtctgaatgtcattgatgccaatttctgtatgaaaggagaagacttggactctcaggtatgggaaagagactcattcccatgggtgtcactctgagttctgctatctcagaagtggatttgattaggttataccaaccaaattaggccatattctatgagtcataaacaggatttccttccattttgatgggaatataaaaaaaagattgtttttccttccagtttggctcatttatacgttacgaatgttttttagattcttgtcttggctgtactctctgttaaacatacatatacacacacacacatacacatttacatacacatacatacacacacaaacacaggtatacccagagatattgcaggtttggtttcagatcacaacaataaagcaaatatcataataaagcaagtcacatgcattttttggtttcccagtacatgtaaaagtttgtttatactaggccaggtgcgattgttcacacctgtaatccctgcactttggggcaggagtatcacttgaacccagaagtttgagaccagcctgggcaacatagtgagaccccgtctctacaaaaaataaaaaattagctggttgtgtagctacttgggaggctgaggcaggaggatcacttaagcttgggaagtcgaggctatagttagccataattgtgcattccagcctgggtgacagtgagaccctgtctcaaaataaaactctaaaaaaaattttttaaataaaaagtttgtttgcattatactgtagtctattaagtatgtgatagtgtaagtgtaaaaaataatgtacataccttaacttaaaaatactttattgctaaaaaaatgctaacaatcacctgagccttcagtgagttgtaatctttttgctggtagagggtcttacctcagtgttaatggctgctgactgatcttggcagttgctgaaagttgaggtggctgtggcaatttcttaaaataagacaacaatgaagtttaccacattaattggcttcctttacaaaagatttctctgtagcataccacgctgtttgacagcattttacccacagtagaatttctttcaaaattggagtcagtcctctcaaatcttgctgctgctttatcaactaagtttatgtaatactctagtaaaccatgctgtaaacagatgtgctgtctttgttgtaccctttatttttgttttgtttttgtttttgttttttgttttttagagacagagtcttaatgtgtctcccaggctggaatgcagtggcaccatctcagctcactgcaacctccgcctcctgggctcaagcaatcctcatgcctcatcctcctgagtagctggactacaggcatgcaccaccacacctagctaatttttttatttatagtagagatggggttttgccatattgcccaggctgatctcaaactcatggcctcaagtgatctgcctgccttggcttcccaaagtgctgggattacaggcatgaaccaccatgcccagcccactattccatttataaagcataggcagagtagatttagcatcattcttaagggccctaggattttcagaatggtaaatgagcactggcttcaacttagagtcaccagctgtattagcctctaacaagagagtcagtctgtcctttgcagctttgaagccaggcattgacttctcatctatagctatgaaagtcctagatggcattgtctaatagaaggctgttttgactacagtgaaaatctgttgttgagtgtatccaccttcatcaattatcttaattagatcttctggataacttgctacagcttctattatttacatcagtgcttgctgcttcaacttgtacttttatgttatggagacactttccttaaacctcgtaaaccagtggctgctaacttcaggcttttcctctgcagcttttttacctctcaatctccatagaattcaagagcattagggccttgctctgaattaggtgttggcttaagggaatgttgtggctggtttgatcttctatacagaccactcaaactttattcctgtcagcaataaggctgttttgctttcttgtcattcatttgttcatgagtagcacttaattcccttcaagcacttctcctttgctttcacaacctggctgtttggcccaaaaagcctaccttttggcctgtcttctctttcgacatgccttcttcactgagcttaattttttctggcttttgatttaaaataagaaatgtgcaattcttcctttcacttgaacacttagtggccattgcagggttattaattggcctaatttcagtattgttgtgtcttagggaatagggaggccaaggagaagggagagagatgggggaacggccagtaagtagagcagtgagaacatacacatttatggattgcttgccatcttatatgggcgtagttcatggagccccaaaataattttgatagtaacatcaaagatcactgattacaggttatcatagcagatgtaataataaagaaaaagtttaaagtactgtgagagttaccaaaatgtgaaaccgagacatgaagcgagcacatgctgttggaaaaatggcactaatatacttgcatgacgcagggttgccacaaaccttcaatttgtaaaaaatgcaatatctgtgaagcaaagtgcaataaaatgaggtatgtgtgtgtgtgcgtgtgtgtgtatactaaaatatatgcagttgactcttgaacaacagagtaaggcattccacatggtagaaacatcccacatagaaaattcacctaaaacttttcattccctaaaaacgttaagtactaatagcatacgattaaccagaggccttactagtaacataaacagtcaattaacacatattttgtatattataaatagttatatttatatttattttattttatttttgagacaaagtctcactgtcatccaggccggagtgccgtggagtgaactcagctcagtgcaacctctgcctcccaggcttaattgatccttccacttcagccttcagagtagctgggactataggaacatgctaccacacccagctaatttttttgttttgtggagacagagtttcgctatgttgcctaagctggtcttgaactcctgagctcaagtgatcctcctgcctcggcctcccaaagtgctgggattacaggcatgagccatggcgcctggcctattgtatatttcatatgctgtattcttacaataaagtaagctagagacaagaaaatattataggaaaattataaagatgagaaaatatatttactattcatttaaatgaatggattatcataaaggaaccagatcatcataaaggtcttcacactaaccagattgatgaggaggaggaggaagaggaggcggttggtcttgctgtctcaggagtggcagagatggaggaaaaccttttttttttctgcctggatgacagagtgagactttgtctcagaaataaaataatataatataaatatatattttatattgtgtatatatatagtatataggtggactcgcacaattcaaagtcgtgttgttcaagaatcaactgtacagttgtccttcagtgtccaaaggagattatttccagcacctccatgaataccaacactcacaatgctcaagcccttacagtcagccctctgcgtccttggattttaggacttgctgagaatgagagcgaactgtactaaaggccattaaagcacggtagttaagagtaaaggctctgaagctaactgcctaggtttggattctggcttcctcattttctagctgaatatattttataattacttagtttcttgttgtttcagatttcttgatgtaatgcagttagaacagggcctagtacacattaattgcccaataaataatgttttcactttaattacttctcaccctttctgtatgaaatactatgacaaacttctgttatgttttattctggtaaaataggaagggaagtaagattttttggtgtggattttttttttatttttttatttttattttttttgagacggagttttgctcttgttgcccaggctggagtgcaatggtgagatcctggcttaccgcaacctccacctcctggattcaagcaattctcctgcctcagcctcccgagtagctgggattacaggcatgtgccaccacacccagctaatttttgtatttttagtagagacagggtttctccatgttgttcagtctggtctcgaactcctgacctcaggtgatccacccgcttcggcctcccaaagtgctgggattataggcaagagccactgcgcccggcctttggtgtggatttttaaaaagaaataagctaaataataaaatggcaatcttgaaaaatgaagacgtgtacatcaatgaaagtttggaggaacagacaccaaaatattagcaatggtcatcttcagtggttgggattatgagtgtttaatattacttccccttttttttagctgtattttctgaaacttctacaggggaaatgtgctaatttttaaaaagttatttctaaaaatgaacagggattcagtagcagaatacccgaaataagcaaaagagaaagaaactttagaccttatttatattaagtattctgttgactgtgttagttgtgatctagtcttctagtcttattgacataatcttgattctttacttccaactcttgttaattcttgattaaactgaaagtaaaacagtacatttttaatcgtaaatttctagtaagtgtcatgactgtattactgttttgagtgcctagaaggagacattgtgttatgccttgtaaagaatatctaattttatattaaaacctgaaaattctctctgtaggttggagttatagatttttcaatgtatctcaaggacgggaacagcagtaaaggtactgaagggtacgtacaaagaaaattagatttcttttctcctgatgtagcattttttttcctttggtggtacttaaagtttacaacaatactgttttaacagacgtgctgaaagaatttctgatcatatagctttaataaagtcttgccagaaatatctgactattacgcctacctctaaaccctaaaaggatttttttgtttgtttgtttaatgattttcctgctatgtggttcaggggcaaagaaaatacaaattttctaaaggattccaattctccatgtcttatagtagggtttaaaaacatggtcattttgaccagaggagtcgcattctcagtttgcttaaaattggcaatatgaaatatgcactgtgaggttatgtaaaatattgacattaggggaaactgattgaaggtacatgggaactctgtgctgcgtttatacctcttcttgtatatctaaaattgtgttaaacacttttaaaatattcattatggtacttagtaattagagatcagaagcacatctattctttttataaatttagccattgaaagcataattagtctgatttttaatttttgacattgagctaagattatctcactgttcttttagtaattgtataggtttggggccttaattttatcttacagctgaaaaatctggctgtttatcttttgtctactacagattagttggttgtagacgtgaaccttctttatccacagtttaatttttcatgtaataataaacatttgggccgggcatggtggctcatgcttgtaatcccagcactttgggaggccgaggcaggcagatgacctgaggtcaggagtttgagaccagcctggccaacatggtgaaaccccatctctacaataatacaaaaaaaaaaaaatagccaggcattatggcgggtgcctgtaatcccagctacttgggaggctgaggccggagaattgcttgaacccgggaggtggaggttgcagtgagccgaaatcacaccattgcactccggcctgggtgacaaagcaggactctgcctcaaaaaaaaaaaaaaaaaaaaaaaaaaaaaaatatatatatatatatatatatatataaaataaacattcaatcttcgtgaaaccctttttaaccattcactttaaatgttaaatagcacttacagacaaatatttagcccttgagaacagctatattacatcagagtgagcttaattcaagtcctatgacaattggaaagttgttactataaatactactagtgaagctgaaaaacctattaacaagaaaatttttatcctttaaatgcgtctaatagattgcaacatcatacctgtgacctaaattattaatactgaggtttgtaagctataacaagagctttattagtgaggggttttgtcatttttaaactcctgactctttcttgttgctatgtcaagagggttttacatcaaatctgtcttatggttcagtgtatctgtgccacaatttttttctcatgttttatgaaaagatggggtggggtggggttgggatcttggtatttcttatgttatttattttatttctattttcttccccttcccccagagacggtcagattactgcaattctggaccagaagaacta

SEQ ID NO: 15799 - DNA, 33752 bp, Homo sapiens
gagcgcccctgagccttcccatggcccgggctggggcccgggccctcggctgctgacgcgcccgaagcccgcggaaccggttaagccgcggccgcggcgccgatcccggctgaggcgcagcggcgagaggtcgcgggcagggccatggccccggggggccgctagcgcggaccggcccaacgggagccgctccgtgccgccgccgccgcccgggcgcccaggccccgccgctgcggaagaggtgagtgcagcgggaaccgggagggagcgggcaggcggccgggccaccccgcgacccctctgggacccgcggcactgcaactccgcagaagtgtccggggagcgggtctcgtcgagccggggggctgcccgcggacataggggcaacaaggctggggtgggattcttacctgtcctggaggcccggaccccttacctacggggcggcgtatggatgtgtggatgatgtggcctgcggggtcacccatgtgcaaagcaactttttcctgcaaggttctgggtgggtgctctcatacacccccaccttcacgcttctggagcgggagttccgatcccccttctgcctcagctctctctcccattaacgcccgaggcagcgctcttccccgtagatgcgcttgccctacctcagtgtctctacttgaggactggccagcccgaagggaagcggtatactggcagtccccacgtggggggtctcccacatcagcagagtgggaggacctccagtcctgaggcatttctcccagcattgtgccagccccttgacccccagctgccaccttgggtttgcttttacagcagagtcctgcctggattaggggcacggctgtatgtagtgtgtaggtgagcttggagagcctgcggtcaatccctagtttgaaccaggggtcccagtggtgaagtgggcaggggacagcgggggcttggcggggttgcccccagcagatgggacaggagggtatcaaagttggcctaggaatgaggcagtgctggcgggagttggctggagctggggctgggggccccactggataaataactcctaatttttgagatagctgtgttttgccaccagaacattactgcttgggagaggtaagggagacgccaaccaaagacaccagtatgtccaccctgaagctgggccaggttggggacctctgtcctcctgaattcacccagatagtctcccagtagttatcctagttgcagagaagggaaaactgcacccaggggttgggagccccatctcagcccagggagttggatggagctgaggcctcttcccaggctacccaaggggtgtgccaggaccccgtagggtatagtgtctaggcaggcggggggcacaggcatgcctactcctgctgctcccccttcagctccgaaggagccaggcccggaagtggggaggtgggggccggagagaaagcaggggccagagagaaggcggcagcccacccagcctcagcccctcgctgctcagcataccttggggggaggatggagccaggctcaggtgaccttgactgggaaaccctggccacaaaaggggggtttcagtcccagctatgctggggtggctctgcttcctggtccttgaggtgttgggggatggggaagctgaggagccaagaaggagacagagctcttgttgaagtgggggagggaatctgaggggctgggtagcgggtggggtgctgttgataatctccccatgttcccctacggcccctgttcctgcctcccttccatccaggcagtcctcagctcggaggagccaacctcccttcctggagacaggctgtccacccccacccccaactccaagcctgggcggtctggatccggctgtacagtttggccacctggccccctgtcccatcccaggtgcctccggactccttcctctggccgcctcttccctgcaccccttgccagccccggctcctcgtttctttgttcaagcgtctctcctccgtccctccctctctcctccctctctcctcctccctcccgcctgcctccctcccttgctccctcccaccagccttccttccctccttctctgctttcttcctggtgggctcccaggtggcggtggctgttcttcctctgtccactgacctgggcttggtgtgacttgggggcttttctggggctggggctgggtgacaggcatctcgggactggcagaggggaaggcactgtgggtttgccctttctttccctctctgtccttcttctccttttcttccttccctctccttctttcccccacctgccaggctgtccaagaggggacctggacttgagactgaggccccagcaaacttgagcccctccccattcacctctttaaaaggccaaagcatttggatgggaagtccctgtagggacccagtagaaagactccccacctctctggacacattgggtgactccaaccctgtccttggtgacactgactttgtcaccatgaacatggatgaaggaaaaaatgaggtcatggggaggggggaggcgggaggcaggttgacaggagcccccgttacatagtatcgaagctctctgagggactcagacggcatcttgcgccaggacagtatctcccagctcccctgagccccaccccactagcaggtcaagttcttgagcaaactcatgcttgtaaggacgtgtgtgggcctgcaagtgtgaacgtgtgcatatccacagctgttatcaggggcctcccaggtgcaccttgagggtgacggtggctgcacagccatttctcccacctgcccccacttctcagagcctgccattcagtcagcactagctttgtgcctcccagacctgaggaggggctggttctgattcccccatcccccagctagcctccccaggaggcagcatctatgacaggggatctggaaggaccatgagcggtgtgccaggccctcgggagagaacattcacacagagggtaccgcgtaaggagtgggccaagaggctgaagctgcacttcctgtctgaggagccatgagtggtttgccttggcaggagaggccagggctgggggaggtgggtctagggatgtcatcagggtctaatgagtggggcctaagagtcagactggagcctgggctttgcctcagcattgagcagctatggcaggggagtcccaggccatagtactgccaactcccatcccagcatcctagagatgggcctggggtcctgcctgccacggaagaagggagtacacagggcagatctgggggatggggctcacattttcagtctcgatgcccccacccgcagtgcatccggttgggggtggtggtaggagttggcgctggtttgtgccgggagggagcaatatgttctgacaactggtgctgggctgcgtttacccaacagccagcctgcctggggagacaatatttgaaaaacacagtattgaaacttggacctgctggggctatgggggattctgaaggtggcaatgccgctggcccagatccagccccaggcccactggccatcctagcttcccttctttgccctctagaggcggagctggaagttttccctggcaggaagtccttctgcctgtctgacctgggtctctcctgctttgattttagtacaagtggactctgccattctctgcctttccttttctgactggtgctccctctcttccatcttgggctgtctgcatgtgtctcattcccccactctctcctgtgcctcccctctaccgtaataatcaggtccaggtttctctgtactgggagaagacctgtggctggagcaggcagggatgcaccctatctgttccccattcctccaggtgggagggagaaggagtaacccactttattggccacagatgcaggggagaaaggagaaagcatgctgggagctggaaagagccctaagatcacctggttggtctgggccctgtgaatggaattcagcatgccatgaggggtagggtttgagtctccagcagcccccatcagttctggtgaccccaggctggggcctattggtactatctccccagacaaaggcaggccaaagaacgcacatgaggtgtgcacacaggggcattcatggccccaggctgggggtggaagcgtggaggtacccatcaacctctttgttcaccttgggtagaaattgaactcccccatctgcctcacacattccaatcttggttccccttcccaggtttctagagagtggagcctgcttcctgggccctaggcccctcccacaatgcttgtcgccggtcttcttctctgggcttccctactgaccggggcctggccatccttccccacccaggaccacctcccggccacgccccgggtccggctctcattcaaaggtaagaagctgttttgttcttccccagaaatcatcctctctttacaatagcgctcggctcctctgcacacgagagaaagggtgggtcaggacaaaaccaggacaaattgtacagccacataggttgtgggggagaagggagaccggggaggtggtggcttgctgggaaaggctggagaactgacccatttagacacttagcaaaagagtccagagtctgggcatcttccagagtcagactgtgggttcctgggctgggtggcctgaggtctgtagggcatgtctttctgtatgataattggagaggtggcaatgtcactccttccaaacttatgtctgctgcggcccctccttgccactgctatgcatctggtcctgccctgagcagcccctggggtggaaggtcaggcagttgggcagacactggaacctctggacactggaagagcaggacctgctctcttggggtgtgggtgctcgaggagccttcctatggtctccaagtgggaagggttcctagaatccaggaggggactgttggctgtgactggcagggaggccgccggtgggttcaggcagagcacgtgctgctgtgagggcctgagctcctgagctccagtgagcactttgatgagaagtcactgggaggtttcagtgatgggctggggtctgcagagtgagaggctggtcgcccgctccatcaccattgcacttaacccactggacaggtgcacgcacacggtacacacatgggtgtacaaatggctcactcgagagccacttcctcaagggtgtgtgtggtctgaagagtctcccctgggcccagggtgaggggcagtggccatgctggggcctgggggacctggggtcattgggagttctcagccttggccctcctctggccagaggtaacttcatccagccgcctgccctgggtggggtcgactcagccctggctggccagatttccgggcagccatactggggtgaaaggctggggtgacctttccttcctcgggcttggcggaggcccagccctcacctcaccatgtcccccagcagggcccctcccctggcctcgtcccaccctgccccttgatgggaggagtaggggagtaagctgcttatcatcactcttcccagtcacccggctcctggaatttctgaggctgtgcctggaaggagtcccctgcagggcctgagaaatgggctgagaagagttaatttgtttgggctggaaagcaccccccttccccgggccccaggaaggtgagatatttattctgctgatacctccacccttccctggtggaattcttcagagcagattaataaatcttgaaggggccagttcccccaaacccctccccagcccagggtctggcagcgagagtagagtgtctcctcccccgatagtggaagggaggggtggcttggtctccacacccctgggaccttgcgtccgctctgggtgttgtttttgtcatcatgcatgcaagtaagcaggaggggcaaaacagagaggggtcttccgtgtgctccttctaagcctccctggacctccaggggcaaagagttttgttcctgttttccagagagagaaactgaggctcaggcaagggcagggtcaaggtcaggcaagaggcagaggcaaagccagaaatagaaccctggtgtcctggccttgccggcgcccacatcgcgtcaggtcgattccctctcaattagctctgaagccgacacccgcagtgactaaaagctgagctcactggcagccagcctgggtgttgccggttgtggcggcctggggtggggctgcagcgcacctggggccacccatcccagggctcctgtgcctttgcacaggcaggttcccctgccctgaatgaccttccctgttccgacctggtctcgtgtcctaattttgtgcttagacttcacttactactgtatgacaggccccgtgctgagtgctggggactctgtggtgaacaagatagggtgctcacagtcaagctggtggaaaaagcaatggatatccagttggtcagggccatctgggagcccagcacctgctgtgtaccaggccctgtgtatccccctacactgggtggtctcagcctggttatgcacacatgaagtggccctcagtgaggagcaggcgcccaccaagtgtgtgtggagtgagaatggagaccaacacttcaagaaactgggctcccaccatcttcctcccagagtacacgtgggtggcacagagaaggttactctcagaagcactgctggtcactgtggctccatgtcatagttttttcatctgtgccttggatggacacagcagttgacaccccaggcctcaggggctcaggctgggcactccctgccctgccctgccctgggtcctgctgtagtggggaggtgccggttcctgcctgggtagggctggaccctccaagctagaggtgctggcataaggggccacactgcccagggtagataaaggaacaaaggcaggaactgggccaggcttgggtttgctgcccgcccatccgcctgggcaccccagccaggtctagagccagaagggtgtgagggtcaagcagcccagggttccctcagattaggggggctcctatggcccagcttctgggcttcagcagcacagccaaaatcaggcagaagtgagggtcaaatggagatttccaggagcaggtgaggtgtttgttcattccttgctcttgagagagtggagcctgggctggaagcctggacagaccctccttccttcacccatccatgcctgggcctggagtcccctacactgcagaatcactgccaaatctcagagaaaaagctcttccttcccccaccttgagatgacccaggctctggggcaccacctccctccgtggcagcagcagggaggtgtgagggccctgccaggccctttgttcagcctggggagtgtttactttttcccaggaagctaccccacgacacactgctgctgcctgggctgggtttggccagggattggggccaagagatgtttggtggggtagaaggaccctgtgatgacatgagacagttgtgctgctagggaagctgaggcagaagtagggagagggagcagaaggtcaccctgccaggggaggtcaggaaagatgaacataatcgaaatagtagtaggagcccatgaggataaccaagcaatggtccctccaagacctaaagagggtctgcctaggtttcctgtgaggaaggaggcttacgggggctgagcggcttcccaggtcactcaggagcaggactgagatggagcctgcatccgcctgatgcctgaggctgtcccaggactgagagtggagggcagggatggtggtggtgctggaggcacagacccttcacatgagctaggaacaaggaagattccagcattctgcagtgctggtttaggcttcctagcctcgtttcccaaagaaagggctggggtcgcactgggcaggctccccatgccctctgtctgccgaagcaacggaattggggtttgcttatttccaggctataaatccggccctccatcactctggcccttccactgagcagggtccctaggaaggcctctcatgtcagagatgggaacatcagggcctaagagaggaaagggctcctgttccagagcagcctggagtttgagccctccaggccaatagcccagaacagtgccaccgctcacatcatttgcatgtggcatcagaggaccaaggttgccaggtttggagatgatgaggttagaggttaggaagggtcacagcccgttgacttcccctcaggagttgatgtgagttgaggtgcctctagcaagccttgatggggccttagccctcaggcctggtgcaggagtaggggtggggctggagagctagaggacatgctcttgccccccaggggctccttggccagccagagcaaggcatggggctttggtgggggaggagggggaggaggcccaggagctttgaggccagtgtggcaccagggagctgggcaagggtcaggtggctctggcagctacagtgggggttggagctcacaagccagggagggtaggtgttccaggatacgccaggatgagggaggaaggaagacccaaagcatgaacttgagcccagatcccttgaggccagatctggagtttcagttttctggaaatgggagctgccttactcctgagagacttggaagtggccgctttggagttgggaggtcctggaagctgcacatcccccaactggctaggaattggtctttggagagaatggagacagggtccttgtgcttgctggagaacctgcctgacgcccagcctgggtcagccaggccaggggctggggctttcagctgtggccttccaggtcaagtggagcttcagatgggacctccactgtctgggcctccgcagcacaggccttgtctctggttccctggcatgatgcccgcccctccttccctggctccagcttcccttggcactaagtgaggagctggtgcatgctcaaggagtaaatcatgttccttggcagcccccactgcttcgtaatcgtaaagaatttaaagagaaaccgccaagataaaaatctcaccagcccataaaggcatctttcaccctgcagcttgggagacagtgagcctcagagtgggctcttggctgtctgcacctgtgtgtatgcacctccggccccttgactcctccagaggtggtaatagctcagaaggtggctttagggccatgggtacctggtccttgactcctgggagacctccatctcctcactcaggagagtggggtgcttaaatttggtgtaatgcagaagtggtgatggtggtggctgagctagctggtcccaaaggcaaaacccagttctaccagtgttagctgtgtgagttcagccaagtggcttagcctctctgagccctggtttctcctgtgtaaggtgggaatggcagtggccctgtggaagcagcatcatgagggctcagactgtcttgcttgcatcctggccatgggtggatcttgcttggtgaacatcattctgtgttcccactgccttttctggaaaatgggagtaagaacaatactggcctcgttgtgttgtcaggaggattaactgtgtgagtatggtcactgtggaagaaatctcagtcaccaggagcgatcctgaggctggtgtgcaggtgagggcaggtccaggggcatgccccaaggagtcccagactgcctcaccccttcctccagaattctaacttttggtaagggagatggtatttggaaaggactccaggaaggaccctgagtcctgtggggtgggtggagtagggtcaggaggaggaaaattcctaccatgggtatctgggcaggcttcatggaggaggctgcatcttgagcaggggaggggaggttgtaggggagggaagagctggagcacagggagggtgcatgtggtgcagcacctggggaagaggacagatgctagatgcagtcttgcttttgggacaaggatgtagagttctactttctgtttctggtttttaagctctttttcctcatggcagaggtactaaatatgtattatggaaaaattccagtgatacggatgcatttggcgggagtgatgccttggaagtagctccctagagactggctccaaggcctggttgggacgcacagttggctgcaataactccttctgtgaatgctgctccagctcctgccgtgtgtcctaggggtgaccagacctgggctgctcactcaggcatctgcagggctgggcagaaagcatgtttgcctggcttggcctggtgctatcctgggaatctgagccccgcctcaagaagccctgggagctttggagaagcagagaggattcctgctgcatttttcttagaaatagcaagagggcctttgccagaggcctggatgccagaaggctatggtctgaatccaaagcctagctcacgtgggtgccagagcttggcaggcctacagccccccacccagcctgctgggcagccccagggagagggtggaggcctcctgggctccagtccctgaccactggtcctgacccagcaacgaatggggtctgggcagtggctgctggcctaggattggggggctagcctgttggggagggagtggggctcatcgggctgacgggctgggctgacttctggcactctcactgggccgaggggagcactggctatctggtgcatctctgcagggcaaagacagacccaaagcaaccggcccctccagggatcaggaagcctcagctccggatcccccttcccccactcttcttccttccttcctccccctactcccccttgcctccacccctccctttgccacccctcttggcttcctacccggacatgctctttcctcggacgtctctgtacccagccaagagccttgttccttcccacttggggctcggtgctgatgccctcatttcccccggccagagtccactgcctcgtgtgtctgctgttcagccagcacggttgccttctaagggtcatacactacaattggcagagcggctagaatttgggagccctttgggctcctacagctccaaggctgagtggctagcactccagggggcctctcccagggctgcctgtattgccatttttatcagcgccttcctggctgggcctggggcctgtgcggagtgctcactgcctgcccttgactggctacctgctgagtcctgctgaggtcctaacccagcctcactgcatcctccaaggctgaccccaagcatgcacctgtctgccctgtgcctcggtttctccatcagaatgttggggaggggctaagactgtctggaacatcccgggaatctctgggtgggtgttgtgaaggggctgcagggaccgcaggaatccgaggaaggccgcagagatgggggctgggcccaggggagggggagggttttgacacccaccagcctgttggtcccatcttggcctgtctgtctgggtgatttatcagagtaaatgagccatggagagtttgttgtcttttgcagtcatggggaggaggaggtggtggaggaaggagtgaggggtttccgggccaggtctggaatgtgggaggaggaggtgggtcccccgggggcctctgaaactggaggcactcactgaatggccttttcactctccccacctgagaaatgaatcagtgcagccctccccttcagaacaatcccctctttccatccccttcatacttcttggggcacattcctgtgtgatctgcttgtctggtcatcttctcccaccccctgctcaggaccaggtctcttgaccacagtgtccttccaaagctgagccggagccctgacttgcccagctggtgaatgcccaaatgtgttctcacaggcaaccatgcacactgttaagttccaagtgggacgtctaggcctctggaactaccagcccaggcctaggatggtcaggtgcatggaccatggggaaggcaggggtcagtggaggtgccgaggccggagagaccccatctgctgggacagaaggtccgaagtcattgggtgtccttcggggatgaggcatggatcccctggttcccggctggcgagtcagggagtgatcctgctgctccgtcacttctggcttttcctggtttgaggctgagctgtgccctcagcctatcctgtcctgggcggagtaggtgagcactggggcggaacgggcgtgggaacagcatgcctggacctgctggccccagccccctgccccctgcccccagcctttagtcactgaaatgggagggaagtgtacagtggcgttttggcccagctgggctctttacccctgtacggtgtttactgaacagctgggatgtttacagtagcccttgcaaaggggcccctcgttgcaggggatttcccatcttgagggtcccactggggctcttctgacctcaccaattccctgcacccctgggatagatgtgtcagggatacagagaccataaccatctccaccttaccagagccagtggtgcctgtccccttggcctctggccttcggttcctctgctctggaggagccaacatttcccaccacatttcctagagtggcagctctaggtggtgaaatacggtaactgggtccccagttcagacatttaaattaaattcaatcagagcggttattgaataaaaacacgcggagtcatttacatgttaattatgttgaatggactactagaccataattagttgctaattgggtgagagtggctgtaattggttttgttggcaccaacctggctcacctacctggggggaagcgggggttggtgtggatggctcctagggaggccctctgggtctccaatctggaaggcctggctagagatgctatgcgggggcagatctccaggggcttagggtcagaggaacctggaacctctccccagggagggtgcagctggggtctggcttctagggttcccatccagagcatagggggaaaagggggaactggaggagctaccccagatcagcagtgatagtctcccctgcccagccccatgtgggacctgggcttgaacaaatggtaagtgcccaagagtgggtctgtgggagcccaaggcaggcgtcactcaggtgtgtctctgcacatactgggccctgggttggcctgatcagggtggcgttggggtgtaagtgggtgtgccaagcaggaggaaggtacgtacaaaggcatctgggcctccctgcccccccgcttagcttggctggggttcccggggttgtaggtctgtggccatgggctgaggccttccggctggccgctcattaaaagaggattaggctgagagccagggggccagcccagtccccaggccttcctctggggctcctcacagctttgggggagtgataaaagggccggggccaccccttcctggatcctgtgggggtatccggtagggaccacctgggccctgccatgcctcttgccgccactgctactatagccttggctacctcagtttccctcctcagaaggtcaggaggtctgtctttccggtgggtgaaacactgacaaagacccaggctggtgcctccccttgtcccccagtcccatctctcttcagctcagggattagggctgcactggctcactagaggtcagaggtctgagctaggctgcagggatctgtctatcatccccagtccccatcactgctgggggaggtgacgctgtcagtcagggcctgctgctttgtggggctataaccaagggggcgggctgcccacctctgctccaagactcctctttttgcggcagcccacacctcactgcacgcagacctgatgtcctggagaccagcagcaaggggtaggggctgcccacttggggtcttcgggtgagggctgtggacacgcctcctcagtgcctgtcctcacctgcccgcacctttaaagtaaggtatcaccagctgcttcccagatatgagggaccgggggcccccaggacccagccccgtgtgccttgagaaggtcctgcctctggacctgtgccaggccgctttgggctgggaccccaagtgcttgatggccatgagagagtcctggaggccaggaatggctgcggaaatgaggtgtctgatgccagaaaaggctcttccttcccgatgatgggaaaatccttcccggatgtcacccctcccaacctgtgcccagcctgggtgagagtatgggggtggggagcccttcccaggagacagcacccaggcacaccacccttcctccccctaaggtcaaagcttatctgggctggagtcctgatccccacagaacccttgattgtgcccagcccctccctcaacattgccatggcattcgaggaggcatggcgctcctgctgccagagccgggcgtgggacaagtggagcagatgtggggattggccttaggacatgaccaggctgggtctgcatcagccctggcccccactgatgccacctcaggtcccaggttcctttgttccttctgtcccaagtccctgtcccttaagggagctggggcctggtaggatctggcacctgctgatggcaggttttggaggaggatacccagggctacttgcccaccccctgctctgactcaggctgcttggaggagtgaaggctcccagttcctttgcctcatggtggagtggggagcaggggacaggacaccctgtgacctgggttgagtaccactctcctttgggcctcagtcttcctgtctgcagctgggggtgcagggctgtcacagggctccttgtttcccttttcacctacagtctggcatgagtggggtcagaagtccagctgtgggttgagaaggctggaaccttacaccttctttgctctgggacccggggaagttcccacccctctccaccttggttcccctctggtaggctgggtttggatgaatggtttgggatttagctctattcctgtgggttggggatggggtaaggacacactggagttgggaaggctggagctgagtccacaggttgcctcttcctgccttatagccctctctgctccccaatctagcactaggaaatggagtagctggggtgggaatggggatggatgccctacaagagatagcgacacgtggaagcctgcttccttggggaaggacttgggacctcattccactctcctttccctgaaaggcagagacacccatgaaggatgggttgggggaagacctgaggaatgccaggccgtgagcctctctctgagatcagaacggggtcactgatcctcagggtcactttgaatatcagtaccaggagggcctgagagatggtctagactagagaatgaggctcagagagcgagagtgcccccaactcaggtcatgaagctcacccagaaactcaagccatagccaaggatccctgatcctgggtcccaccccttccccaccatgcgcgacctcctggggctccccctccccccacactgtttccacagtgaccaaagcgtcacgtcctgtgacaccagagccattgacgccatatcccgtggccactgggaggggtcccgcaggtcctgagtcatgtgccctgtccacggggagcgagtcaccttccggccctggccctcctggcaggcagtctctaccaccaggactggcttcccctgggcctccccctccttcagccatggacctaggtgggaatcccacccccatgcactctggcatgtcacatcccttccctgtgccctgtgcccttggtattgtgagcacagggctttgtgcacagcgggtgttcgataactgagcaaggggctccctccacccccacctccacccaggggcagactgggggcagcaggcagagagggtcgaggccaatcctctgcccctaagctgggactcagtttcctcatcctctgagtgttctctacggcctttctcacagagggagctggagtttgggagtgctggggctttgcaagagggtaggggactcggacttgggcctcgggctctgggagtcttggtgcagggttgatattatagaggcccaaggctgcgcagggttggagcttggggattatggctgattgggttcctgggggcttaatggctgaagcttccccttacccggagtgcccgtgtctgaaggcgcccacttaagcctctagcccctccccctgccattgcccccaaagtgccccctagcccaggggatgggtaagggcatgaccgagccatgcccccagccagggtataaataacccctggcgggctgtcccagcctgggggggctccactggcagccccacttcctctctggccacttcccagccctgggggtgggggaatgtttactttcctgttgtcactgtgggtgagcagccaggcgggtgagcggccaggcgggggactccgagtggcccaacaacaggtgcgggacaggtgcctgggccgccctgcccaggacttcagaggcgccgctggacaggcgggtgaggccatcgccaggcaggatcggccctttgatccctcggcgtccctgcgtcccagcggttggccaaggtcatcacctgcattcccttgtcaccgcatagtcagggccaggcagggcaagacctttccttacccactagtttctcagagtgaggtcctgggaccagacatgggctctgggtcagctggtggaaccccctgaccccagcccacctctgccccaccttcaggctgtgtctagggcctcggatcccagctgttctccccctccaggtgccttggggcctggcccaggcctctcccttgactgccccacctgtgaaatgggttaccagctggggaggggagatgagacatgtgtgacccccttggtgagtgcctcatgtgtggtaggacatgtgtgcgccatgtgcatgcctgtgccacgtgtatacatgcatgcactcttctgtgtgctgctatcttaagccccctgtgtgtgtgaatattcatcatcctcattacagtgttccctcttttgctgagctaaagatagctgggggtgggtggagagggggcttgccaaggggacccctcggctctccctccccttggaggcaggttcccaagcttctaggagtcctttgtctgtcattgtctgagccccctcctgtccttcatccttaggaaggacttttccccagcatcctggagttggaggggccaaggctgctggactcatgcaaaagggaaactagaggacccagttgaaccctgcctttagccccagggttgtagctccagggagagagcctctttcccagaaatgactgtcctggctcattcaaggtggcctgagagttccaccattagcagccttatagggtctgggggaagctggggtccgtagggcagtgtgtccagcagggctttctggtctcctggctaacctgcttcagaccaagtgaggaccttgctgtgcaccagctgtgccctctgcctggtgggcagccagggtaagaacagggcatccaggctccatgccagagtctgccggctgtcccagatatacccggtcacacccctatctgctcattaacccttttaagcccctgtgtgaagctggccccaccctgagcgtgggagcattaacccccacctgagcaaaaactctttgatgctgttgcgtaccctggcccgcacctaccgccctttcattgggacccagagactagctagggctgtctatgaatcaggggtttagctttgggtgtggcgccttccctggcctgcctacctgtgccactttgtcctctcagtctgtcagggactggagagggagctgagaaggatccaggaaggggagctggaggtttaagaccactgtgtgggctgggcacagtggctcatgcctgtaatcccagcactttgggaggctgagacaggtggatcacgaggtcaggagttcgagaccagcctgaccaacatggagaaaccccatctctactaaaaatacaaaaattagctaggcgtggtggcgggcgcctgtgatcccaactactcaggaggctggggcagcagaatcgcttgaacccgggaggcgaaggttgcagtgagccaagatcgcgccattgcactccagcctgggtgacagagtgagactccatctcaaaaaacaaacaaacaaaaaataagctgggtgtggtggctgacgcctgtaatcccagctagtcaggaggctgagacaggagaatcgcttgaacccagcagatggaggttgcagtgagccgcaatctcgctactgtactgcagcctgggcaacagagtgagacttgatctcgtaaaaagaaaaaaagaaagaaagaaaaaagaccactctgtggtgggggtcctgaggggaacctcagggcctcagtctcccctttatcagagggggtatggctggatggtttcctgaaggtcctaattggtgccctgccctccacccacagagctgaaggccacaggcaccgcccacttcttcaacttcctgctcaacacaaccgactaccgaatcttgctcaaggacgaggaccacgaccgcatgtacgtgggcagcaaggactacgtgctgtccctggacctgcacgacatcaaccgcgagcccctcattgtaagggctggccctgatgtgggacgtggggtgggcacggagccccagggctcagggcatgtccagaaggctgcaccttctgacccccctctctgcagatacactgggcagcctccccacagcgcatcgaggaatgcgtgctctcaggcaaggatgtcaacgtgagtttggtgggatccacaggtgggaagggggaatccacaggtgggaaggtactgcccccagtgagggggcaggcctggccagggcacctatgcagccttccctgtggccccagggcgagtgtgggaacttcgtcaggctcatccagccctggaaccgaacacacctgtatgtgtgcgggacaggtgcctacaaccccatgtgcacctatgtgaaccgcggacgccgcgcccaggtaagccccagccaccctggccctgtgctgcccccgctggtggctgcatcccagggtcctgatgggaggaggggcttcagccccagccctgccacttccgagccttttgaccttgggtgagtgacttctttcacctcgctgagcctcagtttcttcacttgaaaatggggctaaccgctgcctttctcacaggtcggtgtgaggaggaggcagtgagctaaagctcccaaagctcctagcactgtgcctggcacatagtaagcacttgctccatatgtggcaacagctctcttggctatgcctgtggaccgtgccccgacggccgagccagagggcctggtgggggccttgcaataggaggctggacccctgggtcagcttctaccatgtggcctgggggagagctgccttccacccccagggccagggttgtggggagctgccccttccccagctctgccccttcctgcctgcttccacccttttccatttccatgtgggcatgtgtgtgagctggcgtgaacttgtagggcatgtgtgagaatgactggatctgaggggcacctgtgtgtgcaggtgtgtgccaagcctgtgtgtatgtatgtacacacgcatagacgtgctctggggggcccacgtgttcacgtgtgttcctggcctgtgtggtgttagaggctggcagcccgagcccgctcccccagcccctgccacccccagctctaacccctgttcctcgtcttctcaggccacaccatggacccagactcaggcggtcagaggccgcggcagcagagccacggatggtgccctccgcccgatgcccacagccccacgccaggtgggcctcatccctccaggcctttgccaggcagcactgcctctgagcggaactcaccctgggcctgcacctgaggccagcctccccagggcctcccctctacctctgtgcccacaccctgtccccaccccttcccctgaagagccctcaggctcagaaggcatgcccagctggactcatgtcagcctcagtgtgacccctgcaggcaagaaataatgaagccgccaggtggggaagacaggagccctggggacagccatgccttagccctcagaaagcatgtgtgtagacacacaagagcacacaccggtgtggatgtgggccttcctcactcagcacccagagtggaaagtggcacatgagtgcagtctgacaccttactcccaggtgttcgtgccccatgcctcccatgagtcatctgtggacacaggtgtcctgcacactcatgtgcttggggcgctcttctcccgtgtggtatctgtccactagtgatgacctgggtctgggctgggagagctggggctgggcaggggcgggcaggggggcaggggctgccggtgaatgacagagcatgtttgtggtggggagtgcagaaatgcaggatcgtgtggattctgtgtgtgtgtgtccatggtgtgagcaggcggttccgtgtgctggcggtgatatgttcagagctgtgtgtgcacccttgtgtgtgcaggaagtcacgtgtgcagtgtgtagctggaagtaggcctgtgtgcaccttcccatcgccatcctgccacctgctgccacctcctcctgcctctgttcctctctccttgcccctttccttccctctgcctggctttctcttgtggcctctgtgctcacccctgtcccagtgccttttccagccttcctagcatcttgcaggctgggctgggaggcacagggggctttgtgaattccatgtggtctgggctggactccttgactcctggctccctggggagatgtggagcctgggggctgtgctgagggacaggagaaaggtcatggcccattggtccatcctgaggaccacaggtaggacacaaagcctgaggatacagtaaccttagagctctctggcctggctagacctgatggcaaaggacaggaccccaggcccttaaccagtcactcctgccctggccaggtctgcagcgctttcttgacccaagacaggcagccacagcaaagagctgtgcctctgtagcccagggggccttggccagtgtctttatgagccagttggcatggaggggcttcagcccctacaagcccactccatgtccatctcatagcccacaaggcagggccccttgagacttggtccccaggtcttccctaagacctgggactaggaagcaccccccttggagcccacagcatggccctgccctgggagacctggctggatggagtttaaggccaaggaatgctggggagtgtagggggtgggctcggggtatgcctgggggctcattctcaccctgggagcctggtgacccttacacttcctggctgggggactggcctggacgatgctgagccccgctctgccttacaggattacatcttctacctggagcctgagcgactcgagtcagggaagggcaagtgtccgtacgatcccaagctggacacagcatcggccctcatcagtgagtgccccccaaccccgctctacagtctcaatgtgtggcctctgcccctggagatggggcatggcaccaacacttacccaagggcagagaccatgactaggctgtccctgaactccccaaaaggccccacctggcaagggggagagggtgcaggccagaccccactgtgagctgaggtcagagactgggtggtagaagcctccgcctggcccctttggatgggggaccaaggaagccaggtcctaccctgaaacacacaatgtggtccatgcaaagtccagaaccctcctgaccataggcttcctagaagagaagataagccgagtgcgtatcggggctggtctgaggggcagtcccatagcatgttcttggtgtgtctgagaggctgggagagccctgtagcgaaggaccaatggagagttccggccctgtgaccagacggggagagcatgttcctggtctgggtaggtgtctgggagggttgggggctgttctctgagtaggggtcctgccggggtctcaggagcagctgctgcccctaactgcaggttgggtgaacccatcactgaccctggctcatgcacgctgcctgttttctgattgttcaacacagtctgcctctcagagcagctgttgggcactgtgccacctccaagcctgggaaaggccctggggtcaaggggcagacattatcctccccctcttggcaagtgagaaggtcccagcctgatggcacagcccaaatcactctgatgaggaaagacagggcctgccctgggggagcctcagatgtggtatgttagaggcaagtacattattaaattttcaggaattttttgagccagttgttaaagacaactattattaaaagttaaggccaggctcagtggctcacacctataatcccagcactttgggaggctgaggggagtgtatcatttgaggtcaggagtttgagaccagcctggacaacatggtgaaaccctgtctctactaaaaaataaaaaataaaaaacattttttaaattatataagtttacgattaaacattaaaacaaaggtaacaacaataaaaagtaacaaacactcaaaactagccgggtgcggtggctcacacctataattccagcactttgggagacggaggcgggcggatcacctgagatcaggagctcgagaccaccctggccaacatggtgaaaccttgtctctactaaaaatacaaaaattagccaggcgtggtggcaggtgcctgtaatcccagctactagggaggctgaggcaggagaatcacttgaacctgggaggtggaggttgcagtgagctgagatcgtgccactgcactccagcctgggcaacagagtgagactccatttcaaaaaaaaagaaaagacttgaaaattgaaattgatctatgggctgcagaatggatgttgtgttagcaggcatgaaaacaacatttgtctccttgcacacctccatcagagctctgatggagaccaagaccaataagcagtaatattttgaaaggaatctttttttctgagcagtgggtttaaaatattcagaaaaccggccaggcacagtggctcatgcctgtaatcctaggactttgggaggctgaggcgggtggatcacttgaggtcaggagttcgagaccaggctggccaacatgggtgaaactctgtctctactaaaaatacaaaaattagccaggtgtggtggtgtgcacctgtaatcccagctacttgggaggctaaggcagaagaatagcttgaacctgggaggtggaagttgcagtgagctgagatcgcaccactgcactccagcctgggcaactgagcgagactctggctcaaaaaaaaaaaaaatcggtaaaccatgctgtaagcagatgtgctgtcattcaggctttgttgttatttatagagctcaggcagagtagattttgcaaaattctttttcttttttttttttttttttttgagatggagtctcgctctgtcgcccaggctggagtgcagtggtgtgatttcagctcactgcaagttccgcctcccgggttcacgccactctcctgcctcagcctcctgagtagctgggactacaggcacccgccaccatacccagctaatttttagtagagaccggggtttcaccgtgttagccaggatggtctcgatctcctgacctcgtgatccacctgtcttggcctcccaaagtgctgggattacaggcgtgagccaccacgcccacccctatttcacataattcttaagggccctagggttcttggaatggtaaatgagcactggcttcaacttaaagtaaccagctgcattagcccctaataagagagtctgactgtcgttcgaagctttgaagccaggaattgatttctccttgatagccgtgaaaatcctagatggcatgttcttccacgagaaggctgtttctttctttctttttttttttttttgagatggagtcttgccgtatttcccaggctggagtgcagtggcaccatcttggcttaccacaacccctgcctcctgggttcaagcgattctcctgcctcagcctcccaagtagctgggattacaggcgcatgccaccatgcccggctaatttttgtattattagtagagaaagcgtctcgccatgttgaccaggctggtcttgaactcctgacctaaagtgttcctcccacctccgcctcccaaaatgctgggataagaggtgtaagccactggccctggccagaaggctgttttatctgcattgaaaatcgtgtttagtgtagctcccttcatccatgatcttatctaaatcttctggaaaacttgctgcagcttctccatcagcacttgctacttcaccttgcatgtttatgttttggagatggctgctttccttaaacctcatgaaccagcctccgctggtttcaaacctttcttctccagcttcctctcttctctcagccttcatagaattgaagacagttagggctttgctctggattagactttggcttaaaggaatgttgtggctggtttgatcttccacgtaaaccagtaaaactttcaccatatcagtgataaggctgtttcactttcttatcatttgtgtgtttactggaatagcccttctaatttccttcaagaacttttcctttgcattcacaacttggctaactagtgctagcagcctagtttgggacctatctcagctttcaacatgctttccgtactaagcttaatcatttctagcttttttgtttttttttatttgtttgtttattttttgacagagttacactctgtcccccaggctagagtgaagtggcatgatcttggctcactgcaacctccaccccccgactccctgctccccggttcaagtgattttcctgccgcagcctcccaagtagctgggatcataggcgcccaccaccacctctggctaatttttatatttttagtagaagtgggttatgccatgttggccaggctggtctcctgacctcaagtgatcccctgcctcagcctcccaaagtgctaggattacaggcatgagccactgcacctggcccatttctagcttttgacttaaagtgagagataatatgactcttcctttcacttgaacacttagaggccattgtgggattattaattgatctaattttaatattgctgtgtcccagagaatggagaggcccaagaagagggagagagatgggagaatggccagtaagtggagcagtcagaacacacacagcatttatcgattaagttcactgttttatatgggtgaggttcacggtgccccgaaataattgcaatagtaacatcaaagatcactgatcacagatcaccataacagacagtttgaaatattgcaagaatcaccaaaatgtaggcaaggcgcggtggctcatgcctgtaatcccagccctttgggaggccgaggcaggtggatcacctgaggtcaggagttcgagaccagcctggccaacatggtgaaaccccgtctctactaaaaatacaaaaattagccagatgtagtggtgggcacctgtagtcccagctacttgggaggctgaggcaagagagttgcttgagcctgggaggtggaggttgtagtgagctgagatggtgccactgcactctagcctgggtgacagagcaagactccatctcaaaaaaaaaaaaaaagaagaattaccaaactgtgacacagacacagagacacaaagtaagcatatgctgttgaaaaaatggtgctaacagacttgcttgacacagggttgccacaaaccttccttctgtaaaaaatgcagtatttgcagtgcacaaagcccagtaaactgaggtgtgcatatgcttcctaattctttcactacactttattgttagctatgctctttttttgtttttttgtgttttttttttttatttttgttcctgctttttgagacggttgtctcactgtgtcaccaggctggagtgcagtggtgcgatctcggctcactacaacttccgcctcccaggtttaagggatcttcctgcctcagcctcctgagtagctgggactacatgcgtgcaccaccacgctcagctaatttttttgtatttttagtagaaacagggtttcaccacattggccaggatggtctcgatctcttgacctcatgatctgccagccttggcctcccaaagtgctgggattacaggaggcataagccaccatgcccggcctctttttttttttttaagatggagccttgctctgttgcccaggctggagtgcagtggcatgatctcgctcactgcaacctccgcctccctggttcaagcaattctcctgcctcagcctcccgtgtagctgggattacaggcacctgccaccatgcccagaaaatttctgtattttagtataggtagggtttcaccatcttggccaggctggcttccagctcctgccctcaaatgatccacccacctgggcctcccaaagtgctgggattataggcatgagccactgcagctggtctattagctatgctcttgaggtgatttacatttgttgtgtctgtggggtagaaatactgtacagtggtgttggcagctcttcctgattttgctttcagtgacctcaggttggtagcttgaaattagttgtggcaggagtattcacaccacagaaatgggctattgctactaatcagagctgatagttactaatcccaaccctcccagagccagtggtgaaacactgaccagcactccactggagataggatcatgccccagggagcctgagcggggagataaggccctgccctggaagtcatctgagctgtgccctggccctagcaaacagcagccccccaactgacccactggcctacccacagatgaggagctctatgctggtgtgtacatcgattttatgggcactgatgcagccatcttccgcacacttggaaagcagacagccatgcgcacggatcagtacaactcccggtggctgaacggtaagcgcagccccaggagcccttccgtggccatgtgtctgggatgcggcaaggaggtcgtaaagaagcacatgtgggggaagtggggacatgtttagcctatgactacctggggcaggggtagtttcttatctggagaggagttgggggtgttcttgcacctggctggggattctgttggagaacatcaggggcaccatcagagtaggggctcacccagctgacccctgccacctgcagacccgtcgttcatccatgctgagctcattcctgacagtgcggagcgcaatgatgataagctttacttcttcttccgtgagcggtcggcagaggcgccgcagagccccgcggtgtacgcccgcatcgggcgcatttgcctggtatgcattggcagagccaccaggctgccccttccaccagttctggcttcatcagccctgctccagccagggcttggggtcaagagctgatctgacccggcctcttgccccaccccccagaacgatgacggtggtcactgttgcctggtcaacaagtggagcacattcctgaaggcgcggctcgtctgctctgtcccgggcgaggatggcattgagactcactttgatgagctccgtgagtgcccagcaggcaggcagggtgctctggctacagcaagagggatagaggcgggatgggcgatcagggtgcctttggtgggccccctcccctgtgcaggagtgggtggggcccaggggctcccgcccatggcaccctccaacaccttctccctctgtccccagaggacgtgtttgtccagcagacccaggacgtgaggaaccctgtcatttacgctgtctttacctcctctgggtgaggctggggtcagggccagcagtggcagggagtggccccgttgggggattgtaactcgtggagaaccccagcccggtggcgagctgtggggagggggcagtttggggaggggccctaggtggagggtctgtcctgctcagcagcgcctgccatgcccacagctccgtgttccgaggctctgccgtgtgtgtctactccatggctgatattcgcatggtcttcaacgggccctttgcccacaaagaggggcccaactaccagtggatgcccttctcagggaagatgccctacccacggccgggcacggtaaggaccccactcatcctgcctctcccctttctcttcttctaagaggcctctgggtcaggctctttgcaacatgggccccaccatcatggccctcccagccagcggaggcggtgagctgtaatgcacacacagacgggccttcacacacagtgtcaagctgtggaggagcccagatgggattctgggacaaagatggtgggttgggcgtggtcggctgctcctcagagggtcctctgtggggctgtttgggagctgaaggttggggggaagcgtcttccctgcaggtgctggaggcaggctggaggttggctcagctgaggaacaggaggcaaagagctggggaggggcagggccaggcctcaggcagggtctcagaggtcacagaggcatgtcactttatcttgatgtgacaccggctgatgtgggagcctaagcaggagagcagcggatctggtccaatgcagttctgactccatgtagtcaggactgggctggagaagctggtctcagtgggggacaggggaagcttccctccagaggtaacctggagtcagaaggatgggccagaggtaagctggccatgacggggggcaggctgagcccaggttcaggggacagcttcaggaaggaggagagtgagcctggtgtgtgacaaggacgtcggggcctgcagtccagctgtgcaggagggagacgggtgagaccctaggaacaaccagagaggaaggagatgacaggggtggggagggggacatggaagggagtggtccgcttggccaaatgctgccacgaggtcatggcacctgaggccagggaggtggctgtggcatttggccacctgggaccttggccagagcaggacctgtagaggtcaggtgcagggcagaaacttggagagcgggtttggggagaggagcaggttgaggtagtggggacagacagtgcagcggcctcttctgaagctaatggctccagcctgccctgcccaggcagcctgggactgacactcgccacctgtccacagtgccctggtggaaccttcacgccatctatgaagtccaccaaggattatcctgatgaggtgatcaacttcatgcgcagccacccactcatgtaccaggccgtgtaccctctgcagcggcggcccctggtagtccgcacaggtgctccctaccgccttaccactattgccgtggaccaggtggatgcagccgacgggcgctatgaggtgcttttcctgggcacaggtacccactgctgctcccggcctctcccacgctgggcccaccgggtgcggggtgcagatccttggggctggggcttgccctgctagggcttgctgcaagctcatcagagtcacttcttcatcctcatcctttggtgccttctccctattgatgggataacagaggctaggggtgagaaaaccccattcccacttccatccccaggggcccaggagaacagggacactgggcatctggggacttatgtatgtatggcaggaaaggggtggagacagatggtaggcacctccaggatacagaggccatacacatgctcgtgtgtgcacacacatgccacagtgcaccccctacagttccagcagcccaaacacaggagaatgcatgccccagtgtcctgttctcagcagggcccaaaatcagggtctgggttggtgggggcagaccatggccatgaccccctatgtcctgggccagtcccctttgacctggggaaactcttccaccttggcacaaagctccagctccaatgccctaggggggtttgggccctggtgggggaaggggctgaggctggtaccccttccccagcatccccagccccactgaggccctgcccggcccgttccagaccgcgggacagtgcagaaggtcattgtgctgcccaaggatgaccaggagttggaggagctcatgctggaggaggtggaggtcttcaaggtgggtgtgacaccacccagtcctgacctccccacctttaccctccccccagtcccagcctctgacctgagacctctaggtcagggcagggagggggtccctggcatcccaagctgatctttatctttttctaggatccagcacccgtcaagaccatgaccatctcttctaagagggtaagcctttggcgaggtgagccaaggttggggacagggcctgcatcccctcagggtcatgcccttggcacagggatgggtaaactgaggcatggaacaggggagaggagcccagcctagctggctgttggtggggctggctatgggacaggaactgacaaggccctaccctttgccccagcaacaactctacgtggcgtcagccgtgggtgtcacacacctgagcctgcaccgctgccaggcgtatggggctgcctgtgctgactgctgccttgcccgggacccttactgtgcctgggatggccaggcctgctcccgctatacagcatcctccaagaggtgtggacccctagacacctagaattttagcaaccagtcccagggccctatcctaggggattgggggtgcatgtgatattacccggggtgcatgtgatattaccctaggggagtcttatgggtaagacatcactgccctggggaaaaagggccctgccctggagtcagggagatacagggacctgggggggcaagcttcctgggagcactccttcaggggctatcctcatccaggcggagccgccggcaggacgtccggcacggaaaccccatcaggcagtgccgtgggttcaactccaatggtgagtatgctgggcctcactgtggggtgctgctcacactgcagaagtccacgcagcccacgaagctgctcacagggcccccactgtaagggtgctctgatggctaatggagggtgggggctaatggagatgggatgtccctagttgccccatcaacacagagcactacattggtgagtgggtgcccctcggtgcctgccccgaagcagtcagcaggctgcccggaggtgatgctgcttttgctcaacccctctcactctaaagccaacaagaatgccgtggagtctgtgcagtatggcgtggccggcagcgcagccttccttgagtgccagccccgctcgccccaagccactgttaagtggctgttccagcgagatcctggtgaccggcgccgagaggtgagttcctgcgcccggtgctgcaccgtggatgtgagtccttgcacagtggtgaaatgtagtagaggagtgatctggagcaactctcatgctgtgaaaccccttccaagctcccttccctacatgcaaatcctttgagtgaaaacagttacatggaaactccctgggattggcctcattctatggaaagtgtttctgggtatgcctgttcacatgaaaattccatatgcataccacattgggggtgtaccttctacaaaaacatcatgtgagtgagctccagtatgtggaaattctatggggccctcattttatgaaaatgccctacaggtgtccctgtttatgtggaaattctatgtggttatcccaattggatattctcgttaaatggaaattctggctggacgtggtggctcacacctgtaaccccaacactttgggaagccaagacaggcaaattgcttgaggtcaggggttcgagaccagcctgggcaacatggtgaaaccctctctctaccaaaaatacaaaaattagctgggcatagtcatgcatgtggtcccagctacttgggaggctaaggtgggaggatggcttgagcctgggaggcagaggttgcagtaaaccgagatcattcaactgcattctagcctaggcgacagagccagaccttgtctcaaaaaaaaaaaaaaaaaaaaaaaaggaattctgtgtgtgcttcaaattttcctcattgtacagaacctccttatggtcatcactcctgaaatggaaatctgtacagatgccttattcaaatatctctcattatgtagaaacttcatgtggtttttctggcatatggaaatcccacatgggtgcctctacacggaatggccacaaaggtggtctgatctggttgctggctagggccatagggtggtcacagagcctctgaaccccctctccttgcccctgcagattcgtgcagaggaccgcttcctgcgcacagagcagggcttgttgctccgtgcactgcagctcagcgatcgtggcctctactcctgcacagccactgagaacaactttaagcacgtcgtcacacgagtgcagctgcatgtactgggccgggacgccgtccatgctgccctcttcccaccactgtccatgagcgccccgccacccccaggcgcaggccccccaacgcctccttaccaggagttagcccagctgctggcccagccagaagtgggcctcatccaccagtactgccagggttactggcgccatgtgccccccagccccagggaggctccaggggcaccccggtctcctgagccccaggaccagaaaaagccccggaaccgccggcaccaccctccggacacatgaggccagctgcctgtgcctgccatgggccagcctagcccttgtcccttttaatataaaagatatatatatatatatatatatataaaatatctatattctatacacaccctgcccctgcaaagacagtatttattggtgggttgaatatagcctgcctcagtggcagcatcctccaaaacttagacccatgctggtcagagacggcagaaaacagagcctgcctaaccaggcccagccagttggtggggccaggccaggaccacacagtccccagactcagctggaagtctacctgctggacagcctccgccaagatctacaggacaaagggagggagcaagccctactcggatggggcacggactgtccaccttttctgatgtgtgttgtcagcctgtgctgtggcatagacatggatgcgaggaccactttggagactggggtggcctcaagagcacacagagaagggaagaaggggccatcacaggatgccagcccctgcctgggttgggggcactcagccacgaccagccccttcctgggtatttattctctatttattggggataggagaagaggcatcctgcctgggtgggacagcctcttcagccccttctcccctccccgcctggccagggcagggccaccccactctacctccttagctttccctgtgccactttgactcagaggctgggagcatagcagaggggccaggcccaggcagagctgacgggaggccccagctctgaggggagggggtccgtggtagaggcctggggccggtagaggctccccagggctcccttatgtccaccacttcaggggatgggtgtggatgtaattagctctggggggcagttgggtagatgggtgggggctcctggtggccttctgctgcccaggccacagccgcctttgggttccatcttgctaataaacactggctctgggactaga

SEQ ID NO: 15800 - DNA, 33984 bp, Homo sapiens
gagcgagcgaacgaaccgcggcggtccggagagccccgagcgcagcgcaggacctgggtacgccgcgaggaaccgtgcagcccagcgcggccgcccggcccgggtccagcagccaggagagcgcagcgcttcgaagccgagtgcgcgccaccgcccgcgccccgcgctggggaatgcgccctcggcgcgccggccagggggcgcccgcagcccaccccaggggaggcggccccgagcgcccctgagccttcccatggcccgggctggggcccgggccctcggctgctgacgcgcccgaagcccgcggaaccggttaagccgcggccgcggcgccgatcccggctgaggcgcagcggcgagaggtcgcgggcagggccatggccccggggggccgctagcgcggaccggcccaacgggagccgctccgtgccgccgccgccgcccgggcgcccaggccccgccgctgcggaagaggtgagtgcagcgggaaccgggagggagcgggcaggcggccgggccaccccgcgacccctctgggacccgcggcactgcaactccgcagaagtgtccggggagcgggtctcgtcgagccggggggctgcccgcggacataggggcaacaaggctggggtgggattcttacctgtcctggaggcccggaccccttacctacggggcggcgtatggatgtgtggatgatgtggcctgcggggtcacccatgtgcaaagcaactttttcctgcaaggttctgggtgggtgctctcatacacccccaccttcacgcttctggagcgggagttccgatcccccttctgcctcagctctctctcccattaacgcccgaggcagcgctcttccccgtagatgcgcttgccctacctcagtgtctctacttgaggactggccagcccgaagggaagcggtatactggcagtccccacgtggggggtctcccacatcagcagagtgggaggacctccagtcctgaggcatttctcccagcattgtgccagccccttgacccccagctgccaccttgggtttgcttttacagcagagtcctgcctggattaggggcacggctgtatgtagtgtgtaggtgagcttggagagcctgcggtcaatccctagtttgaaccaggggtcccagtggtgaagtgggcaggggacagcgggggcttggcggggttgcccccagcagatgggacaggagggtatcaaagttggcctaggaatgaggcagtgctggcgggagttggctggagctggggctgggggccccactggataaataactcctaatttttgagatagctgtgttttgccaccagaacattactgcttgggagaggtaagggagacgccaaccaaagacaccagtatgtccaccctgaagctgggccaggttggggacctctgtcctcctgaattcacccagatagtctcccagtagttatcctagttgcagagaagggaaaactgcacccaggggttgggagccccatctcagcccagggagttggatggagctgaggcctcttcccaggctacccaaggggtgtgccaggaccccgtagggtatagtgtctaggcaggcggggggcacaggcatgcctactcctgctgctcccccttcagctccgaaggagccaggcccggaagtggggaggtgggggccggagagaaagcaggggccagagagaaggcggcagcccacccagcctcagcccctcgctgctcagcataccttggggggaggatggagccaggctcaggtgaccttgactgggaaaccctggccacaaaaggggggtttcagtcccagctatgctggggtggctctgcttcctggtccttgaggtgttgggggatggggaagctgaggagccaagaaggagacagagctcttgttgaagtgggggagggaatctgaggggctgggtagcgggtggggtgctgttgataatctccccatgttcccctacggcccctgttcctgcctcccttccatccaggcagtcctcagctcggaggagccaacctcccttcctggagacaggctgtccacccccacccccaactccaagcctgggcggtctggatccggctgtacagtttggccacctggccccctgtcccatcccaggtgcctccggactccttcctctggccgcctcttccctgcaccccttgccagccccggctcctcgtttctttgttcaagcgtctctcctccgtccctccctctctcctccctctctcctcctccctcccgcctgcctccctcccttgctccctcccaccagccttccttccctccttctctgctttcttcctggtgggctcccaggtggcggtggctgttcttcctctgtccactgacctgggcttggtgtgacttgggggcttttctggggctggggctgggtgacaggcatctcgggactggcagaggggaaggcactgtgggtttgccctttctttccctctctgtccttcttctccttttcttccttccctctccttctttcccccacctgccaggctgtccaagaggggacctggacttgagactgaggccccagcaaacttgagcccctccccattcacctctttaaaaggccaaagcatttggatgggaagtccctgtagggacccagtagaaagactccccacctctctggacacattgggtgactccaaccctgtccttggtgacactgactttgtcaccatgaacatggatgaaggaaaaaatgaggtcatggggaggggggaggcgggaggcaggttgacaggagcccccgttacatagtatcgaagctctctgagggactcagacggcatcttgcgccaggacagtatctcccagctcccctgagccccaccccactagcaggtcaagttcttgagcaaactcatgcttgtaaggacgtgtgtgggcctgcaagtgtgaacgtgtgcatatccacagctgttatcaggggcctcccaggtgcaccttgagggtgacggtggctgcacagccatttctcccacctgcccccacttctcagagcctgccattcagtcagcactagctttgtgcctcccagacctgaggaggggctggttctgattcccccatcccccagctagcctccccaggaggcagcatctatgacaggggatctggaaggaccatgagcggtgtgccaggccctcgggagagaacattcacacagagggtaccgcgtaaggagtgggccaagaggctgaagctgcacttcctgtctgaggagccatgagtggtttgccttggcaggagaggccagggctgggggaggtgggtctagggatgtcatcagggtctaatgagtggggcctaagagtcagactggagcctgggctttgcctcagcattgagcagctatggcaggggagtcccaggccatagtactgccaactcccatcccagcatcctagagatgggcctggggtcctgcctgccacggaagaagggagtacacagggcagatctgggggatggggctcacattttcagtctcgatgcccccacccgcagtgcatccggttgggggtggtggtaggagttggcgctggtttgtgccgggagggagcaatatgttctgacaactggtgctgggctgcgtttacccaacagccagcctgcctggggagacaatatttgaaaaacacagtattgaaacttggacctgctggggctatgggggattctgaaggtggcaatgccgctggcccagatccagccccaggcccactggccatcctagcttcccttctttgccctctagaggcggagctggaagttttccctggcaggaagtccttctgcctgtctgacctgggtctctcctgctttgattttagtacaagtggactctgccattctctgcctttccttttctgactggtgctccctctcttccatcttgggctgtctgcatgtgtctcattcccccactctctcctgtgcctcccctctaccgtaataatcaggtccaggtttctctgtactgggagaagacctgtggctggagcaggcagggatgcaccctatctgttccccattcctccaggtgggagggagaaggagtaacccactttattggccacagatgcaggggagaaaggagaaagcatgctgggagctggaaagagccctaagatcacctggttggtctgggccctgtgaatggaattcagcatgccatgaggggtagggtttgagtctccagcagcccccatcagttctggtgaccccaggctggggcctattggtactatctccccagacaaaggcaggccaaagaacgcacatgaggtgtgcacacaggggcattcatggccccaggctgggggtggaagcgtggaggtacccatcaacctctttgttcaccttgggtagaaattgaactcccccatctgcctcacacattccaatcttggttccccttcccaggtttctagagagtggagcctgcttcctgggccctaggcccctcccacaatgcttgtcgccggtcttcttctctgggcttccctactgaccggggcctggccatccttccccacccaggaccacctcccggccacgccccgggtccggctctcattcaaaggtaagaagctgttttgttcttccccagaaatcatcctctctttacaatagcgctcggctcctctgcacacgagagaaagggtgggtcaggacaaaaccaggacaaattgtacagccacataggttgtgggggagaagggagaccggggaggtggtggcttgctgggaaaggctggagaactgacccatttagacacttagcaaaagagtccagagtctgggcatcttccagagtcagactgtgggttcctgggctgggtggcctgaggtctgtagggcatgtctttctgtatgataattggagaggtggcaatgtcactccttccaaacttatgtctgctgcggcccctccttgccactgctatgcatctggtcctgccctgagcagcccctggggtggaaggtcaggcagttgggcagacactggaacctctggacactggaagagcaggacctgctctcttggggtgtgggtgctcgaggagccttcctatggtctccaagtgggaagggttcctagaatccaggaggggactgttggctgtgactggcagggaggccgccggtgggttcaggcagagcacgtgctgctgtgagggcctgagctcctgagctccagtgagcactttgatgagaagtcactgggaggtttcagtgatgggctggggtctgcagagtgagaggctggtcgcccgctccatcaccattgcacttaacccactggacaggtgcacgcacacggtacacacatgggtgtacaaatggctcactcgagagccacttcctcaagggtgtgtgtggtctgaagagtctcccctgggcccagggtgaggggcagtggccatgctggggcctgggggacctggggtcattgggagttctcagccttggccctcctctggccagaggtaacttcatccagccgcctgccctgggtggggtcgactcagccctggctggccagatttccgggcagccatactggggtgaaaggctggggtgacctttccttcctcgggcttggcggaggcccagccctcacctcaccatgtcccccagcagggcccctcccctggcctcgtcccaccctgccccttgatgggaggagtaggggagtaagctgcttatcatcactcttcccagtcacccggctcctggaatttctgaggctgtgcctggaaggagtcccctgcagggcctgagaaatgggctgagaagagttaatttgtttgggctggaaagcaccccccttccccgggccccaggaaggtgagatatttattctgctgatacctccacccttccctggtggaattcttcagagcagattaataaatcttgaaggggccagttcccccaaacccctccccagcccagggtctggcagcgagagtagagtgtctcctcccccgatagtggaagggaggggtggcttggtctccacacccctgggaccttgcgtccgctctgggtgttgtttttgtcatcatgcatgcaagtaagcaggaggggcaaaacagagaggggtcttccgtgtgctccttctaagcctccctggacctccaggggcaaagagttttgttcctgttttccagagagagaaactgaggctcaggcaagggcagggtcaaggtcaggcaagaggcagaggcaaagccagaaatagaaccctggtgtcctggccttgccggcgcccacatcgcgtcaggtcgattccctctcaattagctctgaagccgacacccgcagtgactaaaagctgagctcactggcagccagcctgggtgttgccggttgtggcggcctggggtggggctgcagcgcacctggggccacccatcccagggctcctgtgcctttgcacaggcaggttcccctgccctgaatgaccttccctgttccgacctggtctcgtgtcctaattttgtgcttagacttcacttactactgtatgacaggccccgtgctgagtgctggggactctgtggtgaacaagatagggtgctcacagtcaagctggtggaaaaagcaatggatatccagttggtcagggccatctgggagcccagcacctgctgtgtaccaggccctgtgtatccccctacactgggtggtctcagcctggttatgcacacatgaagtggccctcagtgaggagcaggcgcccaccaagtgtgtgtggagtgagaatggagaccaacacttcaagaaactgggctcccaccatcttcctcccagagtacacgtgggtggcacagagaaggttactctcagaagcactgctggtcactgtggctccatgtcatagttttttcatctgtgccttggatggacacagcagttgacaccccaggcctcaggggctcaggctgggcactccctgccctgccctgccctgggtcctgctgtagtggggaggtgccggttcctgcctgggtagggctggaccctccaagctagaggtgctggcataaggggccacactgcccagggtagataaaggaacaaaggcaggaactgggccaggcttgggtttgctgcccgcccatccgcctgggcaccccagccaggtctagagccagaagggtgtgagggtcaagcagcccagggttccctcagattaggggggctcctatggcccagcttctgggcttcagcagcacagccaaaatcaggcagaagtgagggtcaaatggagatttccaggagcaggtgaggtgtttgttcattccttgctcttgagagagtggagcctgggctggaagcctggacagaccctccttccttcacccatccatgcctgggcctggagtcccctacactgcagaatcactgccaaatctcagagaaaaagctcttccttcccccaccttgagatgacccaggctctggggcaccacctccctccgtggcagcagcagggaggtgtgagggccctgccaggccctttgttcagcctggggagtgtttactttttcccaggaagctaccccacgacacactgctgctgcctgggctgggtttggccagggattggggccaagagatgtttggtggggtagaaggaccctgtgatgacatgagacagttgtgctgctagggaagctgaggcagaagtagggagagggagcagaaggtcaccctgccaggggaggtcaggaaagatgaacataatcgaaatagtagtaggagcccatgaggataaccaagcaatggtccctccaagacctaaagagggtctgcctaggtttcctgtgaggaaggaggcttacgggggctgagcggcttcccaggtcactcaggagcaggactgagatggagcctgcatccgcctgatgcctgaggctgtcccaggactgagagtggagggcagggatggtggtggtgctggaggcacagacccttcacatgagctaggaacaaggaagattccagcattctgcagtgctggtttaggcttcctagcctcgtttcccaaagaaagggctggggtcgcactgggcaggctccccatgccctctgtctgccgaagcaacggaattggggtttgcttatttccaggctataaatccggccctccatcactctggcccttccactgagcagggtccctaggaaggcctctcatgtcagagatgggaacatcagggcctaagagaggaaagggctcctgttccagagcagcctggagtttgagccctccaggccaatagcccagaacagtgccaccgctcacatcatttgcatgtggcatcagaggaccaaggttgccaggtttggagatgatgaggttagaggttaggaagggtcacagcccgttgacttcccctcaggagttgatgtgagttgaggtgcctctagcaagccttgatggggccttagccctcaggcctggtgcaggagtaggggtggggctggagagctagaggacatgctcttgccccccaggggctccttggccagccagagcaaggcatggggctttggtgggggaggagggggaggaggcccaggagctttgaggccagtgtggcaccagggagctgggcaagggtcaggtggctctggcagctacagtgggggttggagctcacaagccagggagggtaggtgttccaggatacgccaggatgagggaggaaggaagacccaaagcatgaacttgagcccagatcccttgaggccagatctggagtttcagttttctggaaatgggagctgccttactcctgagagacttggaagtggccgctttggagttgggaggtcctggaagctgcacatcccccaactggctaggaattggtctttggagagaatggagacagggtccttgtgcttgctggagaacctgcctgacgcccagcctgggtcagccaggccaggggctggggctttcagctgtggccttccaggtcaagtggagcttcagatgggacctccactgtctgggcctccgcagcacaggccttgtctctggttccctggcatgatgcccgcccctccttccctggctccagcttcccttggcactaagtgaggagctggtgcatgctcaaggagtaaatcatgttccttggcagcccccactgcttcgtaatcgtaaagaatttaaagagaaaccgccaagataaaaatctcaccagcccataaaggcatctttcaccctgcagcttgggagacagtgagcctcagagtgggctcttggctgtctgcacctgtgtgtatgcacctccggccccttgactcctccagaggtggtaatagctcagaaggtggctttagggccatgggtacctggtccttgactcctgggagacctccatctcctcactcaggagagtggggtgcttaaatttggtgtaatgcagaagtggtgatggtggtggctgagctagctggtcccaaaggcaaaacccagttctaccagtgttagctgtgtgagttcagccaagtggcttagcctctctgagccctggtttctcctgtgtaaggtgggaatggcagtggccctgtggaagcagcatcatgagggctcagactgtcttgcttgcatcctggccatgggtggatcttgcttggtgaacatcattctgtgttcccactgccttttctggaaaatgggagtaagaacaatactggcctcgttgtgttgtcaggaggattaactgtgtgagtatggtcactgtggaagaaatctcagtcaccaggagcgatcctgaggctggtgtgcaggtgagggcaggtccaggggcatgccccaaggagtcccagactgcctcaccccttcctccagaattctaacttttggtaagggagatggtatttggaaaggactccaggaaggaccctgagtcctgtggggtgggtggagtagggtcaggaggaggaaaattcctaccatgggtatctgggcaggcttcatggaggaggctgcatcttgagcaggggaggggaggttgtaggggagggaagagctggagcacagggagggtgcatgtggtgcagcacctggggaagaggacagatgctagatgcagtcttgcttttgggacaaggatgtagagttctactttctgtttctggtttttaagctctttttcctcatggcagaggtactaaatatgtattatggaaaaattccagtgatacggatgcatttggcgggagtgatgccttggaagtagctccctagagactggctccaaggcctggttgggacgcacagttggctgcaataactccttctgtgaatgctgctccagctcctgccgtgtgtcctaggggtgaccagacctgggctgctcactcaggcatctgcagggctgggcagaaagcatgtttgcctggcttggcctggtgctatcctgggaatctgagccccgcctcaagaagccctgggagctttggagaagcagagaggattcctgctgcatttttcttagaaatagcaagagggcctttgccagaggcctggatgccagaaggctatggtctgaatccaaagcctagctcacgtgggtgccagagcttggcaggcctacagccccccacccagcctgctgggcagccccagggagagggtggaggcctcctgggctccagtccctgaccactggtcctgacccagcaacgaatggggtctgggcagtggctgctggcctaggattggggggctagcctgttggggagggagtggggctcatcgggctgacgggctgggctgacttctggcactctcactgggccgaggggagcactggctatctggtgcatctctgcagggcaaagacagacccaaagcaaccggcccctccagggatcaggaagcctcagctccggatcccccttcccccactcttcttccttccttcctccccctactcccccttgcctccacccctccctttgccacccctcttggcttcctacccggacatgctctttcctcggacgtctctgtacccagccaagagccttgttccttcccacttggggctcggtgctgatgccctcatttcccccggccagagtccactgcctcgtgtgtctgctgttcagccagcacggttgccttctaagggtcatacactacaattggcagagcggctagaatttgggagccctttgggctcctacagctccaaggctgagtggctagcactccagggggcctctcccagggctgcctgtattgccatttttatcagcgccttcctggctgggcctggggcctgtgcggagtgctcactgcctgcccttgactggctacctgctgagtcctgctgaggtcctaacccagcctcactgcatcctccaaggctgaccccaagcatgcacctgtctgccctgtgcctcggtttctccatcagaatgttggggaggggctaagactgtctggaacatcccgggaatctctgggtgggtgttgtgaaggggctgcagggaccgcaggaatccgaggaaggccgcagagatgggggctgggcccaggggagggggagggttttgacacccaccagcctgttggtcccatcttggcctgtctgtctgggtgatttatcagagtaaatgagccatggagagtttgttgtcttttgcagtcatggggaggaggaggtggtggaggaaggagtgaggggtttccgggccaggtctggaatgtgggaggaggaggtgggtcccccgggggcctctgaaactggaggcactcactgaatggccttttcactctccccacctgagaaatgaatcagtgcagccctccccttcagaacaatcccctctttccatccccttcatacttcttggggcacattcctgtgtgatctgcttgtctggtcatcttctcccaccccctgctcaggaccaggtctcttgaccacagtgtccttccaaagctgagccggagccctgacttgcccagctggtgaatgcccaaatgtgttctcacaggcaaccatgcacactgttaagttccaagtgggacgtctaggcctctggaactaccagcccaggcctaggatggtcaggtgcatggaccatggggaaggcaggggtcagtggaggtgccgaggccggagagaccccatctgctgggacagaaggtccgaagtcattgggtgtccttcggggatgaggcatggatcccctggttcccggctggcgagtcagggagtgatcctgctgctccgtcacttctggcttttcctggtttgaggctgagctgtgccctcagcctatcctgtcctgggcggagtaggtgagcactggggcggaacgggcgtgggaacagcatgcctggacctgctggccccagccccctgccccctgcccccagcctttagtcactgaaatgggagggaagtgtacagtggcgttttggcccagctgggctctttacccctgtacggtgtttactgaacagctgggatgtttacagtagcccttgcaaaggggcccctcgttgcaggggatttcccatcttgagggtcccactggggctcttctgacctcaccaattccctgcacccctgggatagatgtgtcagggatacagagaccataaccatctccaccttaccagagccagtggtgcctgtccccttggcctctggccttcggttcctctgctctggaggagccaacatttcccaccacatttcctagagtggcagctctaggtggtgaaatacggtaactgggtccccagttcagacatttaaattaaattcaatcagagcggttattgaataaaaacacgcggagtcatttacatgttaattatgttgaatggactactagaccataattagttgctaattgggtgagagtggctgtaattggttttgttggcaccaacctggctcacctacctggggggaagcgggggttggtgtggatggctcctagggaggccctctgggtctccaatctggaaggcctggctagagatgctatgcgggggcagatctccaggggcttagggtcagaggaacctggaacctctccccagggagggtgcagctggggtctggcttctagggttcccatccagagcatagggggaaaagggggaactggaggagctaccccagatcagcagtgatagtctcccctgcccagccccatgtgggacctgggcttgaacaaatggtaagtgcccaagagtgggtctgtgggagcccaaggcaggcgtcactcaggtgtgtctctgcacatactgggccctgggttggcctgatcagggtggcgttggggtgtaagtgggtgtgccaagcaggaggaaggtacgtacaaaggcatctgggcctccctgcccccccgcttagcttggctggggttcccggggttgtaggtctgtggccatgggctgaggccttccggctggccgctcattaaaagaggattaggctgagagccagggggccagcccagtccccaggccttcctctggggctcctcacagctttgggggagtgataaaagggccggggccaccccttcctggatcctgtgggggtatccggtagggaccacctgggccctgccatgcctcttgccgccactgctactatagccttggctacctcagtttccctcctcagaaggtcaggaggtctgtctttccggtgggtgaaacactgacaaagacccaggctggtgcctccccttgtcccccagtcccatctctcttcagctcagggattagggctgcactggctcactagaggtcagaggtctgagctaggctgcagggatctgtctatcatccccagtccccatcactgctgggggaggtgacgctgtcagtcagggcctgctgctttgtggggctataaccaagggggcgggctgcccacctctgctccaagactcctctttttgcggcagcccacacctcactgcacgcagacctgatgtcctggagaccagcagcaaggggtaggggctgcccacttggggtcttcgggtgagggctgtggacacgcctcctcagtgcctgtcctcacctgcccgcacctttaaagtaaggtatcaccagctgcttcccagatatgagggaccgggggcccccaggacccagccccgtgtgccttgagaaggtcctgcctctggacctgtgccaggccgctttgggctgggaccccaagtgcttgatggccatgagagagtcctggaggccaggaatggctgcggaaatgaggtgtctgatgccagaaaaggctcttccttcccgatgatgggaaaatccttcccggatgtcacccctcccaacctgtgcccagcctgggtgagagtatgggggtggggagcccttcccaggagacagcacccaggcacaccacccttcctccccctaaggtcaaagcttatctgggctggagtcctgatccccacagaacccttgattgtgcccagcccctccctcaacattgccatggcattcgaggaggcatggcgctcctgctgccagagccgggcgtgggacaagtggagcagatgtggggattggccttaggacatgaccaggctgggtctgcatcagccctggcccccactgatgccacctcaggtcccaggttcctttgttccttctgtcccaagtccctgtcccttaagggagctggggcctggtaggatctggcacctgctgatggcaggttttggaggaggatacccagggctacttgcccaccccctgctctgactcaggctgcttggaggagtgaaggctcccagttcctttgcctcatggtggagtggggagcaggggacaggacaccctgtgacctgggttgagtaccactctcctttgggcctcagtcttcctgtctgcagctgggggtgcagggctgtcacagggctccttgtttcccttttcacctacagtctggcatgagtggggtcagaagtccagctgtgggttgagaaggctggaaccttacaccttctttgctctgggacccggggaagttcccacccctctccaccttggttcccctctggtaggctgggtttggatgaatggtttgggatttagctctattcctgtgggttggggatggggtaaggacacactggagttgggaaggctggagctgagtccacaggttgcctcttcctgccttatagccctctctgctccccaatctagcactaggaaatggagtagctggggtgggaatggggatggatgccctacaagagatagcgacacgtggaagcctgcttccttggggaaggacttgggacctcattccactctcctttccctgaaaggcagagacacccatgaaggatgggttgggggaagacctgaggaatgccaggccgtgagcctctctctgagatcagaacggggtcactgatcctcagggtcactttgaatatcagtaccaggagggcctgagagatggtctagactagagaatgaggctcagagagcgagagtgcccccaactcaggtcatgaagctcacccagaaactcaagccatagccaaggatccctgatcctgggtcccaccccttccccaccatgcgcgacctcctggggctccccctccccccacactgtttccacagtgaccaaagcgtcacgtcctgtgacaccagagccattgacgccatatcccgtggccactgggaggggtcccgcaggtcctgagtcatgtgccctgtccacggggagcgagtcaccttccggccctggccctcctggcaggcagtctctaccaccaggactggcttcccctgggcctccccctccttcagccatggacctaggtgggaatcccacccccatgcactctggcatgtcacatcccttccctgtgccctgtgcccttggtattgtgagcacagggctttgtgcacagcgggtgttcgataactgagcaaggggctccctccacccccacctccacccaggggcagactgggggcagcaggcagagagggtcgaggccaatcctctgcccctaagctgggactcagtttcctcatcctctgagtgttctctacggcctttctcacagagggagctggagtttgggagtgctggggctttgcaagagggtaggggactcggacttgggcctcgggctctgggagtcttggtgcagggttgatattatagaggcccaaggctgcgcagggttggagcttggggattatggctgattgggttcctgggggcttaatggctgaagcttccccttacccggagtgcccgtgtctgaaggcgcccacttaagcctctagcccctccccctgccattgcccccaaagtgccccctagcccaggggatgggtaagggcatgaccgagccatgcccccagccagggtataaataacccctggcgggctgtcccagcctgggggggctccactggcagccccacttcctctctggccacttcccagccctgggggtgggggaatgtttactttcctgttgtcactgtgggtgagcagccaggcgggtgagcggccaggcgggggactccgagtggcccaacaacaggtgcgggacaggtgcctgggccgccctgcccaggacttcagaggcgccgctggacaggcgggtgaggccatcgccaggcaggatcggccctttgatccctcggcgtccctgcgtcccagcggttggccaaggtcatcacctgcattcccttgtcaccgcatagtcagggccaggcagggcaagacctttccttacccactagtttctcagagtgaggtcctgggaccagacatgggctctgggtcagctggtggaaccccctgaccccagcccacctctgccccaccttcaggctgtgtctagggcctcggatcccagctgttctccccctccaggtgccttggggcctggcccaggcctctcccttgactgccccacctgtgaaatgggttaccagctggggaggggagatgagacatgtgtgacccccttggtgagtgcctcatgtgtggtaggacatgtgtgcgccatgtgcatgcctgtgccacgtgtatacatgcatgcactcttctgtgtgctgctatcttaagccccctgtgtgtgtgaatattcatcatcctcattacagtgttccctcttttgctgagctaaagatagctgggggtgggtggagagggggcttgccaaggggacccctcggctctccctccccttggaggcaggttcccaagcttctaggagtcctttgtctgtcattgtctgagccccctcctgtccttcatccttaggaaggacttttccccagcatcctggagttggaggggccaaggctgctggactcatgcaaaagggaaactagaggacccagttgaaccctgcctttagccccagggttgtagctccagggagagagcctctttcccagaaatgactgtcctggctcattcaaggtggcctgagagttccaccattagcagccttatagggtctgggggaagctggggtccgtagggcagtgtgtccagcagggctttctggtctcctggctaacctgcttcagaccaagtgaggaccttgctgtgcaccagctgtgccctctgcctggtgggcagccagggtaagaacagggcatccaggctccatgccagagtctgccggctgtcccagatatacccggtcacacccctatctgctcattaacccttttaagcccctgtgtgaagctggccccaccctgagcgtgggagcattaacccccacctgagcaaaaactctttgatgctgttgcgtaccctggcccgcacctaccgccctttcattgggacccagagactagctagggctgtctatgaatcaggggtttagctttgggtgtggcgccttccctggcctgcctacctgtgccactttgtcctctcagtctgtcagggactggagagggagctgagaaggatccaggaaggggagctggaggtttaagaccactgtgtgggctgggcacagtggctcatgcctgtaatcccagcactttgggaggctgagacaggtggatcacgaggtcaggagttcgagaccagcctgaccaacatggagaaaccccatctctactaaaaatacaaaaattagctaggcgtggtggcgggcgcctgtgatcccaactactcaggaggctggggcagcagaatcgcttgaacccgggaggcgaaggttgcagtgagccaagatcgcgccattgcactccagcctgggtgacagagtgagactccatctcaaaaaacaaacaaacaaaaaataagctgggtgtggtggctgacgcctgtaatcccagctagtcaggaggctgagacaggagaatcgcttgaacccagcagatggaggttgcagtgagccgcaatctcgctactgtactgcagcctgggcaacagagtgagacttgatctcgtaaaaagaaaaaaagaaagaaagaaaaaagaccactctgtggtgggggtcctgaggggaacctcagggcctcagtctcccctttatcagagggggtatggctggatggtttcctgaaggtcctaattggtgccctgccctccacccacagagctgaaggccacaggcaccgcccacttcttcaacttcctgctcaacacaaccgactaccgaatcttgctcaaggacgaggaccacgaccgcatgtacgtgggcagcaaggactacgtgctgtccctggacctgcacgacatcaaccgcgagcccctcattgtaagggctggccctgatgtgggacgtggggtgggcacggagccccagggctcagggcatgtccagaaggctgcaccttctgacccccctctctgcagatacactgggcagcctccccacagcgcatcgaggaatgcgtgctctcaggcaaggatgtcaacgtgagtttggtgggatccacaggtgggaagggggaatccacaggtgggaaggtactgcccccagtgagggggcaggcctggccagggcacctatgcagccttccctgtggccccagggcgagtgtgggaacttcgtcaggctcatccagccctggaaccgaacacacctgtatgtgtgcgggacaggtgcctacaaccccatgtgcacctatgtgaaccgcggacgccgcgcccaggtaagccccagccaccctggccctgtgctgcccccgctggtggctgcatcccagggtcctgatgggaggaggggcttcagccccagccctgccacttccgagccttttgaccttgggtgagtgacttctttcacctcgctgagcctcagtttcttcacttgaaaatggggctaaccgctgcctttctcacaggtcggtgtgaggaggaggcagtgagctaaagctcccaaagctcctagcactgtgcctggcacatagtaagcacttgctccatatgtggcaacagctctcttggctatgcctgtggaccgtgccccgacggccgagccagagggcctggtgggggccttgcaataggaggctggacccctgggtcagcttctaccatgtggcctgggggagagctgccttccacccccagggccagggttgtggggagctgccccttccccagctctgccccttcctgcctgcttccacccttttccatttccatgtgggcatgtgtgtgagctggcgtgaacttgtagggcatgtgtgagaatgactggatctgaggggcacctgtgtgtgcaggtgtgtgccaagcctgtgtgtatgtatgtacacacgcatagacgtgctctggggggcccacgtgttcacgtgtgttcctggcctgtgtggtgttagaggctggcagcccgagcccgctcccccagcccctgccacccccagctctaacccctgttcctcgtcttctcaggccacaccatggacccagactcaggcggtcagaggccgcggcagcagagccacggatggtgccctccgcccgatgcccacagccccacgccaggtgggcctcatccctccaggcctttgccaggcagcactgcctctgagcggaactcaccctgggcctgcacctgaggccagcctccccagggcctcccctctacctctgtgcccacaccctgtccccaccccttcccctgaagagccctcaggctcagaaggcatgcccagctggactcatgtcagcctcagtgtgacccctgcaggcaagaaataatgaagccgccaggtggggaagacaggagccctggggacagccatgccttagccctcagaaagcatgtgtgtagacacacaagagcacacaccggtgtggatgtgggccttcctcactcagcacccagagtggaaagtggcacatgagtgcagtctgacaccttactcccaggtgttcgtgccccatgcctcccatgagtcatctgtggacacaggtgtcctgcacactcatgtgcttggggcgctcttctcccgtgtggtatctgtccactagtgatgacctgggtctgggctgggagagctggggctgggcaggggcgggcaggggggcaggggctgccggtgaatgacagagcatgtttgtggtggggagtgcagaaatgcaggatcgtgtggattctgtgtgtgtgtgtccatggtgtgagcaggcggttccgtgtgctggcggtgatatgttcagagctgtgtgtgcacccttgtgtgtgcaggaagtcacgtgtgcagtgtgtagctggaagtaggcctgtgtgcaccttcccatcgccatcctgccacctgctgccacctcctcctgcctctgttcctctctccttgcccctttccttccctctgcctggctttctcttgtggcctctgtgctcacccctgtcccagtgccttttccagccttcctagcatcttgcaggctgggctgggaggcacagggggctttgtgaattccatgtggtctgggctggactccttgactcctggctccctggggagatgtggagcctgggggctgtgctgagggacaggagaaaggtcatggcccattggtccatcctgaggaccacaggtaggacacaaagcctgaggatacagtaaccttagagctctctggcctggctagacctgatggcaaaggacaggaccccaggcccttaaccagtcactcctgccctggccaggtctgcagcgctttcttgacccaagacaggcagccacagcaaagagctgtgcctctgtagcccagggggccttggccagtgtctttatgagccagttggcatggaggggcttcagcccctacaagcccactccatgtccatctcatagcccacaaggcagggccccttgagacttggtccccaggtcttccctaagacctgggactaggaagcaccccccttggagcccacagcatggccctgccctgggagacctggctggatggagtttaaggccaaggaatgctggggagtgtagggggtgggctcggggtatgcctgggggctcattctcaccctgggagcctggtgacccttacacttcctggctgggggactggcctggacgatgctgagccccgctctgccttacaggattacatcttctacctggagcctgagcgactcgagtcagggaagggcaagtgtccgtacgatcccaagctggacacagcatcggccctcatcagtgagtgccccccaaccccgctctacagtctcaatgtgtggcctctgcccctggagatggggcatggcaccaacacttacccaagggcagagaccatgactaggctgtccctgaactccccaaaaggccccacctggcaagggggagagggtgcaggccagaccccactgtgagctgaggtcagagactgggtggtagaagcctccgcctggcccctttggatgggggaccaaggaagccaggtcctaccctgaaacacacaatgtggtccatgcaaagtccagaaccctcctgaccataggcttcctagaagagaagataagccgagtgcgtatcggggctggtctgaggggcagtcccatagcatgttcttggtgtgtctgagaggctgggagagccctgtagcgaaggaccaatggagagttccggccctgtgaccagacggggagagcatgttcctggtctgggtaggtgtctgggagggttgggggctgttctctgagtaggggtcctgccggggtctcaggagcagctgctgcccctaactgcaggttgggtgaacccatcactgaccctggctcatgcacgctgcctgttttctgattgttcaacacagtctgcctctcagagcagctgttgggcactgtgccacctccaagcctgggaaaggccctggggtcaaggggcagacattatcctccccctcttggcaagtgagaaggtcccagcctgatggcacagcccaaatcactctgatgaggaaagacagggcctgccctgggggagcctcagatgtggtatgttagaggcaagtacattattaaattttcaggaattttttgagccagttgttaaagacaactattattaaaagttaaggccaggctcagtggctcacacctataatcccagcactttgggaggctgaggggagtgtatcatttgaggtcaggagtttgagaccagcctggacaacatggtgaaaccctgtctctactaaaaaataaaaaataaaaaacattttttaaattatataagtttacgattaaacattaaaacaaaggtaacaacaataaaaagtaacaaacactcaaaactagccgggtgcggtggctcacacctataattccagcactttgggagacggaggcgggcggatcacctgagatcaggagctcgagaccaccctggccaacatggtgaaaccttgtctctactaaaaatacaaaaattagccaggcgtggtggcaggtgcctgtaatcccagctactagggaggctgaggcaggagaatcacttgaacctgggaggtggaggttgcagtgagctgagatcgtgccactgcactccagcctgggcaacagagtgagactccatttcaaaaaaaaagaaaagacttgaaaattgaaattgatctatgggctgcagaatggatgttgtgttagcaggcatgaaaacaacatttgtctccttgcacacctccatcagagctctgatggagaccaagaccaataagcagtaatattttgaaaggaatctttttttctgagcagtgggtttaaaatattcagaaaaccggccaggcacagtggctcatgcctgtaatcctaggactttgggaggctgaggcgggtggatcacttgaggtcaggagttcgagaccaggctggccaacatgggtgaaactctgtctctactaaaaatacaaaaattagccaggtgtggtggtgtgcacctgtaatcccagctacttgggaggctaaggcagaagaatagcttgaacctgggaggtggaagttgcagtgagctgagatcgcaccactgcactccagcctgggcaactgagcgagactctggctcaaaaaaaaaaaaaatcggtaaaccatgctgtaagcagatgtgctgtcattcaggctttgttgttatttatagagctcaggcagagtagattttgcaaaattctttttcttttttttttttttttttttgagatggagtctcgctctgtcgcccaggctggagtgcagtggtgtgatttcagctcactgcaagttccgcctcccgggttcacgccactctcctgcctcagcctcctgagtagctgggactacaggcacccgccaccatacccagctaatttttagtagagaccggggtttcaccgtgttagccaggatggtctcgatctcctgacctcgtgatccacctgtcttggcctcccaaagtgctgggattacaggcgtgagccaccacgcccacccctatttcacataattcttaagggccctagggttcttggaatggtaaatgagcactggcttcaacttaaagtaaccagctgcattagcccctaataagagagtctgactgtcgttcgaagctttgaagccaggaattgatttctccttgatagccgtgaaaatcctagatggcatgttcttccacgagaaggctgtttctttctttctttttttttttttttgagatggagtcttgccgtatttcccaggctggagtgcagtggcaccatcttggcttaccacaacccctgcctcctgggttcaagcgattctcctgcctcagcctcccaagtagctgggattacaggcgcatgccaccatgcccggctaatttttgtattattagtagagaaagcgtctcgccatgttgaccaggctggtcttgaactcctgacctaaagtgttcctcccacctccgcctcccaaaatgctgggataagaggtgtaagccactggccctggccagaaggctgttttatctgcattgaaaatcgtgtttagtgtagctcccttcatccatgatcttatctaaatcttctggaaaacttgctgcagcttctccatcagcacttgctacttcaccttgcatgtttatgttttggagatggctgctttccttaaacctcatgaaccagcctccgctggtttcaaacctttcttctccagcttcctctcttctctcagccttcatagaattgaagacagttagggctttgctctggattagactttggcttaaaggaatgttgtggctggtttgatcttccacgtaaaccagtaaaactttcaccatatcagtgataaggctgtttcactttcttatcatttgtgtgtttactggaatagcccttctaatttccttcaagaacttttcctttgcattcacaacttggctaactagtgctagcagcctagtttgggacctatctcagctttcaacatgctttccgtactaagcttaatcatttctagcttttttgtttttttttatttgtttgtttattttttgacagagttacactctgtcccccaggctagagtgaagtggcatgatcttggctcactgcaacctccaccccccgactccctgctccccggttcaagtgattttcctgccgcagcctcccaagtagctgggatcataggcgcccaccaccacctctggctaatttttatatttttagtagaagtgggttatgccatgttggccaggctggtctcctgacctcaagtgatcccctgcctcagcctcccaaagtgctaggattacaggcatgagccactgcacctggcccatttctagcttttgacttaaagtgagagataatatgactcttcctttcacttgaacacttagaggccattgtgggattattaattgatctaattttaatattgctgtgtcccagagaatggagaggcccaagaagagggagagagatgggagaatggccagtaagtggagcagtcagaacacacacagcatttatcgattaagttcactgttttatatgggtgaggttcacggtgccccgaaataattgcaatagtaacatcaaagatcactgatcacagatcaccataacagacagtttgaaatattgcaagaatcaccaaaatgtaggcaaggcgcggtggctcatgcctgtaatcccagccctttgggaggccgaggcaggtggatcacctgaggtcaggagttcgagaccagcctggccaacatggtgaaaccccgtctctactaaaaatacaaaaattagccagatgtagtggtgggcacctgtagtcccagctacttgggaggctgaggcaagagagttgcttgagcctgggaggtggaggttgtagtgagctgagatggtgccactgcactctagcctgggtgacagagcaagactccatctcaaaaaaaaaaaaaaagaagaattaccaaactgtgacacagacacagagacacaaagtaagcatatgctgttgaaaaaatggtgctaacagacttgcttgacacagggttgccacaaaccttccttctgtaaaaaatgcagtatttgcagtgcacaaagcccagtaaactgaggtgtgcatatgcttcctaattctttcactacactttattgttagctatgctctttttttgtttttttgtgttttttttttttatttttgttcctgctttttgagacggttgtctcactgtgtcaccaggctggagtgcagtggtgcgatctcggctcactacaacttccgcctcccaggtttaagggatcttcctgcctcagcctcctgagtagctgggactacatgcgtgcaccaccacgctcagctaatttttttgtatttttagtagaaacagggtttcaccacattggccaggatggtctcgatctcttgacctcatgatctgccagccttggcctcccaaagtgctgggattacaggaggcataagccaccatgcccggcctctttttttttttttaagatggagccttgctctgttgcccaggctggagtgcagtggcatgatctcgctcactgcaacctccgcctccctggttcaagcaattctcctgcctcagcctcccgtgtagctgggattacaggcacctgccaccatgcccagaaaatttctgtattttagtataggtagggtttcaccatcttggccaggctggcttccagctcctgccctcaaatgatccacccacctgggcctcccaaagtgctgggattataggcatgagccactgcagctggtctattagctatgctcttgaggtgatttacatttgttgtgtctgtggggtagaaatactgtacagtggtgttggcagctcttcctgattttgctttcagtgacctcaggttggtagcttgaaattagttgtggcaggagtattcacaccacagaaatgggctattgctactaatcagagctgatagttactaatcccaaccctcccagagccagtggtgaaacactgaccagcactccactggagataggatcatgccccagggagcctgagcggggagataaggccctgccctggaagtcatctgagctgtgccctggccctagcaaacagcagccccccaactgacccactggcctacccacagatgaggagctctatgctggtgtgtacatcgattttatgggcactgatgcagccatcttccgcacacttggaaagcagacagccatgcgcacggatcagtacaactcccggtggctgaacggtaagcgcagccccaggagcccttccgtggccatgtgtctgggatgcggcaaggaggtcgtaaagaagcacatgtgggggaagtggggacatgtttagcctatgactacctggggcaggggtagtttcttatctggagaggagttgggggtgttcttgcacctggctggggattctgttggagaacatcaggggcaccatcagagtaggggctcacccagctgacccctgccacctgcagacccgtcgttcatccatgctgagctcattcctgacagtgcggagcgcaatgatgataagctttacttcttcttccgtgagcggtcggcagaggcgccgcagagccccgcggtgtacgcccgcatcgggcgcatttgcctggtatgcattggcagagccaccaggctgccccttccaccagttctggcttcatcagccctgctccagccagggcttggggtcaagagctgatctgacccggcctcttgccccaccccccagaacgatgacggtggtcactgttgcctggtcaacaagtggagcacattcctgaaggcgcggctcgtctgctctgtcccgggcgaggatggcattgagactcactttgatgagctccgtgagtgcccagcaggcaggcagggtgctctggctacagcaagagggatagaggcgggatgggcgatcagggtgcctttggtgggccccctcccctgtgcaggagtgggtggggcccaggggctcccgcccatggcaccctccaacaccttctccctctgtccccagaggacgtgtttgtccagcagacccaggacgtgaggaaccctgtcatttacgctgtctttacctcctctgggtgaggctggggtcagggccagcagtggcagggagtggccccgttgggggattgtaactcgtggagaaccccagcccggtggcgagctgtggggagggggcagtttggggaggggccctaggtggagggtctgtcctgctcagcagcgcctgccatgcccacagctccgtgttccgaggctctgccgtgtgtgtctactccatggctgatattcgcatggtcttcaacgggccctttgcccacaaagaggggcccaactaccagtggatgcccttctcagggaagatgccctacccacggccgggcacggtaaggaccccactcatcctgcctctcccctttctcttcttctaagaggcctctgggtcaggctctttgcaacatgggccccaccatcatggccctcccagccagcggaggcggtgagctgtaatgcacacacagacgggccttcacacacagtgtcaagctgtggaggagcccagatgggattctgggacaaagatggtgggttgggcgtggtcggctgctcctcagagggtcctctgtggggctgtttgggagctgaaggttggggggaagcgtcttccctgcaggtgctggaggcaggctggaggttggctcagctgaggaacaggaggcaaagagctggggaggggcagggccaggcctcaggcagggtctcagaggtcacagaggcatgtcactttatcttgatgtgacaccggctgatgtgggagcctaagcaggagagcagcggatctggtccaatgcagttctgactccatgtagtcaggactgggctggagaagctggtctcagtgggggacaggggaagcttccctccagaggtaacctggagtcagaaggatgggccagaggtaagctggccatgacggggggcaggctgagcccaggttcaggggacagcttcaggaaggaggagagtgagcctggtgtgtgacaaggacgtcggggcctgcagtccagctgtgcaggagggagacgggtgagaccctaggaacaaccagagaggaaggagatgacaggggtggggagggggacatggaagggagtggtccgcttggccaaatgctgccacgaggtcatggcacctgaggccagggaggtggctgtggcatttggccacctgggaccttggccagagcaggacctgtagaggtcaggtgcagggcagaaacttggagagcgggtttggggagaggagcaggttgaggtagtggggacagacagtgcagcggcctcttctgaagctaatggctccagcctgccctgcccaggcagcctgggactgacactcgccacctgtccacagtgccctggtggaaccttcacgccatctatgaagtccaccaaggattatcctgatgaggtgatcaacttcatgcgcagccacccactcatgtaccaggccgtgtaccctctgcagcggcggcccctggtagtccgcacaggtgctccctaccgccttaccactattgccgtggaccaggtggatgcagccgacgggcgctatgaggtgcttttcctgggcacaggtacccactgctgctcccggcctctcccacgctgggcccaccgggtgcggggtgcagatccttggggctggggcttgccctgctagggcttgctgcaagctcatcagagtcacttcttcatcctcatcctttggtgccttctccctattgatgggataacagaggctaggggtgagaaaaccccattcccacttccatccccaggggcccaggagaacagggacactgggcatctggggacttatgtatgtatggcaggaaaggggtggagacagatggtaggcacctccaggatacagaggccatacacatgctcgtgtgtgcacacacatgccacagtgcaccccctacagttccagcagcccaaacacaggagaatgcatgccccagtgtcctgttctcagcagggcccaaaatcagggtctgggttggtgggggcagaccatggccatgaccccctatgtcctgggccagtcccctttgacctggggaaactcttccaccttggcacaaagctccagctccaatgccctaggggggtttgggccctggtgggggaaggggctgaggctggtaccccttccccagcatccccagccccactgaggccctgcccggcccgttccagaccgcgggacagtgcagaaggtcattgtgctgcccaaggatgaccaggagttggaggagctcatgctggaggaggtggaggtcttcaaggtgggtgtgacaccacccagtcctgacctccccacctttaccctccccccagtcccagcctctgacctgagacctctaggtcagggcagggagggggtccctggcatcccaagctgatctttatctttttctaggatccagcacccgtcaagaccatgaccatctcttctaagagggtaagcctttggcgaggtgagccaaggttggggacagggcctgcatcccctcagggtcatgcccttggcacagggatgggtaaactgaggcatggaacaggggagaggagcccagcctagctggctgttggtggggctggctatgggacaggaactgacaaggccctaccctttgccccagcaacaactctacgtggcgtcagccgtgggtgtcacacacctgagcctgcaccgctgccaggcgtatggggctgcctgtgctgactgctgccttgcccgggacccttactgtgcctgggatggccaggcctgctcccgctatacagcatcctccaagaggtgtggacccctagacacctagaattttagcaaccagtcccagggccctatcctaggggattgggggtgcatgtgatattacccggggtgcatgtgatattaccctaggggagtcttatgggtaagacatcactgccctggggaaaaagggccctgccctggagtcagggagatacagggacctgggggggcaagcttcctgggagcactccttcaggggctatcctcatccaggcggagccgccggcaggacgtccggcacggaaaccccatcaggcagtgccgtgggttcaactccaatggtgagtatgctgggcctcactgtggggtgctgctcacactgcagaagtccacgcagcccacgaagctgctcacagggcccccactgtaagggtgctctgatggctaatggagggtgggggctaatggagatgggatgtccctagttgccccatcaacacagagcactacattggtgagtgggtgcccctcggtgcctgccccgaagcagtcagcaggctgcccggaggtgatgctgcttttgctcaacccctctcactctaaagccaacaagaatgccgtggagtctgtgcagtatggcgtggccggcagcgcagccttccttgagtgccagccccgctcgccccaagccactgttaagtggctgttccagcgagatcctggtgaccggcgccgagaggtgagttcctgcgcccggtgctgcaccgtggatgtgagtccttgcacagtggtgaaatgtagtagaggagtgatctggagcaactctcatgctgtgaaaccccttccaagctcccttccctacatgcaaatcctttgagtgaaaacagttacatggaaactccctgggattggcctcattctatggaaagtgtttctgggtatgcctgttcacatgaaaattccatatgcataccacattgggggtgtaccttctacaaaaacatcatgtgagtgagctccagtatgtggaaattctatggggccctcattttatgaaaatgccctacaggtgtccctgtttatgtggaaattctatgtggttatcccaattggatattctcgttaaatggaaattctggctggacgtggtggctcacacctgtaaccccaacactttgggaagccaagacaggcaaattgcttgaggtcaggggttcgagaccagcctgggcaacatggtgaaaccctctctctaccaaaaatacaaaaattagctgggcatagtcatgcatgtggtcccagctacttgggaggctaaggtgggaggatggcttgagcctgggaggcagaggttgcagtaaaccgagatcattcaactgcattctagcctaggcgacagagccagaccttgtctcaaaaaaaaaaaaaaaaaaaaaaaaggaattctgtgtgtgcttcaaattttcctcattgtacagaacctccttatggtcatcactcctgaaatggaaatctgtacagatgccttattcaaatatctctcattatgtagaaacttcatgtggtttttctggcatatggaaatcccacatgggtgcctctacacggaatggccacaaaggtggtctgatctggttgctggctagggccatagggtggtcacagagcctctgaaccccctctccttgcccctgcagattcgtgcagaggaccgcttcctgcgcacagagcagggcttgttgctccgtgcactgcagctcagcgatcgtggcctctactcctgcacagccactgagaacaactttaagcacgtcgtcacacgagtgcagctgcatgtactgggccgggacgccgtccatgctgccctcttcccaccactgtccatgagcgccccgccacccccaggcgcaggccccccaacgcctccttaccaggagttagcccagctgctggcccagccagaagtgggcctcatccaccagtactgccagggttactggcgccatgtgccccccagccccagggaggctccaggggcaccccggtctcctgagccccaggaccagaaaaagccccggaaccgccggcaccaccctccggacacatgaggccagctgcctgtgcctgccatgggccagcctagcccttgtcccttttaatataaaagatatatatatatatatatatatataaaatatctatattctatacacaccctgcccctgcaaagacagtatttattggtgggttgaatatagcctgcctcagtggcagcatcctccaaaacttagacccatgctggtcagagacggcagaaaacagagcctgcctaaccaggcccagccagttggtggggccaggccaggaccacacagtccccagactcagctggaagtctacctgctggacagcctccgccaagatctacaggacaaagggagggagcaagccctactcggatggggcacggactgtccaccttttctgatgtgtgttgtcagcctgtgctgtggcatagacatggatgcgaggaccactttggagactggggtggcctcaagagcacacagagaagggaagaaggggccatcacaggatgccagcccctgcctgggttgggggcactcagccacgaccagccccttcctgggtatttattctctatttattggggataggagaagaggcatcctgcctgggtgggacagcctcttcagccccttctcccctccccgcctggccagggcagggccaccccactctacctccttagctttccctgtgccactttgactcagaggctgggagcatagcagaggggccaggcccaggcagagctgacgggaggccccagctctgaggggagggggtccgtggtagaggcctggggccggtagaggctccccagggctcccttatgtccaccacttcaggggatgggtgtggatgtaattagctctggggggcagttgggtagatgggtgggggctcctggtggccttctgctgcccaggccacagccgcctttgggttccatcttgctaataaacactggctctgggactag

SEQ ID NO: 15801 - DNA, 30055 bp, Homo sapiens
ctgactggtgctccctctcttccatcttgggctgtctgcatgtgtctcattcccccactctctcctgtgcctcccctctaccgtaataatcaggtccaggtttctctgtactgggagaagacctgtggctggagcaggcagggatgcaccctatctgttccccattcctccaggtgggagggagaaggagtaacccactttattggccacagatgcaggggagaaaggagaaagcatgctgggagctggaaagagccctaagatcacctggttggtctgggccctgtgaatggaattcagcatgccatgaggggtagggtttgagtctccagcagcccccatcagttctggtgaccccaggctggggcctattggtactatctccccagacaaaggcaggccaaagaacgcacatgaggtgtgcacacaggggcattcatggccccaggctgggggtggaagcgtggaggtacccatcaacctctttgttcaccttgggtagaaattgaactcccccatctgcctcacacattccaatcttggttccccttcccaggtttctagagagtggagcctgcttcctgggccctaggcccctcccacaatgcttgtcgccggtcttcttctctgggcttccctactgaccggggcctggccatccttccccacccaggaccacctcccggccacgccccgggtccggctctcattcaaaggtaagaagctgttttgttcttccccagaaatcatcctctctttacaatagcgctcggctcctctgcacacgagagaaagggtgggtcaggacaaaaccaggacaaattgtacagccacataggttgtgggggagaagggagaccggggaggtggtggcttgctgggaaaggctggagaactgacccatttagacacttagcaaaagagtccagagtctgggcatcttccagagtcagactgtgggttcctgggctgggtggcctgaggtctgtagggcatgtctttctgtatgataattggagaggtggcaatgtcactccttccaaacttatgtctgctgcggcccctccttgccactgctatgcatctggtcctgccctgagcagcccctggggtggaaggtcaggcagttgggcagacactggaacctctggacactggaagagcaggacctgctctcttggggtgtgggtgctcgaggagccttcctatggtctccaagtgggaagggttcctagaatccaggaggggactgttggctgtgactggcagggaggccgccggtgggttcaggcagagcacgtgctgctgtgagggcctgagctcctgagctccagtgagcactttgatgagaagtcactgggaggtttcagtgatgggctggggtctgcagagtgagaggctggtcgcccgctccatcaccattgcacttaacccactggacaggtgcacgcacacggtacacacatgggtgtacaaatggctcactcgagagccacttcctcaagggtgtgtgtggtctgaagagtctcccctgggcccagggtgaggggcagtggccatgctggggcctgggggacctggggtcattgggagttctcagccttggccctcctctggccagaggtaacttcatccagccgcctgccctgggtggggtcgactcagccctggctggccagatttccgggcagccatactggggtgaaaggctggggtgacctttccttcctcgggcttggcggaggcccagccctcacctcaccatgtcccccagcagggcccctcccctggcctcgtcccaccctgccccttgatgggaggagtaggggagtaagctgcttatcatcactcttcccagtcacccggctcctggaatttctgaggctgtgcctggaaggagtcccctgcagggcctgagaaatgggctgagaagagttaatttgtttgggctggaaagcaccccccttccccgggccccaggaaggtgagatatttattctgctgatacctccacccttccctggtggaattcttcagagcagattaataaatcttgaaggggccagttcccccaaacccctccccagcccagggtctggcagcgagagtagagtgtctcctcccccgatagtggaagggaggggtggcttggtctccacacccctgggaccttgcgtccgctctgggtgttgtttttgtcatcatgcatgcaagtaagcaggaggggcaaaacagagaggggtcttccgtgtgctccttctaagcctccctggacctccaggggcaaagagttttgttcctgttttccagagagagaaactgaggctcaggcaagggcagggtcaaggtcaggcaagaggcagaggcaaagccagaaatagaaccctggtgtcctggccttgccggcgcccacatcgcgtcaggtcgattccctctcaattagctctgaagccgacacccgcagtgactaaaagctgagctcactggcagccagcctgggtgttgccggttgtggcggcctggggtggggctgcagcgcacctggggccacccatcccagggctcctgtgcctttgcacaggcaggttcccctgccctgaatgaccttccctgttccgacctggtctcgtgtcctaattttgtgcttagacttcacttactactgtatgacaggccccgtgctgagtgctggggactctgtggtgaacaagatagggtgctcacagtcaagctggtggaaaaagcaatggatatccagttggtcagggccatctgggagcccagcacctgctgtgtaccaggccctgtgtatccccctacactgggtggtctcagcctggttatgcacacatgaagtggccctcagtgaggagcaggcgcccaccaagtgtgtgtggagtgagaatggagaccaacacttcaagaaactgggctcccaccatcttcctcccagagtacacgtgggtggcacagagaaggttactctcagaagcactgctggtcactgtggctccatgtcatagttttttcatctgtgccttggatggacacagcagttgacaccccaggcctcaggggctcaggctgggcactccctgccctgccctgccctgggtcctgctgtagtggggaggtgccggttcctgcctgggtagggctggaccctccaagctagaggtgctggcataaggggccacactgcccagggtagataaaggaacaaaggcaggaactgggccaggcttgggtttgctgcccgcccatccgcctgggcaccccagccaggtctagagccagaagggtgtgagggtcaagcagcccagggttccctcagattaggggggctcctatggcccagcttctgggcttcagcagcacagccaaaatcaggcagaagtgagggtcaaatggagatttccaggagcaggtgaggtgtttgttcattccttgctcttgagagagtggagcctgggctggaagcctggacagaccctccttccttcacccatccatgcctgggcctggagtcccctacactgcagaatcactgccaaatctcagagaaaaagctcttccttcccccaccttgagatgacccaggctctggggcaccacctccctccgtggcagcagcagggaggtgtgagggccctgccaggccctttgttcagcctggggagtgtttactttttcccaggaagctaccccacgacacactgctgctgcctgggctgggtttggccagggattggggccaagagatgtttggtggggtagaaggaccctgtgatgacatgagacagttgtgctgctagggaagctgaggcagaagtagggagagggagcagaaggtcaccctgccaggggaggtcaggaaagatgaacataatcgaaatagtagtaggagcccatgaggataaccaagcaatggtccctccaagacctaaagagggtctgcctaggtttcctgtgaggaaggaggcttacgggggctgagcggcttcccaggtcactcaggagcaggactgagatggagcctgcatccgcctgatgcctgaggctgtcccaggactgagagtggagggcagggatggtggtggtgctggaggcacagacccttcacatgagctaggaacaaggaagattccagcattctgcagtgctggtttaggcttcctagcctcgtttcccaaagaaagggctggggtcgcactgggcaggctccccatgccctctgtctgccgaagcaacggaattggggtttgcttatttccaggctataaatccggccctccatcactctggcccttccactgagcagggtccctaggaaggcctctcatgtcagagatgggaacatcagggcctaagagaggaaagggctcctgttccagagcagcctggagtttgagccctccaggccaatagcccagaacagtgccaccgctcacatcatttgcatgtggcatcagaggaccaaggttgccaggtttggagatgatgaggttagaggttaggaagggtcacagcccgttgacttcccctcaggagttgatgtgagttgaggtgcctctagcaagccttgatggggccttagccctcaggcctggtgcaggagtaggggtggggctggagagctagaggacatgctcttgccccccaggggctccttggccagccagagcaaggcatggggctttggtgggggaggagggggaggaggcccaggagctttgaggccagtgtggcaccagggagctgggcaagggtcaggtggctctggcagctacagtgggggttggagctcacaagccagggagggtaggtgttccaggatacgccaggatgagggaggaaggaagacccaaagcatgaacttgagcccagatcccttgaggccagatctggagtttcagttttctggaaatgggagctgccttactcctgagagacttggaagtggccgctttggagttgggaggtcctggaagctgcacatcccccaactggctaggaattggtctttggagagaatggagacagggtccttgtgcttgctggagaacctgcctgacgcccagcctgggtcagccaggccaggggctggggctttcagctgtggccttccaggtcaagtggagcttcagatgggacctccactgtctgggcctccgcagcacaggccttgtctctggttccctggcatgatgcccgcccctccttccctggctccagcttcccttggcactaagtgaggagctggtgcatgctcaaggagtaaatcatgttccttggcagcccccactgcttcgtaatcgtaaagaatttaaagagaaaccgccaagataaaaatctcaccagcccataaaggcatctttcaccctgcagcttgggagacagtgagcctcagagtgggctcttggctgtctgcacctgtgtgtatgcacctccggccccttgactcctccagaggtggtaatagctcagaaggtggctttagggccatgggtacctggtccttgactcctgggagacctccatctcctcactcaggagagtggggtgcttaaatttggtgtaatgcagaagtggtgatggtggtggctgagctagctggtcccaaaggcaaaacccagttctaccagtgttagctgtgtgagttcagccaagtggcttagcctctctgagccctggtttctcctgtgtaaggtgggaatggcagtggccctgtggaagcagcatcatgagggctcagactgtcttgcttgcatcctggccatgggtggatcttgcttggtgaacatcattctgtgttcccactgccttttctggaaaatgggagtaagaacaatactggcctcgttgtgttgtcaggaggattaactgtgtgagtatggtcactgtggaagaaatctcagtcaccaggagcgatcctgaggctggtgtgcaggtgagggcaggtccaggggcatgccccaaggagtcccagactgcctcaccccttcctccagaattctaacttttggtaagggagatggtatttggaaaggactccaggaaggaccctgagtcctgtggggtgggtggagtagggtcaggaggaggaaaattcctaccatgggtatctgggcaggcttcatggaggaggctgcatcttgagcaggggaggggaggttgtaggggagggaagagctggagcacagggagggtgcatgtggtgcagcacctggggaagaggacagatgctagatgcagtcttgcttttgggacaaggatgtagagttctactttctgtttctggtttttaagctctttttcctcatggcagaggtactaaatatgtattatggaaaaattccagtgatacggatgcatttggcgggagtgatgccttggaagtagctccctagagactggctccaaggcctggttgggacgcacagttggctgcaataactccttctgtgaatgctgctccagctcctgccgtgtgtcctaggggtgaccagacctgggctgctcactcaggcatctgcagggctgggcagaaagcatgtttgcctggcttggcctggtgctatcctgggaatctgagccccgcctcaagaagccctgggagctttggagaagcagagaggattcctgctgcatttttcttagaaatagcaagagggcctttgccagaggcctggatgccagaaggctatggtctgaatccaaagcctagctcacgtgggtgccagagcttggcaggcctacagccccccacccagcctgctgggcagccccagggagagggtggaggcctcctgggctccagtccctgaccactggtcctgacccagcaacgaatggggtctgggcagtggctgctggcctaggattggggggctagcctgttggggagggagtggggctcatcgggctgacgggctgggctgacttctggcactctcactgggccgaggggagcactggctatctggtgcatctctgcagggcaaagacagacccaaagcaaccggcccctccagggatcaggaagcctcagctccggatcccccttcccccactcttcttccttccttcctccccctactcccccttgcctccacccctccctttgccacccctcttggcttcctacccggacatgctctttcctcggacgtctctgtacccagccaagagccttgttccttcccacttggggctcggtgctgatgccctcatttcccccggccagagtccactgcctcgtgtgtctgctgttcagccagcacggttgccttctaagggtcatacactacaattggcagagcggctagaatttgggagccctttgggctcctacagctccaaggctgagtggctagcactccagggggcctctcccagggctgcctgtattgccatttttatcagcgccttcctggctgggcctggggcctgtgcggagtgctcactgcctgcccttgactggctacctgctgagtcctgctgaggtcctaacccagcctcactgcatcctccaaggctgaccccaagcatgcacctgtctgccctgtgcctcggtttctccatcagaatgttggggaggggctaagactgtctggaacatcccgggaatctctgggtgggtgttgtgaaggggctgcagggaccgcaggaatccgaggaaggccgcagagatgggggctgggcccaggggagggggagggttttgacacccaccagcctgttggtcccatcttggcctgtctgtctgggtgatttatcagagtaaatgagccatggagagtttgttgtcttttgcagtcatggggaggaggaggtggtggaggaaggagtgaggggtttccgggccaggtctggaatgtgggaggaggaggtgggtcccccgggggcctctgaaactggaggcactcactgaatggccttttcactctccccacctgagaaatgaatcagtgcagccctccccttcagaacaatcccctctttccatccccttcatacttcttggggcacattcctgtgtgatctgcttgtctggtcatcttctcccaccccctgctcaggaccaggtctcttgaccacagtgtccttccaaagctgagccggagccctgacttgcccagctggtgaatgcccaaatgtgttctcacaggcaaccatgcacactgttaagttccaagtgggacgtctaggcctctggaactaccagcccaggcctaggatggtcaggtgcatggaccatggggaaggcaggggtcagtggaggtgccgaggccggagagaccccatctgctgggacagaaggtccgaagtcattgggtgtccttcggggatgaggcatggatcccctggttcccggctggcgagtcagggagtgatcctgctgctccgtcacttctggcttttcctggtttgaggctgagctgtgccctcagcctatcctgtcctgggcggagtaggtgagcactggggcggaacgggcgtgggaacagcatgcctggacctgctggccccagccccctgccccctgcccccagcctttagtcactgaaatgggagggaagtgtacagtggcgttttggcccagctgggctctttacccctgtacggtgtttactgaacagctgggatgtttacagtagcccttgcaaaggggcccctcgttgcaggggatttcccatcttgagggtcccactggggctcttctgacctcaccaattccctgcacccctgggatagatgtgtcagggatacagagaccataaccatctccaccttaccagagccagtggtgcctgtccccttggcctctggccttcggttcctctgctctggaggagccaacatttcccaccacatttcctagagtggcagctctaggtggtgaaatacggtaactgggtccccagttcagacatttaaattaaattcaatcagagcggttattgaataaaaacacgcggagtcatttacatgttaattatgttgaatggactactagaccataattagttgctaattgggtgagagtggctgtaattggttttgttggcaccaacctggctcacctacctggggggaagcgggggttggtgtggatggctcctagggaggccctctgggtctccaatctggaaggcctggctagagatgctatgcgggggcagatctccaggggcttagggtcagaggaacctggaacctctccccagggagggtgcagctggggtctggcttctagggttcccatccagagcatagggggaaaagggggaactggaggagctaccccagatcagcagtgatagtctcccctgcccagccccatgtgggacctgggcttgaacaaatggtaagtgcccaagagtgggtctgtgggagcccaaggcaggcgtcactcaggtgtgtctctgcacatactgggccctgggttggcctgatcagggtggcgttggggtgtaagtgggtgtgccaagcaggaggaaggtacgtacaaaggcatctgggcctccctgcccccccgcttagcttggctggggttcccggggttgtaggtctgtggccatgggctgaggccttccggctggccgctcattaaaagaggattaggctgagagccagggggccagcccagtccccaggccttcctctggggctcctcacagctttgggggagtgataaaagggccggggccaccccttcctggatcctgtgggggtatccggtagggaccacctgggccctgccatgcctcttgccgccactgctactatagccttggctacctcagtttccctcctcagaaggtcaggaggtctgtctttccggtgggtgaaacactgacaaagacccaggctggtgcctccccttgtcccccagtcccatctctcttcagctcagggattagggctgcactggctcactagaggtcagaggtctgagctaggctgcagggatctgtctatcatccccagtccccatcactgctgggggaggtgacgctgtcagtcagggcctgctgctttgtggggctataaccaagggggcgggctgcccacctctgctccaagactcctctttttgcggcagcccacacctcactgcacgcagacctgatgtcctggagaccagcagcaaggggtaggggctgcccacttggggtcttcgggtgagggctgtggacacgcctcctcagtgcctgtcctcacctgcccgcacctttaaagtaaggtatcaccagctgcttcccagatatgagggaccgggggcccccaggacccagccccgtgtgccttgagaaggtcctgcctctggacctgtgccaggccgctttgggctgggaccccaagtgcttgatggccatgagagagtcctggaggccaggaatggctgcggaaatgaggtgtctgatgccagaaaaggctcttccttcccgatgatgggaaaatccttcccggatgtcacccctcccaacctgtgcccagcctgggtgagagtatgggggtggggagcccttcccaggagacagcacccaggcacaccacccttcctccccctaaggtcaaagcttatctgggctggagtcctgatccccacagaacccttgattgtgcccagcccctccctcaacattgccatggcattcgaggaggcatggcgctcctgctgccagagccgggcgtgggacaagtggagcagatgtggggattggccttaggacatgaccaggctgggtctgcatcagccctggcccccactgatgccacctcaggtcccaggttcctttgttccttctgtcccaagtccctgtcccttaagggagctggggcctggtaggatctggcacctgctgatggcaggttttggaggaggatacccagggctacttgcccaccccctgctctgactcaggctgcttggaggagtgaaggctcccagttcctttgcctcatggtggagtggggagcaggggacaggacaccctgtgacctgggttgagtaccactctcctttgggcctcagtcttcctgtctgcagctgggggtgcagggctgtcacagggctccttgtttcccttttcacctacagtctggcatgagtggggtcagaagtccagctgtgggttgagaaggctggaaccttacaccttctttgctctgggacccggggaagttcccacccctctccaccttggttcccctctggtaggctgggtttggatgaatggtttgggatttagctctattcctgtgggttggggatggggtaaggacacactggagttgggaaggctggagctgagtccacaggttgcctcttcctgccttatagccctctctgctccccaatctagcactaggaaatggagtagctggggtgggaatggggatggatgccctacaagagatagcgacacgtggaagcctgcttccttggggaaggacttgggacctcattccactctcctttccctgaaaggcagagacacccatgaaggatgggttgggggaagacctgaggaatgccaggccgtgagcctctctctgagatcagaacggggtcactgatcctcagggtcactttgaatatcagtaccaggagggcctgagagatggtctagactagagaatgaggctcagagagcgagagtgcccccaactcaggtcatgaagctcacccagaaactcaagccatagccaaggatccctgatcctgggtcccaccccttccccaccatgcgcgacctcctggggctccccctccccccacactgtttccacagtgaccaaagcgtcacgtcctgtgacaccagagccattgacgccatatcccgtggccactgggaggggtcccgcaggtcctgagtcatgtgccctgtccacggggagcgagtcaccttccggccctggccctcctggcaggcagtctctaccaccaggactggcttcccctgggcctccccctccttcagccatggacctaggtgggaatcccacccccatgcactctggcatgtcacatcccttccctgtgccctgtgcccttggtattgtgagcacagggctttgtgcacagcgggtgttcgataactgagcaaggggctccctccacccccacctccacccaggggcagactgggggcagcaggcagagagggtcgaggccaatcctctgcccctaagctgggactcagtttcctcatcctctgagtgttctctacggcctttctcacagagggagctggagtttgggagtgctggggctttgcaagagggtaggggactcggacttgggcctcgggctctgggagtcttggtgcagggttgatattatagaggcccaaggctgcgcagggttggagcttggggattatggctgattgggttcctgggggcttaatggctgaagcttccccttacccggagtgcccgtgtctgaaggcgcccacttaagcctctagcccctccccctgccattgcccccaaagtgccccctagcccaggggatgggtaagggcatgaccgagccatgcccccagccagggtataaataacccctggcgggctgtcccagcctgggggggctccactggcagccccacttcctctctggccacttcccagccctgggggtgggggaatgtttactttcctgttgtcactgtgggtgagcagccaggcgggtgagcggccaggcgggggactccgagtggcccaacaacaggtgcgggacaggtgcctgggccgccctgcccaggacttcagaggcgccgctggacaggcgggtgaggccatcgccaggcaggatcggccctttgatccctcggcgtccctgcgtcccagcggttggccaaggtcatcacctgcattcccttgtcaccgcatagtcagggccaggcagggcaagacctttccttacccactagtttctcagagtgaggtcctgggaccagacatgggctctgggtcagctggtggaaccccctgaccccagcccacctctgccccaccttcaggctgtgtctagggcctcggatcccagctgttctccccctccaggtgccttggggcctggcccaggcctctcccttgactgccccacctgtgaaatgggttaccagctggggaggggagatgagacatgtgtgacccccttggtgagtgcctcatgtgtggtaggacatgtgtgcgccatgtgcatgcctgtgccacgtgtatacatgcatgcactcttctgtgtgctgctatcttaagccccctgtgtgtgtgaatattcatcatcctcattacagtgttccctcttttgctgagctaaagatagctgggggtgggtggagagggggcttgccaaggggacccctcggctctccctccccttggaggcaggttcccaagcttctaggagtcctttgtctgtcattgtctgagccccctcctgtccttcatccttaggaaggacttttccccagcatcctggagttggaggggccaaggctgctggactcatgcaaaagggaaactagaggacccagttgaaccctgcctttagccccagggttgtagctccagggagagagcctctttcccagaaatgactgtcctggctcattcaaggtggcctgagagttccaccattagcagccttatagggtctgggggaagctggggtccgtagggcagtgtgtccagcagggctttctggtctcctggctaacctgcttcagaccaagtgaggaccttgctgtgcaccagctgtgccctctgcctggtgggcagccagggtaagaacagggcatccaggctccatgccagagtctgccggctgtcccagatatacccggtcacacccctatctgctcattaacccttttaagcccctgtgtgaagctggccccaccctgagcgtgggagcattaacccccacctgagcaaaaactctttgatgctgttgcgtaccctggcccgcacctaccgccctttcattgggacccagagactagctagggctgtctatgaatcaggggtttagctttgggtgtggcgccttccctggcctgcctacctgtgccactttgtcctctcagtctgtcagggactggagagggagctgagaaggatccaggaaggggagctggaggtttaagaccactgtgtgggctgggcacagtggctcatgcctgtaatcccagcactttgggaggctgagacaggtggatcacgaggtcaggagttcgagaccagcctgaccaacatggagaaaccccatctctactaaaaatacaaaaattagctaggcgtggtggcgggcgcctgtgatcccaactactcaggaggctggggcagcagaatcgcttgaacccgggaggcgaaggttgcagtgagccaagatcgcgccattgcactccagcctgggtgacagagtgagactccatctcaaaaaacaaacaaacaaaaaataagctgggtgtggtggctgacgcctgtaatcccagctagtcaggaggctgagacaggagaatcgcttgaacccagcagatggaggttgcagtgagccgcaatctcgctactgtactgcagcctgggcaacagagtgagacttgatctcgtaaaaagaaaaaaagaaagaaagaaaaaagaccactctgtggtgggggtcctgaggggaacctcagggcctcagtctcccctttatcagagggggtatggctggatggtttcctgaaggtcctaattggtgccctgccctccacccacagagctgaaggccacaggcaccgcccacttcttcaacttcctgctcaacacaaccgactaccgaatcttgctcaaggacgaggaccacgaccgcatgtacgtgggcagcaaggactacgtgctgtccctggacctgcacgacatcaaccgcgagcccctcattgtaagggctggccctgatgtgggacgtggggtgggcacggagccccagggctcagggcatgtccagaaggctgcaccttctgacccccctctctgcagatacactgggcagcctccccacagcgcatcgaggaatgcgtgctctcaggcaaggatgtcaacgtgagtttggtgggatccacaggtgggaagggggaatccacaggtgggaaggtactgcccccagtgagggggcaggcctggccagggcacctatgcagccttccctgtggccccagggcgagtgtgggaacttcgtcaggctcatccagccctggaaccgaacacacctgtatgtgtgcgggacaggtgcctacaaccccatgtgcacctatgtgaaccgcggacgccgcgcccaggtaagccccagccaccctggccctgtgctgcccccgctggtggctgcatcccagggtcctgatgggaggaggggcttcagccccagccctgccacttccgagccttttgaccttgggtgagtgacttctttcacctcgctgagcctcagtttcttcacttgaaaatggggctaaccgctgcctttctcacaggtcggtgtgaggaggaggcagtgagctaaagctcccaaagctcctagcactgtgcctggcacatagtaagcacttgctccatatgtggcaacagctctcttggctatgcctgtggaccgtgccccgacggccgagccagagggcctggtgggggccttgcaataggaggctggacccctgggtcagcttctaccatgtggcctgggggagagctgccttccacccccagggccagggttgtggggagctgccccttccccagctctgccccttcctgcctgcttccacccttttccatttccatgtgggcatgtgtgtgagctggcgtgaacttgtagggcatgtgtgagaatgactggatctgaggggcacctgtgtgtgcaggtgtgtgccaagcctgtgtgtatgtatgtacacacgcatagacgtgctctggggggcccacgtgttcacgtgtgttcctggcctgtgtggtgttagaggctggcagcccgagcccgctcccccagcccctgccacccccagctctaacccctgttcctcgtcttctcaggccacaccatggacccagactcaggcggtcagaggccgcggcagcagagccacggatggtgccctccgcccgatgcccacagccccacgccaggtgggcctcatccctccaggcctttgccaggcagcactgcctctgagcggaactcaccctgggcctgcacctgaggccagcctccccagggcctcccctctacctctgtgcccacaccctgtccccaccccttcccctgaagagccctcaggctcagaaggcatgcccagctggactcatgtcagcctcagtgtgacccctgcaggcaagaaataatgaagccgccaggtggggaagacaggagccctggggacagccatgccttagccctcagaaagcatgtgtgtagacacacaagagcacacaccggtgtggatgtgggccttcctcactcagcacccagagtggaaagtggcacatgagtgcagtctgacaccttactcccaggtgttcgtgccccatgcctcccatgagtcatctgtggacacaggtgtcctgcacactcatgtgcttggggcgctcttctcccgtgtggtatctgtccactagtgatgacctgggtctgggctgggagagctggggctgggcaggggcgggcaggggggcaggggctgccggtgaatgacagagcatgtttgtggtggggagtgcagaaatgcaggatcgtgtggattctgtgtgtgtgtgtccatggtgtgagcaggcggttccgtgtgctggcggtgatatgttcagagctgtgtgtgcacccttgtgtgtgcaggaagtcacgtgtgcagtgtgtagctggaagtaggcctgtgtgcaccttcccatcgccatcctgccacctgctgccacctcctcctgcctctgttcctctctccttgcccctttccttccctctgcctggctttctcttgtggcctctgtgctcacccctgtcccagtgccttttccagccttcctagcatcttgcaggctgggctgggaggcacagggggctttgtgaattccatgtggtctgggctggactccttgactcctggctccctggggagatgtggagcctgggggctgtgctgagggacaggagaaaggtcatggcccattggtccatcctgaggaccacaggtaggacacaaagcctgaggatacagtaaccttagagctctctggcctggctagacctgatggcaaaggacaggaccccaggcccttaaccagtcactcctgccctggccaggtctgcagcgctttcttgacccaagacaggcagccacagcaaagagctgtgcctctgtagcccagggggccttggccagtgtctttatgagccagttggcatggaggggcttcagcccctacaagcccactccatgtccatctcatagcccacaaggcagggccccttgagacttggtccccaggtcttccctaagacctgggactaggaagcaccccccttggagcccacagcatggccctgccctgggagacctggctggatggagtttaaggccaaggaatgctggggagtgtagggggtgggctcggggtatgcctgggggctcattctcaccctgggagcctggtgacccttacacttcctggctgggggactggcctggacgatgctgagccccgctctgccttacaggattacatcttctacctggagcctgagcgactcgagtcagggaagggcaagtgtccgtacgatcccaagctggacacagcatcggccctcatcagtgagtgccccccaaccccgctctacagtctcaatgtgtggcctctgcccctggagatggggcatggcaccaacacttacccaagggcagagaccatgactaggctgtccctgaactccccaaaaggccccacctggcaagggggagagggtgcaggccagaccccactgtgagctgaggtcagagactgggtggtagaagcctccgcctggcccctttggatgggggaccaaggaagccaggtcctaccctgaaacacacaatgtggtccatgcaaagtccagaaccctcctgaccataggcttcctagaagagaagataagccgagtgcgtatcggggctggtctgaggggcagtcccatagcatgttcttggtgtgtctgagaggctgggagagccctgtagcgaaggaccaatggagagttccggccctgtgaccagacggggagagcatgttcctggtctgggtaggtgtctgggagggttgggggctgttctctgagtaggggtcctgccggggtctcaggagcagctgctgcccctaactgcaggttgggtgaacccatcactgaccctggctcatgcacgctgcctgttttctgattgttcaacacagtctgcctctcagagcagctgttgggcactgtgccacctccaagcctgggaaaggccctggggtcaaggggcagacattatcctccccctcttggcaagtgagaaggtcccagcctgatggcacagcccaaatcactctgatgaggaaagacagggcctgccctgggggagcctcagatgtggtatgttagaggcaagtacattattaaattttcaggaattttttgagccagttgttaaagacaactattattaaaagttaaggccaggctcagtggctcacacctataatcccagcactttgggaggctgaggggagtgtatcatttgaggtcaggagtttgagaccagcctggacaacatggtgaaaccctgtctctactaaaaaataaaaaataaaaaacattttttaaattatataagtttacgattaaacattaaaacaaaggtaacaacaataaaaagtaacaaacactcaaaactagccgggtgcggtggctcacacctataattccagcactttgggagacggaggcgggcggatcacctgagatcaggagctcgagaccaccctggccaacatggtgaaaccttgtctctactaaaaatacaaaaattagccaggcgtggtggcaggtgcctgtaatcccagctactagggaggctgaggcaggagaatcacttgaacctgggaggtggaggttgcagtgagctgagatcgtgccactgcactccagcctgggcaacagagtgagactccatttcaaaaaaaaagaaaagacttgaaaattgaaattgatctatgggctgcagaatggatgttgtgttagcaggcatgaaaacaacatttgtctccttgcacacctccatcagagctctgatggagaccaagaccaataagcagtaatattttgaaaggaatctttttttctgagcagtgggtttaaaatattcagaaaaccggccaggcacagtggctcatgcctgtaatcctaggactttgggaggctgaggcgggtggatcacttgaggtcaggagttcgagaccaggctggccaacatgggtgaaactctgtctctactaaaaatacaaaaattagccaggtgtggtggtgtgcacctgtaatcccagctacttgggaggctaaggcagaagaatagcttgaacctgggaggtggaagttgcagtgagctgagatcgcaccactgcactccagcctgggcaactgagcgagactctggctcaaaaaaaaaaaaaatcggtaaaccatgctgtaagcagatgtgctgtcattcaggctttgttgttatttatagagctcaggcagagtagattttgcaaaattctttttcttttttttttttttttttttgagatggagtctcgctctgtcgcccaggctggagtgcagtggtgtgatttcagctcactgcaagttccgcctcccgggttcacgccactctcctgcctcagcctcctgagtagctgggactacaggcacccgccaccatacccagctaatttttagtagagaccggggtttcaccgtgttagccaggatggtctcgatctcctgacctcgtgatccacctgtcttggcctcccaaagtgctgggattacaggcgtgagccaccacgcccacccctatttcacataattcttaagggccctagggttcttggaatggtaaatgagcactggcttcaacttaaagtaaccagctgcattagcccctaataagagagtctgactgtcgttcgaagctttgaagccaggaattgatttctccttgatagccgtgaaaatcctagatggcatgttcttccacgagaaggctgtttctttctttctttttttttttttttgagatggagtcttgccgtatttcccaggctggagtgcagtggcaccatcttggcttaccacaacccctgcctcctgggttcaagcgattctcctgcctcagcctcccaagtagctgggattacaggcgcatgccaccatgcccggctaatttttgtattattagtagagaaagcgtctcgccatgttgaccaggctggtcttgaactcctgacctaaagtgttcctcccacctccgcctcccaaaatgctgggataagaggtgtaagccactggccctggccagaaggctgttttatctgcattgaaaatcgtgtttagtgtagctcccttcatccatgatcttatctaaatcttctggaaaacttgctgcagcttctccatcagcacttgctacttcaccttgcatgtttatgttttggagatggctgctttccttaaacctcatgaaccagcctccgctggtttcaaacctttcttctccagcttcctctcttctctcagccttcatagaattgaagacagttagggctttgctctggattagactttggcttaaaggaatgttgtggctggtttgatcttccacgtaaaccagtaaaactttcaccatatcagtgataaggctgtttcactttcttatcatttgtgtgtttactggaatagcccttctaatttccttcaagaacttttcctttgcattcacaacttggctaactagtgctagcagcctagtttgggacctatctcagctttcaacatgctttccgtactaagcttaatcatttctagcttttttgtttttttttatttgtttgtttattttttgacagagttacactctgtcccccaggctagagtgaagtggcatgatcttggctcactgcaacctccaccccccgactccctgctccccggttcaagtgattttcctgccgcagcctcccaagtagctgggatcataggcgcccaccaccacctctggctaatttttatatttttagtagaagtgggttatgccatgttggccaggctggtctcctgacctcaagtgatcccctgcctcagcctcccaaagtgctaggattacaggcatgagccactgcacctggcccatttctagcttttgacttaaagtgagagataatatgactcttcctttcacttgaacacttagaggccattgtgggattattaattgatctaattttaatattgctgtgtcccagagaatggagaggcccaagaagagggagagagatgggagaatggccagtaagtggagcagtcagaacacacacagcatttatcgattaagttcactgttttatatgggtgaggttcacggtgccccgaaataattgcaatagtaacatcaaagatcactgatcacagatcaccataacagacagtttgaaatattgcaagaatcaccaaaatgtaggcaaggcgcggtggctcatgcctgtaatcccagccctttgggaggccgaggcaggtggatcacctgaggtcaggagttcgagaccagcctggccaacatggtgaaaccccgtctctactaaaaatacaaaaattagccagatgtagtggtgggcacctgtagtcccagctacttgggaggctgaggcaagagagttgcttgagcctgggaggtggaggttgtagtgagctgagatggtgccactgcactctagcctgggtgacagagcaagactccatctcaaaaaaaaaaaaaaagaagaattaccaaactgtgacacagacacagagacacaaagtaagcatatgctgttgaaaaaatggtgctaacagacttgcttgacacagggttgccacaaaccttccttctgtaaaaaatgcagtatttgcagtgcacaaagcccagtaaactgaggtgtgcatatgcttcctaattctttcactacactttattgttagctatgctctttttttgtttttttgtgttttttttttttatttttgttcctgctttttgagacggttgtctcactgtgtcaccaggctggagtgcagtggtgcgatctcggctcactacaacttccgcctcccaggtttaagggatcttcctgcctcagcctcctgagtagctgggactacatgcgtgcaccaccacgctcagctaatttttttgtatttttagtagaaacagggtttcaccacattggccaggatggtctcgatctcttgacctcatgatctgccagccttggcctcccaaagtgctgggattacaggaggcataagccaccatgcccggcctctttttttttttttaagatggagccttgctctgttgcccaggctggagtgcagtggcatgatctcgctcactgcaacctccgcctccctggttcaagcaattctcctgcctcagcctcccgtgtagctgggattacaggcacctgccaccatgcccagaaaatttctgtattttagtataggtagggtttcaccatcttggccaggctggcttccagctcctgccctcaaatgatccacccacctgggcctcccaaagtgctgggattataggcatgagccactgcagctggtctattagctatgctcttgaggtgatttacatttgttgtgtctgtggggtagaaatactgtacagtggtgttggcagctcttcctgattttgctttcagtgacctcaggttggtagcttgaaattagttgtggcaggagtattcacaccacagaaatgggctattgctactaatcagagctgatagttactaatcccaaccctcccagagccagtggtgaaacactgaccagcactccactggagataggatcatgccccagggagcctgagcggggagataaggccctgccctggaagtcatctgagctgtgccctggccctagcaaacagcagccccccaactgacccactggcctacccacagatgaggagctctatgctggtgtgtacatcgattttatgggcactgatgcagccatcttccgcacacttggaaagcagacagccatgcgcacggatcagtacaactcccggtggctgaacggtaagcgcagccccaggagcccttccgtggccatgtgtctgggatgcggcaaggaggtcgtaaagaagcacatgtgggggaagtggggacatgtttagcctatgactacctggggcaggggtagtttcttatctggagaggagttgggggtgttcttgcacctggctggggattctgttggagaacatcaggggcaccatcagagtaggggctcacccagctgacccctgccacctgcagacccgtcgttcatccatgctgagctcattcctgacagtgcggagcgcaatgatgataagctttacttcttcttccgtgagcggtcggcagaggcgccgcagagccccgcggtgtacgcccgcatcgggcgcatttgcctggtatgcattggcagagccaccaggctgccccttccaccagttctggcttcatcagccctgctccagccagggcttggggtcaagagctgatctgacccggcctcttgccccaccccccagaacgatgacggtggtcactgttgcctggtcaacaagtggagcacattcctgaaggcgcggctcgtctgctctgtcccgggcgaggatggcattgagactcactttgatgagctccgtgagtgcccagcaggcaggcagggtgctctggctacagcaagagggatagaggcgggatgggcgatcagggtgcctttggtgggccccctcccctgtgcaggagtgggtggggcccaggggctcccgcccatggcaccctccaacaccttctccctctgtccccagaggacgtgtttgtccagcagacccaggacgtgaggaaccctgtcatttacgctgtctttacctcctctgggtgaggctggggtcagggccagcagtggcagggagtggccccgttgggggattgtaactcgtggagaaccccagcccggtggcgagctgtggggagggggcagtttggggaggggccctaggtggagggtctgtcctgctcagcagcgcctgccatgcccacagctccgtgttccgaggctctgccgtgtgtgtctactccatggctgatattcgcatggtcttcaacgggccctttgcccacaaagaggggcccaactaccagtggatgcccttctcagggaagatgccctacccacggccgggcacggtaaggaccccactcatcctgcctctcccctttctcttcttctaagaggcctctgggtcaggctctttgcaacatgggccccaccatcatggccctcccagccagcggaggcggtgagctgtaatgcacacacagacgggccttcacacacagtgtcaagctgtggaggagcccagatgggattctgggacaaagatggtgggttgggcgtggtcggctgctcctcagagggtcctctgtggggctgtttgggagctgaaggttggggggaagcgtcttccctgcaggtgctggaggcaggctggaggttggctcagctgaggaacaggaggcaaagagctggggaggggcagggccaggcctcaggcagggtctcagaggtcacagaggcatgtcactttatcttgatgtgacaccggctgatgtgggagcctaagcaggagagcagcggatctggtccaatgcagttctgactccatgtagtcaggactgggctggagaagctggtctcagtgggggacaggggaagcttccctccagaggtaacctggagtcagaaggatgggccagaggtaagctggccatgacggggggcaggctgagcccaggttcaggggacagcttcaggaaggaggagagtgagcctggtgtgtgacaaggacgtcggggcctgcagtccagctgtgcaggagggagacgggtgagaccctaggaacaaccagagaggaaggagatgacaggggtggggagggggacatggaagggagtggtccgcttggccaaatgctgccacgaggtcatggcacctgaggccagggaggtggctgtggcatttggccacctgggaccttggccagagcaggacctgtagaggtcaggtgcagggcagaaacttggagagcgggtttggggagaggagcaggttgaggtagtggggacagacagtgcagcggcctcttctgaagctaatggctccagcctgccctgcccaggcagcctgggactgacactcgccacctgtccacagtgccctggtggaaccttcacgccatctatgaagtccaccaaggattatcctgatgaggtgatcaacttcatgcgcagccacccactcatgtaccaggccgtgtaccctctgcagcggcggcccctggtagtccgcacaggtgctccctaccgccttaccactattgccgtggaccaggtggatgcagccgacgggcgctatgaggtgcttttcctgggcacaggtacccactgctgctcccggcctctcccacgctgggcccaccgggtgcggggtgcagatccttggggctggggcttgccctgctagggcttgctgcaagctcatcagagtcacttcttcatcctcatcctttggtgccttctccctattgatgggataacagaggctaggggtgagaaaaccccattcccacttccatccccaggggcccaggagaacagggacactgggcatctggggacttatgtatgtatggcaggaaaggggtggagacagatggtaggcacctccaggatacagaggccatacacatgctcgtgtgtgcacacacatgccacagtgcaccccctacagttccagcagcccaaacacaggagaatgcatgccccagtgtcctgttctcagcagggcccaaaatcagggtctgggttggtgggggcagaccatggccatgaccccctatgtcctgggccagtcccctttgacctggggaaactcttccaccttggcacaaagctccagctccaatgccctaggggggtttgggccctggtgggggaaggggctgaggctggtaccccttccccagcatccccagccccactgaggccctgcccggcccgttccagaccgcgggacagtgcagaaggtcattgtgctgcccaaggatgaccaggagttggaggagctcatgctggaggaggtggaggtcttcaaggtgggtgtgacaccacccagtcctgacctccccacctttaccctccccccagtcccagcctctgacctgagacctctaggtcagggcagggagggggtccctggcatcccaagctgatctttatctttttctaggatccagcacccgtcaagaccatgaccatctcttctaagagggtaagcctttggcgaggtgagccaaggttggggacagggcctgcatcccctcagggtcatgcccttggcacagggatgggtaaactgaggcatggaacaggggagaggagcccagcctagctggctgttggtggggctggctatgggacaggaactgacaaggccctaccctttgccccagcaacaactctacgtggcgtcagccgtgggtgtcacacacctgagcctgcaccgctgccaggcgtatggggctgcctgtgctgactgctgccttgcccgggacccttactgtgcctgggatggccaggcctgctcccgctatacagcatcctccaagaggtgtggacccctagacacctagaattttagcaaccagtcccagggccctatcctaggggattgggggtgcatgtgatattacccggggtgcatgtgatattaccctaggggagtcttatgggtaagacatcactgccctggggaaaaagggccctgccctggagtcagggagatacagggacctgggggggcaagcttcctgggagcactccttcaggggctatcctcatccaggcggagccgccggcaggacgtccggcacggaaaccccatcaggcagtgccgtgggttcaactccaatggtgagtatgctgggcctcactgtggggtgctgctcacactgcagaagtccacgcagcccacgaagctgctcacagggcccccactgtaagggtgctctgatggctaatggagggtgggggctaatggagatgggatgtccctagttgccccatcaacacagagcactacattggtgagtgggtgcccctcggtgcctgccccgaagcagtcagcaggctgcccggaggtgatgctgcttttgctcaacccctctcactctaaagccaacaagaatgccgtggagtctgtgcagtatggcgtggccggcagcgcagccttccttgagtgccagccccgctcgccccaagccactgttaagtggctgttccagcgagatcctggtgaccggcgccgagaggtgagttcctgcgcccggtgctgcaccgtggatgtgagtccttgcacagtggtgaaatgtagtagaggagtgatctggagcaactctcatgctgtgaaaccccttccaagctcccttccctacatgcaaatcctttgagtgaaaacagttacatggaaactccctgggattggcctcattctatggaaagtgtttctgggtatgcctgttcacatgaaaattccatatgcataccacattgggggtgtaccttctacaaaaacatcatgtgagtgagctccagtatgtggaaattctatggggccctcattttatgaaaatgccctacaggtgtccctgtttatgtggaaattctatgtggttatcccaattggatattctcgttaaatggaaattctggctggacgtggtggctcacacctgtaaccccaacactttgggaagccaagacaggcaaattgcttgaggtcaggggttcgagaccagcctgggcaacatggtgaaaccctctctctaccaaaaatacaaaaattagctgggcatagtcatgcatgtggtcccagctacttgggaggctaaggtgggaggatggcttgagcctgggaggcagaggttgcagtaaaccgagatcattcaactgcattctagcctaggcgacagagccagaccttgtctcaaaaaaaaaaaaaaaaaaaaaaaaggaattctgtgtgtgcttcaaattttcctcattgtacagaacctccttatggtcatcactcctgaaatggaaatctgtacagatgccttattcaaatatctctcattatgtagaaacttcatgtggtttttctggcatatggaaatcccacatgggtgcctctacacggaatggccacaaaggtggtctgatctggttgctggctagggccatagggtggtcacagagcctctgaaccccctctccttgcccctgcagattcgtgcagaggaccgcttcctgcgcacagagcagggcttgttgctccgtgcactgcagctcagcgatcgtggcctctactcctgcacagccactgagaacaactttaagcacgtcgtcacacgagtgcagctgcatgtactgggccgggacgccgtccatgctgccctcttcccaccactgtccatgagcgccccgccacccccaggcgcaggccccccaacgcctccttaccaggagttagcccagctgctggcccagccagaagtgggcctcatccaccagtactgccagggttactggcgccatgtgccccccagccccagggaggctccaggggcaccccggtctcctgagccccaggaccagaaaaagccccggaaccgccggcaccaccctccggacacatgaggccagctgcctgtgcctgccatgggccagcctagcccttgtcccttttaatataaaagatatatatatatatatatatatataaaatatctatattctatacacaccctgcccctgcaaagacagtatttattggtgggttgaatatagcctgcctcagtggcagcatcctccaaaacttagacccatgctggtcagagacggcagaaaacagagcctgcctaaccaggcccagccagttggtggggccaggccaggaccacacagtccccagactcagctggaagtctacctgctggacagcctccgccaagatctacaggacaaagggagggagcaagccctactcggatggggcacggactgtccaccttttctgatgtgtgttgtcagcctgtgctgtggcatagacatggatgcgaggaccactttggagactggggtggcctcaagagcacacagagaagggaagaaggggccatcacaggatgccagcccctgcctgggttgggggcactcagccacgaccagccccttcctgggtatttattctctatttattggggataggagaagaggcatcctgcctgggtgggacagcctcttcagccccttctcccctccccgcctggccagggcagggccaccccactctacctccttagctttccctgtgccactttgactcagaggctgggagcatagcagaggggccaggcccaggcagagctgacgggaggccccagctctgaggggagggggtccgtggtagaggcctggggccggtagaggctccccagggctcccttatgtccaccacttcaggggatgggtgtggatgtaattagctctggggggcagttgggtagatgggtgggggctcctggtggccttctgctgcccaggccacagccgcctttgggttccatcttgctaataaacactggctctgggacta

SEQ ID NO: 15802 - DNA, 255014 bp, Homo sapiens
actgcacaacaagatggcggcggcggcggcgagcggagctggcggggctgccggggccgggactgggggagccgggcccgcgggccgcctgctgcctccgcccgcgccggggtccccagccgcccccgctgccgtgtcccctgcggccggccagccgcgtcccccagccccggcctcccgcggacccatgcccgcccgtatcggctactacgagatcgaccgcaccatcggcaagggcaacttcgcggtggtcaagcgggccacgcacctcgtcaccaaggccaaggtaccggcgcaggggccaggcggcagtcggagcgtggcggggccgggagaggtccgcgccccccagccggggggtcggggcggcgagcgcggcgcgtggtgggagcgttgggggccgggaggcgggagggagccagccgcggcggggcgggcgcggagctagggacacctgggactcgagacggcggaactccaagcagggggccgagggcacagagcaccggcgcccaggagccgggcgcggggaggggtcctcggggctgagggcaggcgggtaaaggggatgattggaaagaaggggtcggaactccccgagggccgggagactgtaagcccagaagactctggaaccagcagctagggaatcataagggaatgagggcaggggcatatgaaatgtggacccggaggatggggaaaaacaagggtgaagtggcagacccgggcttgtaaggggacccaggacggctggggcacggactgggaatgtgcacgtctgcagggcgctgggaggtcccaggatcctggtgccttaagacagagacaggaatccgcatttgatcatctaagactgatagatggtgcgaaggggatcccgaggagacacgattagtggaggaggcaatgaggaaaatggggaaataagggggaaattgctttgcttgtccacaggaaggggcccagggaatgggggagtgaggtgggggtgggggctgtcccaggtttatgatggcactaggtagtcaggggttaaacaatttgggagagctgattgctggttatttttagttgttggagggtcgggaattgtgggctttgtagaacccagggtgggcttttactggttggggggaagcttgtgattgaagaacccagacaccgggagattacactcatcgagcccttagttctcaaagggatttgaggcgctataggagtgaaattggccaaggtcaattaggaagctatatatgtatgcatgtaaaattctttgaggaaatatggtagcactttcatgtagccttcgttgggaggactggaatctaagacatcaggaggaatcttttggttttggtggaacccgcaaagcccatttttactctaaaattttctttgctcaatatcttacttgaatgaatacttttaatgtagtcattcattatgtttagaactgcagcttgtgttttccctcagcctgaggaatgaagaacccttacagctgctgccgcctcctaccaaagccacatcaattcccctcacctcctcagcctagcctctggttgtcatgacctaccttgtttttgcttttttggcagtggcttgttttctgaagccagtgacttatctaggccttctctcctgatcacttgcaacctgaagttccttccccaccatctttctgcctgaggctacaaggggcccttcttaccagggtgtcagggtgggtggctgtggcgaattgattggtcagtttcacttcctctggagggccctcttcagcctttttgtccgtttttatcacagggcctccagtctgcaggtcagagctgaatgagataccaaagtccagggctccctcagaccctgaggggaagtcaggggaagtcgattgagccaagactttggtgtgctcctcacttgccaccccagcccctcaccgtgtttccagtctagttgactattagccaaggcaaacttacatttacaaacaatatgccttgttccttgttttgctatttctttcctttttttctgcctattttctgtgtaatcactttgtgctcctgtggttattttgctctgacctctgggggatagtctccatgaacttaattggttgcctggtttatggtttcatgatttaaagaattttgaatcttccagcccttggatacaccaaaatattgataaaatctgttacagacagggttgaatgttttcgtaaatgtaattgcaaacagttgattcttggctttaatataaaagagacatttctatcttcagtagtcagcaaagccagtgcctaattatggctggtctgcccgctttctaattttcatgtgtgtgtatatgtgcgtgcgtgtgtttttcatagtttttctctgagaccttggtatcctttaggactgcagcattttaaacactggcttgtttacaaacgggtgtcactgtttatgttggtttttatctttgatcatttgtggtatgcagttgtgcaattcctatgtatggaaatattcaaagtcttgaatgagactgaaatggcttggacaatgagttgcatgtgtgaaggagccacaccagcattcatttgtgtttctgtagcagtgtgcaatttcctagttacagttacaagtgctatatcttttgctgcttaaattactctgactacatgagtgaagcttaattcacaaggagttgtcacgtgctctgggtgaactaggagcatattttggcctgctccatgcttctctgaatccactttggaaggggttctcaaatgcggacagcttagatgtgcctaacagctgtcgacatacagtacgatggcctattaaggttatggtttggttatataacaatggtgaaggtgcataggtactagaagttgccgaagctgctgcttcagttaactcaggttgattttttttctccccatgcactgcagcctttatcttacttctgcagaggggtcatttggaaacagagagttatttttttcccccatctgtctccagaatgtgtcatttgttgttttgtcttttagaggtgtgtgatttttttttccccttgtaggaaatggtctgggttttcttataaccatatataacagtcagacagaggtaattcagatgatacttgtgttggctgaaggaggttaggtaataggtattttctgaacattagaaataattatgatccccctcctttttttttttttttttttttttaaacacacatgacccattccaagaactaagagactaaagtaaacctcatttattgagtaggatactgcactccatccaatactgcgtggttaagctggccctttcccaaattctgttaactctcaaaccgtctagagtgggatcctgggatgaataaaatcagtagagaaaagtgaagcttttcctatttggttgttggttacttttgcagcacggcattcatgagctcagacttcatattggcagcactgcagtgcttagagcggcactgcagaacagttaccaggagagaatgttcagctgtgacatactttggttagtagctcaccctggctgtctttgtcctacctgctttgatttccttttctttggaagagccttacttagcctgaggttctctggctctgtttttttttttggtaggaaactataaagtattacagatatttttaaaaaagaatgttttctgctctcaaattgcaggtagtctgttgcctgtgcctaattataccttcactagttggatgattgggaacaaagagtagatagattttgtatgcattttttttccttttttaaaatattggggcagggtcttactctgtcacccaggctagagtgcagtgacactgccagagttcactgtaacctccaactcccaggctcaagagatcctcctgcctcagcttcctaagtagctgggactacaggcttataccaccacaccaggttaatttttaaattttttttgtagagatgggggtctcattatgttgcccaggctggtcttgaacttctggactcaagtgatcctcctgcttcagcctcccaaagtgctgggattacaggcatgagtctgtaacccaaatgcttggcccatatgcattttttaaagtatgcatgactataaaagcctttggccaaatacgtttaaactatatttcaacaaatatatatcacttgcctgttattggtttgtggtaagagttccagctttggataaagcaacctgagtttgaatcttttgctgcttaatagttggatatttttaggctgtgagaagttatttaacttctgtgtgcttgggtttcctcatctgtaaagtgggatgacagtagtacttacctcacaagtttaggtgttatgaagattaaagaagatagtgtatgtaaagctcttagagcagcatggtgccctaatagcatgacgtaaatattaccatcatcatcatcgttatcagatgttttagtaacataataatattatggacataataatagtcctcctttttttgcttctcaccccttgggcacgattcatgaatgtatatgccattagttttgtgtaggtagatgccatcctgacgatagactttcctggtaaaaaaaaagtttgctactattgcaggtgccactttgagatagttggatttaatttgtatagggtacaggctggctaatctcatgaaatcagcattttaaaacataaattttcattagttaaacttttttttttttttttaaatagcaatgtgacttatctaatgaaaactgtgaccaacactggcttttgctttgggctgccttgaattttcagtgtgttttgtgtaactaatttttgttatgttgatgatggaacagagttgagtgcagtcttttctccagaggtccacttaaattaggtttaagtgaaatatttaagaaatgtttctgcaagcttaaggacacatttgcccttgcgtgcacaagcaaaggccttagacggccaaggtcagaattcttaactttaaatattacacagagaagacattttgccctatgacccctttccaaatattgactagccagacacatcggtgtggtttagtgcaaactcatttccatgaggagaacaagtcaaagtgggctaaaagcattattttcacctctaaagaagagtttaacgaagcacatgagatgatgctttcacccattagaaaactgaaaacaagattcatttggtaagtaggagagaattatgtcaaaaagaaattgaaagcagaatttacattagatacatttgaggaagatagccccatccctagacaatctagaagtgactattgaaagatgattatgttcagtttgatacagtggtgatggggttgctaaacgtttttgaaattttgtaaagagctaagactgattgagactagtctctccagagtcaaaataccagtattccattttctacatcaaagatgtttattttaacattttgactttggtgccagctccctagaaagtcatagatctcgctcaagccagaggtgcccagactagttatttctgtgccagaagtgctgttttcatttttcaggcttcagtctggctaatgttttctagttcatcgcgtaaaagagaacaaaatggatgctttgaaaagaaaaagaaatgctttctactcaccagagccactgtaactgtaaaacaacacctaagacatctgcatagagatggaacctttcccttaatcatttattcattcaacacatttattgaatgaaaattttttgtcaggttccattctagggtctggagtgcaccaatgaacaagggagacaaaaagcatctgcctttctggagctttctagtagaaggagacagacaagggacatgtaaaaaaattaaaaatttcatataggaatgaataccaggaagaaaataaacggactagagaatccctggggggggctgctgcctcagatagagtggtcagggaagacctttctttccaagatgatgatatttgagctgagacctgagtgatgagaaaaagccaacctgggaagatttggaagacagaagattccttacagaaggaatggcatgtgcaaaggccatggggcagaagtgagtttggtttggtcaaagattagacacaaggtcatgatgccatggtaccttagcaaacaagtggaaggatgggaaaagatgaggccagacatgtaggaggggccagatcatctgggtcttatggccattttatggaattgggtgtgacacgggggtgacatcagagagtatcaagcagaacactaatatcacctaatttatgtttttaaaacgtggctggatgtggtggctcatgcctgtaattccagtgctttgggggggcatgaggcaggaggatcacttgaggccaggagttcaagaccagcctgggcaacatagtgagatcccatctctacaaacaatttaaaaattagctgggtgtggtggtgcgcacctgtagcctcagctacttgggaggtggaggcgggaggatcacttgatcctgggagtctgaggctgtggtgaactatggacacaccattgtatcccagcctgggtgacagagtgaaaccctgtctcaggaaaacaaaccaaaagaaaaacagcaactcatgctggttattttatggttaagagcaagaatccttttctgatgcatttcttggcacaagggaggagttcagttttaacaacttatattctttctcactgtagaggaatattgacataaattgcacataaattaagcatgatcaactaacaagtatttgttgatttattgggcatgaaaaagaccttagagaggttctattctagttctgtcttctccacagtctggaaagacagacttaacagaatttataatctcaggttttgcctggcatggtggctcacgcctgtaattccagcactttgggaggctgaggcaggtggatcacctgaggtcaggagttcgagaccagcctggctaacatggcgaaaccctgtttttactaaaaatacaaaaaattagccaggcgtggtggtacatgcctgtaatcccagctacttgggaggctgaggcaggagaattgcttgaacccaggaggcagaggttgcagtgagccgagatcgtgccgtcgcactccagcctgggcaacaagagtgaaactccgtctcaaaaaaaaaaaaaaaaaaaaagaaaaaaaaaacctcaggattttacggacttttaaagtcatttagaccaattatccattagattcatggctcatctctctcctcactcccattttcccggagtcttataggtagttagtgggggagctggagttagaatccagttatcactactcctacttaattctaccctgacttctctaatcacagaaaacagtgcccttgccttctgagcacttgcttttttactggggaagcgagatacacctataccaattaaagtctaagatatttatcctttctataagacaaaccaaaagcgagatgtcatgatgagaggaaacatttccgagtagagaggaagagtaaatattccaaccctgtatttcacctgtcctttggcattataccactctgtcacctttgccactaacttttagtaccctatgggtccactgctttgcctttaaatctgctagtcagatgccccttggcatgactgagatatgaagaaaatgaaaagggaaagaagtaaacacagcatgcaatgaccgtaaaagtagtctgccttacgtagttttctcatgtcattatatctagctaactcctagggaatattggtaattatacatttgttctgctgggctggtctgatctacctttgagggtatgtttcttagatgggctcctcacttactaaatgactaacactttccagggatggtgacatcttataactcattaagagaactggtcatctagatatataccttgatgacacaggtgagggtcaagagaaccatttatatcaagggttcctcttttttttttttttcattatcctaagtaaacacaagaaggaattcttcttaatatagttctagtttctggtctgtgggctatggctgttctccagatgaatgatctcacctatcaggtaggtgagtccctggttcctcctaatagcgagtagcttggtccctttctgggataataatgtagtcatacagtcccgtggatgactgataacatcaagagggtgaaaattatatacattcaaatgggcttttatcctaatctaataaaatattgctaaataaatggcgtaggcaatgtccttgagaagtctcaacagtcttgaatgaattagcttgaaagacttcttttggatctgttcagaatagaattgcggaagcgagtacggaactgttggatgagccatcagtaagttatgttaggaacatatttgtgtttagcaggtgtgtgatccgtggtagacaaggagcctctggacactgatggtattttatctcagacttaggcttttcaaagaggtaggaatcagattgtgaatacttagccacatttcccagaagttgaaacggaaagagaagcagactcattgcctgttgaagcttgtctgtgtgggctgagctcactcagttggatactttcggccagttattttaaactaaatttaggttttgatgaagttctgaaaaattatcaaatttctgtctagtttcagctccagcgcatgtttaccagcagtatactttacttttcatagctccccccagaattgaatgtgaaaatgtaggttagttgcccacatttcttgagacggaattttttggagaagaaattttttattccatccatccatccaataaacgtgcaaaattatcagaaatagaaatggatgatatatggcccaaaattcaaaaggtacaaaggagcattcagtgaaatgaagtcttcttgccaccccaatacctgagtcacacagtttcttagtcttttttttttttttttgagacggagtctcactctgttgcccaggctggagtgcagtggcgcgatcttggctcactgcaagctccacctctcgggttcacgccgttctcctgtctcagcctccagagtagttgggactacaggcgcctgccgccacgcccagctaattttttgtatttttagtagagacggcgtttcaccatgtgttagccaggctggtctcgatttcctgacctcgtgatctgcccgcctcagcctcccaaagtgctgggattacaggcgtgagccaccgcgcccggccagcttcttactcttataaacatttattaagggcatctctggattagtccaagtgctagatgccgtttattttctgacagtgctttgacatacttgaaatttccaagcataattttacttaaaagtaaaaaaagaaaatacctggccagatgcagtggttcacgcctgtaatcccagcactttgggaggctgaggcaggaggatcacttgagccccagagttggagaccagcctgggcaacatagtgagaccttatctctgcaaataataataataaaaataaccaggggtgtggtggtgcatgcctgtggtcccagctactcaggaggctgaggtgggaggatcgcttgagcccaggaggtcaaggtttctgtgagctatgatcgcaccactgaactccagcctgggcaacagagccagagcacttctcaaataaaaaaggaccaaagaaaaatacctaacctaacttatactgctcattaggatggcacagtgtgataatctaatgtaagccctgtgggggccggaattttaatctgttattcactgctgtattccttatgtttcgtgcaatgtctgcagatattcattgagtacatgaatataaggattaaaaataagagctgagtttgtttttatacccttaatacatcttttgacttttactattggaatttcctatctatagttaagatgttaaagaaaagtaattttctacctttttctcacaaatctccgagtaaggagatttcacagcttttctgggctagtaattgatttttggcatatctcaaacttttactattaggaagatcagtgtatctaaagtaagtcttgcaatttgaattcaaatcccttagttttttgttttttgtttttatatttttgagatagggtttcgctttgtcacctaaggctggagtgcagtgatgtgatcatggctctctgcagcctccacctcctaggttcaagtcatccttctacttcagcctcctgagtacctgggactacaggtgcatgccaccatgcccagctaattttaaaaaattttatttttagtagagatgggggtcttgctatgttgctaggctggtcttgaactcctgggctcaaatgatcctccctctttggcttcccgaagtgttgggattacgggtgtgagccatcacgcctggccaacatcagttttactttaccataacattgctgttattttttgaatcttttttataattttatttctagtttttcactttacaaattttctgtgataaccattgttgtgcacaagtctttgatgtacttctgattttttgctccggatatattgttgaaagggaaattaccgtgccaaagggaacacatgcttgtacggcacctaatatgtatattgccacattgctttccagaaaggctgcactagaattaacctcctgagcagtgtatgagcaggcttggctcactgcaagccacactggctctctttatcttatctgtctccccatctgcctttgttggcttgggggtgtagggcttttaagtctctactacacctctaaacctagtcccatagatatagtacaagtcaggagaaggttatagcagctgtgtaatccatctttccctgtaccaaacctggaagaggaatgacaagaattcaagtgtaaatctaacctttttttgaggcagagtcttgctctgtcacccaggctggagtgcaatggtgcgatctcggctcactgcaacctccgcctcctgggttcaagcgattctcttgcctcagcttccctagtagctgggattacaggtgcccatagccacgcctggctaatttttgtatttttagtagagatgggtttcaccatgttggccaggctggtcttgaactcctgacctcaagtaatccaccccccgcccccagcctctcagagtggtggtattacaggcatgagccaccgcacccggccaagtctcaccttttacttgctttttataaatcatcattctctcctgatctttgataaagggacaaaaacccaaactggagaaattgctgaagggaagaagaaaggttaatgagaaacagactcttgatcacccaaaccattgattttttttttttttttttttgagatggagtctcgctctgttgtccaggctggagtacaatggcgtgatcttggctcactgcaacctctgcctctccggttcaagtgattcccctgcctcagcctcctcagtagctaggattacaggcacgtgccaccacacctggctaatttttgtatttttagtagagacggggtttcaccgtgttagtcaggctgctctccaactcctgactttgtgatccacctgcctcgacctcccaaagtgctgggattacaggagtgagccattgcaccttgcctctccactgactttttttttttttgagacggagtctcactctgtcacccaggctggagtgcagtggcgcagtctctgctcactgcaacctctgcctcctgggttcaagagattctcctgcctcagcctcccaggtagctgggactacgggcgcccaccaccacacccggctaatttttttgtatttttagtagagacggggtttcaccatgctggccagggtggtcttgaactcctacctcgtgatccactcgcctcggcctcccagagtgctgggattataggcgtgagccactgcacccagcctaccattgatttttaaataactattttttggtaaaccagcgtgagaatttcagagattaataaaagttgtaaattgctcctccctcgttttaatggtgaaaagatagtcaaggagattgtgaaggagaaagttatatgaataaatatggtaatgcagcagtcctatcatgtttaaatttgctgtgtgcattgtactttatgggttaagagattttcaagggtaattgggccatataggatattgtgcttagtatgttgtggggttatgactgtggaattatctgtgttttggacatttggtggtaactgcttttcttttatctccaatagaagccctcctatacagtaagttttggttatgatgtgcttagttaattgaggggaaaaactgataaagcaggaaaatcagaaatatatattcatgcattaatctttttttggtttttcttttttatgtagacggagtcttgctctgtcgcccaggctggaagtgcagtggcatgatctcggctcactgcaacctctgcctcctgagtagctgggactataggcacatgccaccatgcccggccaatttttgtattttttgtagagatggggtttcgccatgttggccaggatggtctcgaattcctgagctcaggcagttcgcctgcttcggtctcctaaagtgctaggcttacaggcatgagccaccatgcctggctcatgcattactcttttaaaaagtatgtattgtggaaaatttcaaacataaatgaaagtagagggaataatataatgaacccctatgtgcctgtcgcctagtttaaacagttgtcatcttgtgaccaatcttgcatttatacctttcccacttccccgcttttttcctggattttgaagcatatcccagaatcctttcatttcatcggtagatattttggcatgtatctctaaatagatgaagattctttaaacaaacaaacaaaaccaaaccccagggctgggtatggtggttcatgcctgccatcccagcactttgggaggtctaggtaggtggatcgcttgaggctagctagttcaaaaccagcctgagcagcacggtagtagtgaggccccatctctaccaaaaaataaaaataagtgagcggtggatggtggtaagtggctgtagttctagctacttgggaggttgagctgggaggattgcttgagcccaggagttccagattacagtgcagtaaactatggttgcgccactgcattccagcctgtgtgacagagaccctgtctctaaaaaggaaagaaagaaaagagagagaaaagaaagaaagaaagattgattagcacataggttaatatcaaaatatcttaacctatgttaacaaacattaatgttttttgttaatattaaatattaatgtttgttaacataggttaatattttgttaacctgttgatgcagggccaaggctttttctttgtgtgccctagttggagttccttaattttgtttccattaaatacacccataattcattatctataatttccagttttgtttgctttttaaagcagaacatgaatttaatggcatttgtgaagcaatattagtacagcatccctcttgatttttatgactccttcccagtcttttatactcatctcattcacgtctaatttactatgtctttttaagcatttgatgaagttttcatagaaacgtatctccttaatttttcatcagtttacattctatttaattaaattacataactgtaataatgagcaactggtataaataggtttgggaaaaaaacagttaattattggtaagaatataacttaataacgggaggctgggcccggcgcggtggctcatgcctgtaattgcagcactttgggaggcccaggcaggcggatcacctgaggtcaggagttccagaccagcctggccaacctggtgaaaccctgtctctactaaaaatacaaaaattagctgggtgtgttggtgcatgcctgtaatcctagctactcgagaggtctgaggcaggagaattgcttgaacctgggaggcagaggttgcagtgagccaagatcctgccactgtactgcagcctgggccacagagcgagactccatctcaaacaaaccaaccacaaaaaaaccaaaaaacttaataatgggagcagcagaagcttataagagtaagagacagctgttattagttggggccagtttgcatgttgggggcattggttgctttactgagacaaggagaagcattgattattttggcaggttggttgagtgaaggtgggctaagagagcttctgcgttaatttaaaatgataaagaagtcaaagctgttagaaatttgaggacaagttattttatagaatcttttattatttatagtgtgtacttcgaggtggtatttttgtccacttatgttagaatttgtgtgaactgagctgaatttggtaatgagtcagtggtattaaaaacttggtgaagaaactggccaaactctttagtttaagaggtttatatctgttcactgctagtgtagtgttctgtggaacaagttgacattttcttgtagtaagttgttttctgtttctggcggaagcaatcttggttcatatgctgcaagaaacagaactgtttttattgtggaagacaggagcagagctgtgtgtttcttattaggatgagttggacacctgcaggatttcttctctctttctgcttcttgcctcctgttgtcttttccttctgttagaatgttctaatattgcataagcagcattccgacaatagttgaatttttttggtacttcatttttttaaactctcaaaataatgtttttagtgattgtatgttcttggcttactttccatttctacatcaacagggatattgttattctagtcaaatggggtagttgtattctggcaatgatctttgggtccaagtcagctgcagaaacaacactttcatatattatacctaaatatcttacatgtgtatggtaattctgggaggtaattaaatgttgggatggtactttaggatctctttaaaggatttcacagttctcaggaataaaataacttgtttgaagcatgttactcattggcctttgaccatgcaaaagggtagccagtgattttagcctactgcctcttccgatctcattttcctcctttcttttgaggcagcagctgcatccagtgccctgctctaattgagctcttagtaaaaggggtattgttataccaagtcacaacctcgtatagcagtgaggttacatcaatggttgttagatttttaggccacgcatccattttggagtcacattaaattttgaaaaccaaaatttagttgcattacctaaatttctcttccttttcttatcctgataccaggataagaataggttttctgtttttccagctctttgtggaacctttttggcccatcagagttgcttgcgacaatctgtagttaaagaactgagactggtgcgggaatcgggatgtttctggttccagtttttactagccagcagtttgactttgggcaaattacttaacctcagggggcttccagtttctctttaatttataattttttcaactgctttattgaggtacatttcacagaccatacagttcacccaattttttttaagtgtattcatggagctgtgcgaccatcactataatacattttagaacattttcattatccttaaaagaagcatggtacccattagcagtcactgcttatttcttcaacctctcttctcagccctaagcaaccacaaattaatttttatcgatttacgtcatctggacacttcatataaatagaattatgcagtgggtgtcctgttgtattttacttctttcacttggtgtaatgccttcaaggttcatgcatgttcttacatatgttggaatctcattatttttttatggctgaataatattatgttgtatggatacgccacatttttaaaatcaattcatgaattggtgggcattgtttctacttattggcgattatgaataatatggtcttgaacatttgtgtacaaatttctgtgtgatcatgttttcatttttttcttgggcatatacctaggagtggaatcgcttggtcatgtggtgactccttgtttaaggttttgagcaacttccaaactgttttccacagtagctgccccattttatattcttacctgcaatgtatgagggtttctgttctgtctacatccaaaacttattttcttttttttgattttagccatcctagtggatgtgaagaagtattgcattgtggttttgatctacatttccctaatgaacaatggtagtgagcatcatttcatgtgccagttgatcatttgtatatttcctttggagaaatgtctattaacatcctttgcccatttttgaattggattatttgtctttttattgctgagttgtaagagttctttatgtttgggatacaagtcccttatcggatacatgatttacaaatattttctgccattctgtgggttgtcttttcagtttcttggtagtgttgtttgcagcacaagtgtctttaattttgattctctagtttcttaatttatatagttgtttaaactctgaaactatatgttttattgagattattttcctctgtgctcattctgtactttctcccatgttcatatagctctctctttcccgggacgttttctagcctcaaagactttatttttttgattaatttatttattttgagacggagtctcgctctgtcgcccacgctggagtgcagtggcgccatctcggctcactgcaagctccgcctcccaggttcatgccattctcctgcctcagcctcctgagtagctgggactacaggtacctgccatcacgcccggctaatcttttgtaatttttagtagagacggggtttcaccgtgttagccaggatggtcttgatctcctgaccttgtgatccgcctgcctcggccttccaaagtgctgtgattacaggtgtgagccactgcgcccggcctctagcctcaaagactttaaaaacatctgtctatgtatttgcctctctaatacatgtgtcttacaaaataatcaaaccttacaaaatgtataacaaagaaagtgaaagttcctcatctctccagagaaaacattaactatttataaccagattttttccccattcacatggtaaaaattttttttaattaaaaaagggaacataccacaatctagtttgccacttgttttttcatttaatagtatatctccaacattattccatgtcagtacactttgtccttgtctcaatcattttaatggctgcagagtattctattttatggatatactatactttacatagtagcctattgatagattttagggttgtttctagatattgttttatttttttgagacagagtttctctgtcacccatgctggagtgcaatggcatgatcttggctcactgcaacttctgcctcccagattcgagtgattctcccacctcagcctcccaagtagctgggattacaggtgcgcgccaccacacccagctaatttttgtatttttagtagagacggggtttcaccatgttggcttggctggtcacgaactcctggccttgagtgatccccctgcctcagcctcccaaagtgctgggattacaggtgtgagtcagcgtgcccagcccagattttattgttttaattacaaattttacgtaagttgtttctgcacatttatatttgcacacttgtgctagtggtttttttttctattccatttatttgctattgcagtatttactattcaaaacacgtagacttattttaaaaaataaaagaattttatttagtgtgacctagagtcaacgtctcaaaagttatgtattcttttccatcatgatatatacaatgttctgatcttcttttaaagccagagtcttcattttcttggtaattgtatagaataatttactagaagtggaatgcttggatcaaagtatgagtgcttaaaatcatgtaagatgttgccacatcaccctccaagtaaggccatgccaattcactcagcttgagagtgtatgacagtgatttttctgttctttttaaccctggcaaatagcctttttagggaattaatctgacaggtgaaaaaatgtcattttattatttgtagttacttattagtacattcgagcatcatttaatttgtctgttggttgtctttctgctttgtctacttttctgttgggcttttggctttttcttattcatcagttgtcatagctttattattattattaatgttttaaaaaaattgagttggagtctcactctgtcacccaggctggagtacagtggtgcaatcttggctctctgaaacctctgcctcccaaattcaaatggttctcatgtctcagcctcccaaaatgctgggattacaggcatgagctgctgtgcctggcctgtaatagctttttaatattagggaaattagttaccttataaaatatattactgatatttttctttgtcttttgactttgtgtgtgtgtctaatataaaatgaaaatgcttttatttttatagtcagatttttctgtttttttttctctttatggcttgctttttaaaattctaattatataaaaatatttacccatttttttcaactacttttatggttttgtttttaaatgtaaatctttgcttcatgtgaaatgcattttgatataaaccaaatgagataggggatgagttgtagaatttattagagttgtaaatttacatttatttttgtgattattaatggcttattcctacttgactgtaagtctcatgagggcaatgtattgtgttgttttgtttttcccttgctcttattttcagtgtctagcacaatgcttgccttgtaatacaccctccatttattgaataaatgagtctaggtttttctccaggtctctagcttctcctgacacaattaattgcataattgctcttttccttcttgatttaaaaagcaacactatcatttacaaaactccaatagatacttaggtacatttctgaattctaatccattgagtgtgctgtcttttcttgctttgatactgtacagctttaattatgatagctttatacaacttaaagtatatttgggaggccagctttaagcactcttaaatatattataccacagtttgggaagctctataatctcctttattaaactttttgctatacctttggaaacattcatttaacttaacaattaaacacttaatccattctgaaagtcagcctgcaaagcagaaatgatttttggggtgttatttggtgtaaagagtttttttttttttaggatatcatacttaattctggcatgacctctttagtgtcttttaaaaaactctcattttataactttgggcatttctagaaaagcaacatttttctcacagttttctaatgcaaaatacacagaggggtaggtggcagaaaaggtatcgagatgattgtgttggcaccccactgatgtcgaagcagatagtggaaaagacattacttaaaagtgttttgcagatttcgggttaaattaaaaatatgacaattttaatttaatttaattaaaaatatgacaattctcaggccgggtgtggtggctcacgcctataatcccagcactttgggaggccaaggcgggcggattgcctgaggtcaggagtttgagaccagtctggccaacatggtgaaaccccatctctactaaaaatacaaaaaaattagctgggcctgtaatcccagctacttgggaggctgaggcaggagacttgcttaaccagggaggtggaggttgcagtgagccaagatcatgccactgcactacagctgggtgacaaagcaagactccgtctcaaaaaaaaaaaaaaaaaaaaggtgttatgcagatttcagtttagccaccttgatcctcccaccttgtgcatgacacgttaccttcctgtggcatgcagtatttgactgattcattggatgtgacttgcattaagttcagataacattgctgaataatcactttcttattctttagtgtagcctcctttctctgtagaacatcagaaattcttaaactctgaaatacagcattctcttgggattttctgtaatgtctttctcatgtaggaaccaacttcagggtcttgtgagcatcagagaagtttaaggtctagggaactgagctaatggaacaaggcatgcctaatgtgataaaatccttgctttctttgcaattgaaattgtttattctaaataactgctaatttacaaatgtattttcacatgattacccattctgttctcaaagagcataataggggttttgtgactttcagactttcctgaaaaagcctaaccgtggattttagaattattaagctagaaaaatacacacatacacacacaggtttgtttgggacccttagtctccaccctggaattaagtgacactgaaaataactctggaataaaaggtttttatgtagcagaatagttgacttacaggggttcttccctttgcacattttctctgggtagaaaatgagcttgtttttcttttagttgtattacaattttttttttcctcaatgctagtcttaactgagagatttttaggcagttaactctcccagcacagcaataagcagcttattagtagatattatctcttgttgatttgttacccttgagatttactgtgcttgcaaaacacctgtctgtatttgagctttgctaggtagttggcttttgtgtttgactgaagattttttccaaagaaagcaaatagctattaggaaaagaaagagtcagcaaatttctgtatgctttcatggaagagatttcccaattagaaagcttttgtaggcttaaccttttgccctaaagtaacccaacatttcattatgtattccattgaggttttggagctcggcaccagaaagcgaggaccaaggttgaatgtgaaaggaatattcagaggatgaagctcatagtcaacaaagtgctgcttcataggctaggtccaaaaataacctgcttgccatagggagcaagaatggaggtagcattagctgctgttttgagcagtgtttcatgtcctgtcatgtcattccagaatggttttttggttttgtttagagacagggtcttgctctgttgaccaggccagagtgcagtgtggtgtgattgtagctcacagtcacctcaaactcctgggctcaagtgatcctcccatctcagtttcctgaatagctaggactacagacacacaccattgcacttggctagtggttttatttttagtatagacagtgtctcggtttgttgcctaggctggtctcaaactcctggcctgaagcagttatcctaccttggccttccaaagcactggaattataggcatgagcagccacacctggtctcattccagaataattaaaattatgtttaaggcagccgggtgcagtggctcatgcctgtaatctcagtactttgggaggccgaggcgggtggatcatgaggtcaggagttcaagaccagcctggccaatatggtgaaaccccgtctctactaaaaatacaaaataaaaatacaaaaattagccgggtatggtaattagcgggtgcctgtaatcccagctacttgggagtctgaggcagagaattgcttgaacccgggaggtggaggttgcagtgagccaagatcgcgccactgcactgcagcctgggtgacagagtgagactccatctcgaaaaaaaaaaaattgtgtttaaggcaatatcatttaaaattttattttgggagaatgttgccttggtaaattggtaaataacagttgttctgaaaggtttcggaagaatgcctttctgctaaattgaagaaattaacataatttactcttctgtaaatagggggatggtctgcattgtgctcatttaatcattggagttcaaattaatgatttgctggggtcctgtggtgaatcttgagtgattaagagggagaactcagtccttggttcagaaaagttagcattggaatggatcctcaacaggccctgaaggtaggaagtgttctgatttagagagctcttccaaggcttgtgatggaaccctgcaacggtaagttttacgagtatcagtaactggccgggtgcagtggctcacacctgtaatcccagcactttgggaggctgtggtgggtggatcacctaagatcaggagttggagaccagcctggccaacatggtgaaaccccgtctctactaaatatgcaaaaattagccagccatggtggcaggcgcctgtaatcccagctactagagaggctgaggcaggagaattgcttgaacccaggaggtggaggttgcagtgagccgagatcgtgcattgcactccagcctgggcaacaagagcaaaaaactgtctcaaaaaaaaaaaaaaaaaaaaaaaaaagccaggcttggtggctcacgcctataatcccagcactttgggagccaatgtgggcagatcataaggtcaggagatcgagaccatcttggctaacactgtgaaaccccatctctactaaaaataaaaaaaaaattagccaggtgtggtggcgggcacctgtagtcccagctccttgggaggctgaagcaggagaatggcgtgaacctgggaggcggagcttgcagtgagccgagatcgtgccactgcactccagcctgggcagcagagctgagattcctcaaaaaaaaaaaaaaagaaaaaaaaataatcaataacatagaatgtggatatacatagcacatagatacgtatagcaagtcaggaagtttgcctagaaggaataaattaactcttgttacttggtgagatcatggaagggaatgtaatttgttttaggtggtggtaattgtgagtttgaggctggcccaggaaatgagttgtcagatatgctgtcatcctcattaatggttcagcttatttctcaggtttatagttgtatgaggagatgctatgcctaccccatttagggaactattaggttcaaaatcataaaagctaaagaagagtgaaatacagtgaaaagtatcctgttcacacataccccatgatcatccagatttcccttcccaggggcagttgatattatctgtgtcttatatgtcttgagatagtttatgtgtatagaagtaaatgtaaatatctactacttatttcctcttttaacacaaattatagtaaataatatacaatagtctgcatcttacttttttcactctcgtatctaatgttaaaaaagctacgtggtattccaatgaaaggatgtattatatatattttttagatatttcatttgagttgttttttttttttgttttgagacggagtctctctctgtcacccaggctggagtgcaatggcgcgatcttgactcactgcaacctccacctccctggttcaagcaatttccctgcctcagtcccctcagtagctgggattacaggctcatgccaccacacctggctaatttttttttgtatttttagtagagacagggtttcaccatgttggctagactggtcccaaactcctgacctcagggaatcctcctgcctgggcctcccaaagtgctgggattacaggcgtgagccaccacgcctggccttgagttgtttctaagctgttgctaataaaacaatgctagaggatttaaaaaaatatgttagggttttatattgacaagtaaatattgtcataatagaaacttgctatacttataataataatacatctatagaacatgttcataaatgtctatttgagccttcctgtaaggtaagtacaacattttatcacttcataactagtaaagtggcagaagtagaggtagaaccaaggtcttctgactcctatttgagtatctgtctactttacccaaaatacatatactgttgtggggctgtagggaagtgggggtgggaaaataagaggaagtagacctaggtggggcaagcttgagatagggatgtatctgtcattctagaaattgggatcctgtttgctaggagtaagtggaactggacatcagcctgttacagggacataaaggcacttaggcactggcagagcactatggtttgattgccatcttggagtacagtagtatggtaagccaaagagtggtagttctggagaagctggggactgtcagagctccctagaatagactgagagtgaaacagcattcacgatttgctaaggaggctgggctactaggaaggataaggtaggagcccaggagttcagggctgcagtgaattatgattgtgccactgcattctagccttggcaacagagcaagaccctgtctcttaaaaatattggtcaagaccataaaacaagaacataggccatagtgaaaacataaaattttcttagcagctgtggtagcaaacatgttaatggtaaggagataactgtaatgttagtcaattttggcttaagactgaggactgagaaacagccttcttcctccggaggagcagttaagtcatcttacaactgggagtagagagacaaggacgtgtgaagctgattcatgctttcattatatagttaatactatttggaaacctgtgtgtaggtctggtcaatagacttccatcttaattgctgtatgctaagtgcctcctatgttctgtatacttcatataattcttgctagccttcaacagctttttacaaagtaactattgttttacctaatttctattgagaaaaatgagcttcacttaggtaacttgtccaaagttctttaccttgtaagtggtagagctgagatttataagtaggtctatatgactccagggctcttgttctttccacgataccaggtattaggcatcaaaattggacagtagaattctaatcacagctgtacataaccagaaagtatgagtatggatgagtgttagcatgtaaccagacaacttgtctgttatggatgatttgggctgaaagagtagaaggaatgctaaggaaaatgagcattggagatgttgagagctcgcaaactcatgatgaatgtgtatataatttaagtaatgcacttgctgtgcatatgtagagccttaagataaaatttccaatgctcccttccctcattaggtttttctttctaaagtccttctatattgagattatatagctgccactaaagactgtagctggtagtagccaggacctggaactttttggcaagagggtgttatctggaggatccaagtatactgagatcaacataatcatgaattcttctcccactgtaaagtttgaggaggtaagaatctccttgacttagcaaatttgggcttataaatgctaggtccaactagactttactggcctcaatcccttagcattatcctgcaaaatactgatgtatactttttggataatacctttgatctactttcagccaccattgtagggaattgttagtatgagaggttgacattttggttaaataatcacttggaaactgtgactcagcattagtcactggctttctgctgggttacattctcttgtctcttgccttaattgtggtaagcctcagccatttgattacacaactaccaaagaggatgaccttagtgataacccattcacattttcagatagtaaaaatattagggacaaaatctttcatatgtattagcgagtggtatgggttcgcctctggagaaatgttagcacattttccaggtttgcccgatgatattaaaagatgaatagctatcttagtgaaaatagctgtttacacttttagttagtagtttttaaaagtggaaatgtaacaatatgctttttggacacagtcatgttattttatttttatttttatttttattttttttgagacggagttttgctcttgtgcaggctggagtgccgtggcatgatctgggctcactgcaatttctgcctccctggttcaagcgattctcctacctcagcctcgctggtagctgggattacaggcacatgccaccaggcctggctaatttttgtattttttgtggagatggggttttgccatgttggccaggctggtctcgaactcctgacctctggtgatctgcccaccttggcctcccaaagtgctgggattacaggtgtgagccaccacgcctggctgtggatatagtcattttagtatttgagattaaatattaaacctcatttggcgaactttaaaaccatcagtgatttgagttaattctacctgttttaccttatttttcaccagtgtgtgtttcctcactgcctcattatattgccacatttaatctttcattaaaacaaacaaacaaacacaactcttggctgggtgtggtggctcacacctgtaatcccggtactttggaaggctgaggtgggaggattccttgagttctagaccagcctggtcaacatagggagattctctctctcctgaaaaaaaaaaaaaaaaaaaaaaattaaccaagcatggtggcacacatctgtagtcccagctactcaataggcaaagtgagaggattgcttgagcctgggaggttgaggctgcagtgaacatgatcaaaccactgcattccagcctggaggacagagcgagaccctgtcttacaaaacaaaacaacaactcttggaatttctcttttcccctcccttcttcttccccttcttccttctatttatccttctgtttcatctacaaatatttgagtgtcactgtgttctaggcactgtgccagacattgggattcgttggtaagcaagagagagaggcatggcctctgtccttatgagcttgcagtttatcctagtgttacttatctagtctgccctgccttcaaggttcagtggaagcccgatcttcatgtagtcctttgacttctttggcccttgcaaacctatccctttgacctatgctactttaaatctgattcatacaatttagcatttattgatataatttcttatactgtgggctaattgtttaaatatcttgttttactggctagagtatagttccttaaggacagagactgtcatgttattttttttttttttgcaatactgagcccaaaggttttgatttcagtctgccctgctgaatgttgaagttactagtagctcttgggacttagaagtagtgatgagataatgccttgctttttagtttattttctattttgttttattttatgtttcttttttgaaatggtattgggctggccgcagtggctcacgcttgtaatctcagcactttgggaggccgacgtgggtggatcacctggccaacatggtgaaaccccgtctctactaaaaagacaaaaagttagccaggtgtggtggcgggggcctgtaatcccagctactagggaggctgagacaggagaattgctcgaacccgggaggcggaggttgtggtgagctgagatcgcaccattgtactccagtgtgggcaacacgagtgaaacttcgtcacaaaaaaaaaaaaaaaaagaaaaagggccgggcgcagtggctcacacctgtaaccccagcactttggaaggcagaggcgggtggatcacctgaggtcaggagttcgagaccagcctggccaacatggcgaaaccctgtctctactaaaaatacaaaaattagctcgtgtgatggcgggcgcctgtcatcccaactactgaggaggctgaggcaggagaatctcttgaacccaggagatggaggttgcagtgagccgagatcgtgccattgcactccagcctgggcgacaagagtgaaactctgtctcaaaaaagaaaaaaaaaaaaaggtattgttcagtcatccaggctggagtaaagtggcacaatcatggctcactgcagccttgaattactgggctcaagtgatcttcttatcttagcttcctgagtagctgggattacaggcagtagcgaccatgcctggtagattatccctttaaaaaaattccttctagttgtttgcctaatatttgttatctgcttctgttaatctgtgctaaaaatgagtggaaatgaccttactgattcactatttgcatttatattgttttctagtgaaggggttgtatttgaggttaccattgcatagcttctcatctagttctccttgtgacattataatgagggatgcatttcatgactaaggaatagagctaagctaatgttgatctcttagtagcatgttgtaatcttttgggcttaaatgccctatcactatgccttagttcatgaagtgttaaaagtaactcacctaaaatgggaagcggagaatgtaataacttaaagatcaaaatcgaatttctcataaagatttttagaaatagaaaataatcttttaatgggccaacattatttacattttatgatgttagagatcaaaactcttcctgagtagtaaatgaatgtggcgacttaaatgtgaaggagggaggctgtgtgattgacttaaatgtttttctgaatgtgctaaaagctctgaggtaatggcaaacttcaatattggaaatagaagggatatattctttattaagaaggagaatagagggtactgggggaaggaaatgctcttttgcctacacttaaaaattaagaaggtaagtatatgaaattgaaggggtaaaagaccacagagcaggagacaaggaaaccgttatttccctctgaaataattctagatggtgatttgaacaaaccagttgctaaaaaacttatatgataattggggcagtttgaacattgactgggtatctgatgttaaggaattattctcttcagatggggcagtagtatggtggtcatattgcagacaaaaagtacttaccttttagaaatatatactgaaatacatatggatgacggaatgtgtctgagatttgctgggggaaaggaagaagtggtcagcagtatagataaaatggccatgtatttatttataactgtctaagctggctgatgggtacaagaggcacattgtattatttctttctacttatatatatgtttgaaaatttccataaaataacaacaacaaacccccccccccccaaaaaaaaatcttaacaactaccagaactggcagaattgtcaagcctacccctttatcttctttctctctaattttagatgggcaagtaaagccatagattcatgctgatgtttccaaatgggaatgcagtttagatttccatccccttaagtttcaatctatctgtagtgcagcatcactgagagaacaagccctgctattttcccagcagtgtggtaagttacaacagggtaggagtcatactacccatctttaaggctcttcctccttataggtgaagaaataagatttaaaaagcaaaacataattagagaataggaaaatgtggtttaaaattatatgtcatattttatagttctggccaaacataagaaattctagagaaaggaaagaacattttgggttaggaataaccaaaggcttttcttttgaaacagggtctcactctgtcacccagtttggagtgcagtggtgcatttatggctcactgtggcctcaaccgcttgggctcgctgcagcctcagcctcctgggctcagctgcctgagtagctgggactacaggcatgcgccacctgtccagctaatttttgtattactttagagatagggtctcgctatattgcccaggctggtttcaaactcctgggctcaagtgaccctcctactttggcctcgcaaagtgctaggtttacaggcatgagccatcatgccagaccacaaagacattttttattaggccagtggatgttcggatcatctttaaacaacattgaaagttgaattgctgacagtaatatggggatagcattccagggagagaaaatactatgtttggtggagaatagatgaatttggattggggaacagaagatatttttgatgggtaggatggggtcatttcataaaggacatgaatttttagttgagacatttgggcttgatcttatagaccttaaggagccatttttggggtgtggggaaccatttttgacccttaagctacctaagtatttattaatttggtttgatgataatattgtgtattcttagttgcaggcttttgcatagagagtataacttgactttgtagcctttacattctttttaacataaatttgttatttccacagtgttccaaaagttattcagggaccagaattaatatttattttttacaaattatttatttatttatttttgagacagggtcttgttctgttgcccaggctggagtgcagtggcgcgatctcggctcactgcagcctccgcctcccgggttgaagcgattctgcctcaacctccccagtagcttggactacaggtgcctgtcaccatgcccagctaatttttgtatttttagtagagatggggtttcaccatgttggcctggctggtttcgaactcctgacctcaagtgatcctcccgccttggcctctcaaagtgctgggattacaggcatgagccaccgtgcctggccacattttgatatttttaatcaactttattgaggcataatttacattcaataagattgaaccattttaagtttacaatttgaattttgacaaatatacacacccatttaataaccatacaatcaagatacagaacaattcagtctcgcagaaagttacagtagcactgtttgcattcattctcatcctcctccacttccagaaaaccactgatttgctgtcaccataggttagttttgctttttctggaatttcatataaatggcctcatctaggatgtactcttctttcatcagcattctttaagattcatttattgttgtttgtatcagagtttgttgttttttattgctgagtggtaatctgagtagtgttacattgtatggatgtaacaagatttgtttattcattcacctattgatgaacatttggattgtgtctggttttcttgcttttatgaataaggctgttatgaacttcatgtacagctttgcgtagatgtatgttttcatttctcttaggtaaataccttacagtggaatggctgggtcatatggttggtaggtttatgtttaacttttaaagaaactgccaaattgtcttccaaagttgccgtaccattttatattctctttagcaatatatgagataggagagttctagttgctttaaatccttaccattgctaaaatgatatatcttaaattttagttgttccaatagttgtgtcatggtatcttgtggttttaatttacatttccctaatgactaatgatattgagtatctttttatgtacttattttcatgctgtgtatcttctttggtgaagcatttgttcagatcttttgctcattaaaagaaatgggctgaccgggcacagtggctcatgcatgcctgtaatcccagcactttgggaggccaaagtgggaggaccacttgaagccaggagttcgagaccaccctgggcaacaagcgacactctgtctctacaaaaaacttaagaattagctgggtgcttggcatgtgcctttagtcccagctattcaggagtttaaggtggggggatcacttgagcctagctgtttaaggctgcagtgagctgtgatggtgccattgcactccaacttgagtgacagagcaagaccctgtctttccaaaaaaaaaaaaaaaaggattgtttctttatagttgaatattgagaattctttatatatcctggatacaagtcctgtgttatataaatgctttacgctttgcaaagattttttttttttccgattccatggcttattttttcattctttcagcagtgtcttttgaagagcaagagtttttagaggccaggtgcggtggctcacgcctgtaatcccagtactttgggaggccgagttgggtggatcacttaaggtcaggagtttgagaccagcctgaccaacatggtgaaacctcatctctatgaaaatacaaaaattagccagacatggtggcgtgtgcctgtaatcccagctactcaggaggctgaggcaggagaatcacttgaatccggaggcggaggttgcagtgagctgaggtcacaccactgcactccagcctgggtgacagagcaaaactccatctcaaaaaaaaaaaaaagaagaaaagaaaagaaaaataaagtattctagtgaagaccggattccttggcataagacaccaggaattttagattgataggagtaaaaataaataaagaaatattggctcagggaataaacttcattaaaatcaatttatgggccaggtttggcggctcacacctgtaattgtgcagcactttgggagactgaggtgggcagatcacttggggccaggagttcgagaccagcctggccaacagagtgaagccctgtctctactgaaaatacaaaaattagccaggtgtggtggtgcatgcctgtaataccagctactagggtggctgaggcagatgaattgcttgaatcctggaggtagtggttgcagtgagctgagatcgtgccactacactccaacagtgtgagactctgtgtcaaaaaaaaaaaaaaatcaatttatgaaagttatttttaaatttgaagatattgaagatactaaatttgtgtttaaaaagcatttattttgatcaactccgctgtatagaatattttgtcttaagtcactgtaaagtttccatgccctcaaatgaaatacagtgccaggtttaacattcgttttcatggattgttttcaaaagttattgagttgtctgatttgctgtaaaaaaaatgaaaaattcatttcttttattaacatgatgtatttactgtgattattctaatagactaatggacttttaattttactgtttaaaatagtttataattaaaatttaatatccagtcttcacttgttctttcattttttaaaataataaagtagtttggggtttatcagaacaagggaagaaaccaagctacgtctcattttatgttgggtaagaatcactagagacgaaattattattattattattgttattattattattattattatttttgagatggagtctccctgtgtcacccaggctggagtgcagtggtgcaatctcagctcgctgcaacctctgcctgctgggttcaagcagttcttctgcctcagcctcccgagtagctgggactacaggcgtgtgccaccttgcccagctaattttttgtatttttagtggagatggggtttcaccatgctgaccgggctggttttgaactcctgacctcgtgatctgcccacctcggcttcccaaagtgctgggattacaggcgtgagccaccgcctggccgacaaagttactttctatgggatcaattcctgagttttatctaacacgagaattttagcaattaaaagtcaagtgcagttcagatatattagtttaggtaatatttttagtgtttgaagagagctcaatttgtaagccatttagctactaattaccctgcctttgctgtagaaagaacttaaatgaaagacctgttttaagatgcctttttaaaaagcagccgttgtaggtataagagttgaaaaatcaagatctaggcagcagtggagaattatgaagtctgataagataatatgctaaaattgtattgttaattctgatttgtgacagtgcttatcagtagaaaagaaatgtgatctgtggttaaagactgaactgccactaaatgtaaaatgttttttagatgagttggaagaatgctgaaccagtctttattgcccaagatggctttgagtcagcaatctcaaagaataaagaaaaaggagttaagagtgagaggcaataagtaatatgctgttttcatttaagatgtcttgaagagataattaaaaagttgtaggggtataggaattgtgatgtttctctggtgttaatgaagtctactataaattagataatacaggcactctaaattattgtttttccttttttaaattcttggcagttactgacaaattatactcaggatcaagtttaagtctcagtacatgaatgaccctgacattgaaaaccctgaaggatgttgaccttagttttgacctggctttatcctgagcagcctctgtgaattcttaatgctgtgctctttaacaggggtactttttccagatgtttttgatactgtattcattaacatataataaagttatcagtgtccctgaaggctaattttttttttctgactgaatatgagatatggagcgtgcaatttgtacttattggtattaacattaccaacaaggtttgtctttttcttataagatggggaatcttaagaaacttcaggccaggcgtggtggctcatgcctgtaatcctagctttgggaagctgaagtggggcgaatcacttgagatcaggagttcgagaacagcctggccaaggtgaaaccccgtctctactaaaaatacaaaaaattagccaggcgtagtggtggatgcctgtaattccagctacttgggaggctgaggcccgggagacagaggttgcagtgagccgagatcatgccattacactccagcctgggcaacagggtgagattccatctaaaaaaaaaaaaaaaaaagaaacttcattaagaagttaaagcctgggtatgctctccttgataatttctttttactcacatctttattggtaaatcaggccagaaggattatttaccttttcagaaagggaaactaggttctacggtttggttacagatagcctggcagctgactttacattgggcagaggagactgccgtacttagtggttctgagaaaccaagagagtattgcctgctacagctatgagaaaaggtattgaatcttccccctcctttgtgggggaattccaatctcactaatttatggtttcagtgtagttatggtcatagcttctgagacgtgggtactcattgaagctaacagttttagagaaaggggagggtgtttaattccaataactggtagtttatatcactttaataatttagacccaatgatatgaagattagttagtataaggcagatatacatgtaatacattcttttaaatattgtacaaggagtaagaaacccctttaagtagtcatgtaattcattatagcagctgaacatttctaagtgcaacattataggaaaccagtaaagctgatttctgatttatctgcagcaaaagaatttaatattccaacttcagcaaaaggcaattaaaaacaaacttaaatcacattgtgtgcttttaatacgtatgtttttttccatgctgtctgatgtattttagttcttagtcatttacttccattagtttccaaattggttgagggaattaaattggtagccaagttacctatacaagattttcctactgtgtatgtgaaccactctttctgggaaaatcctcccgttggcacttttcttgaaggcatgcactttttccacacttagtgatttggggactgaagcctgcatttagcctgtatttagtcagaggtgacaaatggctaaattttttttttccagtttagagattgagaaatgattcagaattgaaactaaagtgaatttggacttactgtatttctttgcaattacttttaaacaattgctgtctgttactattaggcatattttggacctatgggttccattttgggccgatatttggtgttatgttgttaaatttcttgcctggcttagatggttcattgttgaaactaaactggaactaggtttgatcagagggccaatggaaatgcacgttgtggcccatttggggaggacaaaatttgacatatttttactttaagaattcttaggaaaatttggataacgtgagaatatatttccaaagggttaagtaattttcgagggaaaatcagaaagcttgtaattcctactgaaaatattagcctgctgaaatattagcctatttcctactgaaaatataacattagcaggccgggcacagtggagttcacgcctggctaatttttgtatttttagtagagatggggtttcaccatgttggccaggctggtcttgaactcctgacctcaaatgatctgcctacctacgcctcccaaagtgctgggattacaggcgtgaaccactgtgcctggcttgacttttttatttaaaaaaaaaaaatctatacccaattgccctatcagtttatcatttactcacttatttgaaacggtcatattaacatacactctttatttatttatgtgcctatactttgttttaattactgtatctttagaatatgtttcaaaatttcattaactattataattgattctctttttttgtaacgtatcatcagcaaataataatttggactcttctaatatttctgcttatttattgacattttcaaagaatagcttatgattgataataatcataccagcgaatacagtgcttttcaacttaaatatgcacagcaattacctgaggatcttattaaaatgaagactcagtagggctggagtggcctgagagtctgcattttgacaagctcccaggtaatgttgacttatgggttcatagaccttatgttgagttacagggaactaagatttattgagtacttaatttgttctggtcagtgcttttacatctgtgaactcgtttaatctttaaaactccatgatgattattatccccaatttgccagtgaagaaactgacacttagagaagtttataacttacccaaagtgacgcaaccattaagtggaagagccagactgagcccaagcagagtttgcactctgaacctctcgaatatattgctttaccacatgcgtgttcgctcacacacacacacaacagacattatcttctcttgtgtgactcaaatggtaataccttaaaattttttttttaatgaataggctttattttatctattttttgagatggggtcttgctctgttgcccaggagtgcagtggtatgatcgcagcttaccacagccctgaacttctgggctcaagccatcttcctgcctcagcctcctgagtagctgggactaccggtgtgtgccaccatgcccaactaatttttaatttttgatagagacgaggtcttactgtgttagccctgcctggtctcaaactcctggcctcaagcgatcccttcacctcagcctccaaaagttctgatattacaggtgtgagccacagcatctggccaggctttatgttgagaagtttagagtttacagaaaagttgagcagaaagtacggagaaatcccacatatcccattatctctgcctgtcctcacgattttccctgatattaacatcttgcattagtgtggtacatttgctacaattgatgagcaatattggtacattaactaaaattcatagtttacattagaatccatagtttgtgttgcacatttgtaagagttttcacaaatttgtaatgttgcatatccattattacagtatcatacagaataatttcactaccctaagaattccctgtgctgtacctattcatcccttcctctcctcagtccctggcaatcactgatttttttttttttttttgagatggagttttgctcttgtcatccaggctggagtgcaatggcatgctctcggctcactgcaaactctgcctctcgggttcaagcgattctcctccctcagcctcccgagtagctgggattacaggcatgcgccaccacgcctggctaatttttatatttttagtagagatggggtttcaccatgttggccaggttggtctcgaactcctgatctcaggtgatccgcctgcctcggcctctcaaagtgctgggattacaggcatgagccacctcgcctggccaatcactgatctttttactgtctccatagttttgatgttaccagaatggcattattgcatgtagccttttcagattgactttttttcacttagtaaagtgcatttaggtttcctccaagttttttcatggtttgatagctcattgtttttagcactaatattccattgtctggatttccactgtttatttacccattcacctattaaggaacttgttggttgctttcaacttttttcaactatgaataaagctgctataaacatctgtctgcaggttttgtgtggatatatgttttcagctcatttggctaaataccaaagacagaactgcgtgatcatatagtaagagaatgtttagttttctagaaactgccaaactgtcttacaaagtggctgtactattttgctttcccaccagcagtaaatgagagttcctgttgttctatatccttaccagcatttgatgttgtcactgctttgaattttagccattctaataggtatgtggtgtctcgttgttgttttaatttgcagtagcctagtaacatatgatgtttagcatcttttcatacactatttgccatctgtatatatcggtgaggtatctgatcatatcttttgcccattttaaaattgggatgtttgttttcttattgttgagttttaagagttctttgtatattttggataccagtgcttcaccagataggtattttgcaaagattttcttctagcctgtggcttgtttatgcctttagttttttaccattaaatatgttgcttgctgtctggttgtgacaaataatcatcaagttaagaaagcttctttctttgtctctctaagagcttttgtcaggaatggctattcagggaagtccttgaaaattatttggctaaacaaatagattaagctttgtttttagcaagacatcctgttttattccatataattaaaaacacattctttatagtgtgatattaagactgtaactgagactttaattcctattccttctaaatcattttctcttactctgtgattttgtatgcctttaatgtccatgttgattacttgtccagcatcttaatctcatctgacttggtctttcttctcccagctatctgttcttccacttctctgtagcaatttatttctgtggccaaacgtccacttctggaattacaaatctgtaaatttttctctttgaacacaatttcctgtcttttcagttcttccatttgctgagtttattttctcatttcactgaggccgccagccccttaaatctccattgtctcccaatttgtgacattcttcctggcatcactttatcccatatggatgccataattggtcactttcaatgagtcatcagtatccgcagttctcctgcatctttgttcttctttcccacatgccatgcagatctccagctgtggattaacagtactgccctttttctgtgttcccgctctagggcctgaagaaatgatttcatcatattaatttgttcttttgctaatccatgggttttagcctcatctgtgcttattattctctttagtagttttctcacttgtttggagttgatttcatttctccttcaccagaatgacagttctttctaaatctttccacattttcctttggttcgtgtcaccttcctccattgcagctgattctacacttcagcagagtgacctttaaaaagagagaaaacaacaaatctattatgttatttcctgtacaatactgttcattataaagatggaggtaatttttttttttttttttgagatggagtctcgctctgttgcccgggctggagtgcagtggtgtgatctcggctcactgcagcttccgcctcctgggttcaagcgattctcctgcctcagcctcctgagtagctgggattacaggtgcatgccaccatgcctcgctactttctgtatttttagcagagatggggtttcaccatgttggtcaggctggtcttgaactcctgacctcatgatctgcctgcctcagcctgccaaagtgctgggattacaggtgtgagccactgcacctggccagaggtaaaattcttaagtttaacaggatctttctggttttctagcctcatctctgtcctcttagcgccttagcttcactggccctttttcagatccttcacatgccaagctcattcttagcacagggctttgtatatgctcttttctctgctggacaccttttttcttggcatgtttaatttgtatttatcttaaggacttagcttatgtgttcctttctcaagaaagttttccctgaccttccatttgcctaaaggtagattagattccctctgaaattattaatagtaatgatggtaacaacaataatagcagcaacctttgagtgtttatgagttgcagagactgttcttagcacttacacataggaagttttttggttttcatagcaaccctatgagttgtataggtgggtaaataagtaggacctagaattatctgcatcttatagatgaggaaactgaagtgaggaatgttaagtcacttgtccaaagtcacacagccatttggtagcagagttggaatttgaacccgggcagaccccagtgcccacgttctaaactgctgtgctctactgtaatggtgagtataactgtgtaatgttttttgttaatgcctacctttgttggtaggctctaagctcctcgaggtcagaaatcatacctgtctggttaatttccatggcctaggacggagcctggcatggagtagtctgtgaccgagtacttgttcctattgaatgaatcacagcttgccagtctactaaattgaggaaatagagggtttcagtgtgatccttttcacttttcctccccactgcttccaaatattaaactcccttggttaaaagaataggtgcctgtacttatttcaaaatctaacccctctacctgtttgccttgtatattctaggagtaatttatgtacttcgtaagaaaaattagtgcagatgtacataaagtaaaggtatacgtcttccattttttcctcctttaacgttttatacttccaggtgtcaactgctagtagttaaatcttcttctgtacatgtacacattttgtggacacttaaaatacacaagggtaatgtatgtagtattatctaagttttttaaaaatttaattttgatattgaacgatagtttcacaagatgtctccattgagggaaacaaggtaaagggtacaggagatctctgttgtttcttacaactgcctgtgactctacaattatctctaaagaaatggttaattaaaaaataaactatagaaatattttcatgtcagcgtattgacctgtttcttttaaatggctatgtaaaatgttattatatagatgtgtattactttatttcacgtttcccctattgatggacttttaagttccttccatttttcattttcaccaatattgccaaaggtggaccatccttgaatttgtaggtatatccttggttggtatatatgcacagccaagttttagaagaggagatcaaaagatgggcatatttgaaatgttggtaagagttggccagaccatcctccagacaagtttatactttcgttagcaggtgagatagaagctctgtgtgttcacctgcactgtcctgatcccattctgccacttcttcttggggactttatatctatatctatatctatatctatatctatatctatatctatatctatatctatatctatctatatatttttattatactttaagttctagggcacatgtgcacaatgtgcaggtttgttacatatgtatacatgtgccatgttggtgtgctgcactcattaactcatcatttacataaggtatatctcctaatgctatccctccccactccctccacctcacaacaggccccagtgtgtgatgttccccttcctgtgtccgagtgttctcattgttcagttcccacctatgagtgagaacatgcggtgtttgattttttgtccctgcgatagtttgctgagaatgatggtttccagtttcatccatgtccctacaaaggacatgaactcatccttttttatggctaaatagtattccatggtgtatatgtgccacattttcttaatccagggactttgttttattaactaatccttttccatttaatatatctacttccctgttggttctcttctgtctcctcatcctgtagcacatcctccaaactgatagagctttggttgctgtcagttcttttgtgctgctataggagaatacctgacactgggtaatttataaataacagaattttattttctcatagttctggaggctgggagggcactggcaggttcattgatggggatttggtctctgcttcttagacgatgccttgaatgctgtgtcctcacatggcagaaggcagaagggcaaaaagggagtaactccctccatcaagcccatttttaagggcacctaattgcattcatgaacggaggaaccctcatgacttaatgatgtcttaaaggcccgacttcttaataccatcacgttggcaacatctgacttttagaggcggagacattcaaactgtggccctagccaagtcctttgtgtgcttttacttatctttacaaccatcctatgagatagtgcctgtttctctgcctacttgttaagcgattatattcttctggattttgtccttggctcctctatccaacccacctgtagccccaccttctcttctgttccctcatccaaaccagagagaccaggatttgaatctggctccattattttctccctaagagacacggaatgatttactttgtctctatgtttctgtttctttctctgtaagtaagagtggggagactagagctacctatctcaggattgtgtggagtaaatgaataatgtgtgtaaaacatttaaaatagtgtctcatgtacactaagtgcttaataaatgctaataataggaatagtaacaacagtatagttacattgttattataaatctgtatctgtggtactcttagcttaagttcgtacaaaaatattgagctgcctgttagaaatctacatttggatgcctccccagatatcttaaactcagtttatctaaagtcagagtctttctgtggcttcagtgcttagtgactgtgtccgtgaataaactacttattttctttaagcctccatttctccatttatgaaagggtgataatgaacttattttatcaatattaaatgagataattcttgtaaaagtatttagcatagtgctggtatatactaatatcttaataaatattagttgctattattattattccttttaaatgctgatcccctttttgtcctgttctgcccagaaaaagagcctcaggatagctttgcctgtctgcctgtcttccttatccttcatatgcaaccagtcagcaagtactgttattttgtattttcattttaaacatcttaatttttatttattttaaaattatttatagagatggggtctcactatgttgtctaagctggtcttgaattcttgggctccagtgatcctcccacctctgccaaagtgctgggattacaggtgtgaaccaccacacctggcctatcaagtactgttgattgtgcttccgaaacatgtgcttgcatccaaccactccttatcatttcttgacacaattattgtggtaatctcctaattgctctcctggcctcttggccatcttgtacctttcatcctgagttatctttatagtaggtagatctgctcatatcactcagcagaaaggcctctgatgggtctctcttacctgaaatataaagcctccaaggcccactacaccacagtcatctttagagcctcccctcttgttctgggacccatgggtcctacagtatatgcagactactgactgttctgtgactgcaccctgtactctaaatctcatacctttgtccctgacctgctgttgctgtacctgccttctttttgcttagagggttgtcccctcaagcactccctgctaataagcactcagccttccaccccaaacatctagtctgtctggtgaattcctggtgattcttcagtggtctgtctcaaatatatcttctacgctcttttctctttagtcttaactgccatccaaggcaacattagttagtccctcattataagaggcaatataagctggtgagaggtatatacccacagtcctagctacttgggagtctgaagcaggaggattgcttgaggccagcctgggcagcatagcaagaccttgtctctttgaaaaaaatagaaagaaaatgctgggtgtggtggctcacatctgtaatcccagcactttggaaggccaagtagggaggattgcttgagctcaggagttcgagaccagcctgggcaatacagcaagaccccatctctacaaaaactaaaaaaattagctgggcatggtggcacatgcctgtggtttcagctactctggatgctgagggagaaggatcacttgagcccaggagtttgaggctgcagtgagccatgattgtgctccagcctgggtgacagagtaagaccttgtctcagtggagggggtagggtgggaggggggaaagaggcaatatagtggtaagttaaaatccctgagtttggagccagactgcctttgttattaaggtagttgtatataactgggatgaaactgtttaacttttttgtgtctcagttttctcatttataacaaatgagtaatattagtcttgctgtgagggttaagtgaattaatgtagggaaaatgcattgaaagggcttgcatattactaagtacttcataaatatagctattattattattctcaaagcatttcttacatacttacctataatagcatttgccactttactttttttttttttttccaagacagagtcttgctctgttgcccaggctggagtgtagtggcatgatctaggctcactgtgacctccgcctcctgggttcaagcaattctcctgcttcagcctcctgagtagctgggattataggtgtatgccactatgcccagctaatttttgtatttttagtagagacagggttttaccgtgttggccaggctggtcttgaactcctgaccttgtgatccacccacctcggcctcccaaagtgctggggttacaggcatgagccaccgcgcccggcctgcagttacttttttgtgtatatttcccaatagactgtggcttttttgaaggtgggctattttaatcatctttgtgtcatcagtatgtagtacacagtgggacccagtaaacaatcagatgtgctgtttgtgtagcccagaataaagtgccaggtcctcctgcattgcagcagtcagcagcatgcatctggaaagtattgctttctgaaactacggcattagagccacaaagctgtttgggattggaccttagcaagctcttcaaccagaaatttgctattacaatgaagcttcctatctgcaataggtagattgtaactgacagcatgtagtcattggaaggaggttaatcccagagcataagaggacttctgatttatttttgcttaaagggatacaatccaaggccacaaaggctgctataagacttttgttttgttggggataataaagagagctgtttctgccttttccactttcttcttataaacctgctgaagattgaaatgttaaaatgtgattcagagaagagatttctttattgtaaacatgatagagagctcagaatgaatgccggagatagactctttatagaggatttcagggtattaaactcttaagccccttatggtcaggttttactgccaacccttaacaccccaccatgcctgggctactgcaatagtaactggtctttctacctttaggttcgctgcagtctctcctgcctactgctatgatattaatatttataaagccttactttgacttttctcatgcattataaaaaatcctcgcaaaataccccatcatatacaaggaaagttccaagttttagcttgtcattctggacttgtattaggattctccagagagagagagagagatttctttcctttctttttttctctttttttttcccagggtttcactcttgttgcccagtcgagtccagtggcactatcttgcaaactgcaacttccgccttccggtttcaagcaattctcctgcctcagcctcctgagtagctgggattacaggcgcctgccaccacgaccggctaatttttgcatttttattagagacgggatttcaccatgttggccaggctgatctcaaactcctgacctcgtgatccacctgcctcagccttccaaagtgctgggattacaggcatgagccaccacgcccggcctggatagatggatttctgtaataaacctctataggccaggcgttgtagctcatgcctgtaatcccagcgttttgggaggctgaggcgggcagatcacctgaggtcaggagtttgagaccaggtcggccaacatgttgaaaccccatctctattaaaaatacaaaaattagccgggcatggtggtgtgcacttgtaaatcccagctatttggaaggctgaggcagacaatcacttgaacccaggaggtggaggttgcagtgagctgagattgcgccattgcactccagcctgggtgactgagggagactcggtctcaaaaaacaaaaaacaaggaaaaaaaccccaaaaccttcataataagtttccatatctatatctatagatatagaagaggtttattttatatatataatagatacatagataggtataagaggaggtttattatggaagttggctcatgtgattcatgtgatcatggaggccgagaaatcctatgataggccatgtgcaacctggagaaccaggaaagctggtggtgtaattaagttggagtctgaggtcctgagaaccaggggaatcaaggctgaaggcctgggaattgggaaggggtggtgtgctggtgtaagtcctggagtccaaagacccaagaaccaggagctttgatgtccaagagtgggagaagatggatatcccagctcaagaagaaagagtgaatttgctcttcctctgccgtttgctctctctgggtggaaaagggtaaacagattatgacgcccaccctcattggtgagtgtgggtcttctttatttagtttactgattcaaatgctaatctcttgcagaaataccctcagagacccacctagaaatgttttatcagctgtctgggccattccttagcttagtcaacttggcacataaaattaaccatcacaggactcttctgcagtctgactctggttaccttttctaccttatcttccactatatcctagaatgagctgtgtagcttacctggcctagttgtgagtcctataatgtgaattgcattttatgtttgtatctacccagaacattttaccttttgaaattttgcctctcctttaagatccattaaaaaaaaactatttatttatttatctgtttatttatttatttaatttattttttttgagatgaagtctcactcttgttgcccaggctggagtgcagtggtgtgatctcggctcactgcaacctctgcctcccaggttcaagcgattctcctgcctcaagcctcctgagtagctgggattacaggcgtgtgccaccacgcctggctaatttttgtatttttagtggaaatggggtttcaccctgttggccaggctggtctcgaactcctgacctcaagtgatctgcccgcctctgcctcccaaagtactgggattacaggcatgagccaccacacccagcttattttgaaataattatagaatcataggaaattacaaaattagtacatcgagtcctgtatacccttcccccaactttcaccaatggtgatatctttttgtgtgtgtgtgtgtgtgtgatggagtcttgatcttgtcgcccaggctgttgtgcaatggcgcgatctcagctcactgcaacttccgtctcccaggttcaagcgattctcctgcctcagcctcttaagtagctgggattataggtgcctgctaccatgcccggcttatttttgtacttttgaagagacaaggttttgccatgttggccaggctggtctcaaaccctgacctcaggtgatccgcctgccttggcctcccagagcattgggattacaggcgtgagccactgtgcccggctgctatcttatataattatactataatataagatcctattttttttttaagagacaggttttcgctcagacgcccaggctggagtgcagtgctgtgatgctagctcactataaacttgaactctgggctcaagtgatcctcaggaggaggatcctagctcctgggtagctaggactacagtcacgtgccactatgcctggctaattttaaaatttgtatagagatgatatctcggtttgttgcccaggctggtctcaaactcctggcttcaagtgattcctccacttcagcttccaaaaatgttgggactaggtgtgagccattgcacctagactgatccattttaaaactctattttgaataaaattttcaggggtaaaaaaggtttttttcttttccttttcttccttgcttctttctttctttttttttgagatggagccttgctgtgtcacctaggctggtatgcagtggcgcgatctcggcttactgcaatctctgccttccaggttcaagccattctcatgcctcagcctcccaagtagctgggattataggcatgcaccatgatgcttgggtaatttttgtatttttagtagagatggtgtttcactgtgttggccaggctggtctcgaactcctgaccttaagtgatctcccggccttggcctcctaaagtgctgggattacagtcatgagccactgcgtccagatggaaagtatctttttaaactttatatccctccctagaatttatcccctaatatatggtgtttatggaggtggttggaatcaactactttttataaatatattattaaagagttgacaacccctaaaaatcttttagatgctagacaaaaaaactgagagaaatcatgaagtatttttttaaaaaattttttgagatggagtctcactccagtgacaacccaggttggagtgcagtggcacgatctcagctcactgcaacctctgcctcccaggttcaagcaattctcctgcctcagcctcctgagtagccgggattacaagcgtgcgccaccacgcccagctaatttttgtatttttagcagagacggggtttcaccatgttggtcagggtggtctcgaactcctgacctcatgatccacatgcctcagcttccctaagtgctgggattacaggtgtgagccaccatgcctggctagtcatgaagtattttaaaggacgtgggttctgacactcttaaattcaataggccaaagttcctggcatttttttcttggatatgtaccgcatagacctttcttagtagatactgggagaaagaagttggtttaataatgaattaatgggaaagttttttttttgagacggagtttcgctcttattgcccaggctggagtgcaatggcccgatctctgcttactgcaacctccgcctctagggttcaggtgattctcctgcctcggcctcccgagtagctgggattacaggcatgcaccgccaagcccggctaattttgtatttttagcagagatggggtttctccatgttggtcaggctggtctcgaactcccaaccgcaggtgatcggcccacctcggcttcccaaagtgctgggattacaggcgtgagccaccgcgtccagcctggaaagttttaattgaccttatgtctgtataattaaatgtatttcattaactttttaaaggtaaataaatctggggtttcatctaagtgtcaaaaatatgattttcaccaatggcctacttatttttgccattatttgcataaatagctttctggtttttctcaagttaacctgtatgcttgtgatgtgaaagtcatagtatgtataaaaaatagtaccaagatgaagtatagatggtcattctgaaccattattccttagcagagtgaactatatttaaggttttagaaataaatcgtatttccatgtctgaataagaccttagtcttatttaaataaatgtaggggagatggagagaaagaataagatttgcctaagaatactaatattaagatgaatggcaggtaggacacactgaggctgtcaggcattgttctcagtgttttacattcaccatcttgcttcatcctcacaacagactttatcatttgattagaaaaaaatcagtacgatctagatgttctcattgaataacattttttcataaacaatttaatttcatttaatttatattgttactattttttatataagtaaatatgaggtctcactatgttgcccaggctggtctcaaactcctgggctcaagcagtcctctcacctcggcctccgaagtgctgggattacaggcatgagccaccacatctggccctgaactattttaatgcaacaagtatttactgagttccgataaatgaaccaagtctggtgctttagaaccatgatctcaaactggaggacatgtctaagaatatctaggcttggactgttttaagagaataaatttccagattctctatattttatttatactctttcctgaaattgacttgtttgaaggcaacactgatataatgctagtccaccttccctaccctccctttagccctgtgccttcttatgattaacagaagacagccatacctttcacccatcttgaatctcaccattgtacctttctatgaggtataaaatcctccaggattctaacaaagggatagtcaaaacactagtgtcacgtgtgaaacttccttttatcaaggtatcttcctccatacatcttattaagagatgcatctccaaaaaaggaaattactttttatgtttagttctcaaaatttgtaacatttgcattgtcttcatcgattgtgttttactataatagtaaccataccacaatccaacataaataaacaataatatacatgttttcattaaggaaagtatgataaaagttatattaaatactgtggaagaagcagaatagaaatacagtttcagggagaccgataaatggcatagcattttatataggaaaaaaagattctgttacagttttaaaatataggatgggggatatcagattgcccaggtgtttagattttattggaattagtgatacagtagggttttttgtttgtttgtttgtttttaagacagggtcttgctctgttgcccaggctggagtgcagtggtgcgattttggctcactgcagcctctgcctcccaggctaaagcaatcctcccacctcagcctcctgagcagctgggactacaggcgagtaccaccgtgtgtgactaatttttgtatttttttgtagagacggggttttgccatgtggctcaggctggtcttgaactccttggcccaagtgatccacctccttccacctcccaaagtgctgggattatgggcgtgagccactttgcctcaccaatatagtaggtttaatagctttaaaattagcaatataatagtgtttttaggtgtcagttctaaatagacatagattgatatataaatgaaaatataacctttgcagtgattaaaacttgtaatgaaaattttagatgtcaacctaagaatattcaaggagacacctttttccccccattaaatttgttttagcaggtatgtgagcaaaacttttgaatagtgccgcaaaggatatagagatcaagaagaaataatttttgccctcaagatgcttgttagttaaatggtgaagcaggggcatagatacatggtttggcttaaataaagccttaattgtgtcatggtattttgctgtttgcttaacatgggcattgtgcctcagtgttgtgtcatgcttgttaaaatgacccttgagtggtagtttagctcatatgtgctgtgttaccacataggctattgtgcagaacagtgaggaattgtatattgtgaaagacagatggataggaacagtgcccactgcacttaccaccaatgaatggtagggctttctctcattgtctagttgatgtgatcataaaaaacattagactggaagtcaggacaccctaattctcatcctgagtctgccacagaacgtatgaccttggctaaatcatttaacgcatttgaactctagtttcctcatataaaaaaagtttaaactggatgattttctacctgtgaagtttagagttcatacatttttacacagtatatgcgttttagaagggataggtgcagcagattttaagaaacagatgccaaaataatggagtagattacttactgtaatatgcggagaagagtagcttactaattatttatctaagtgtgattaggacagtctgttatatggcttgtcgtaagtgttgtgggtctcaccactgccctttttatttaaaaagagaatttcctctacttttgagaattagaacaaatactacacaggattagtaagcgagaataccaatttcagcttcatgccagtgcctctagtgaaaaccacatttttgcagtgttctagcagaatattaaaatggcttatggattacagacagctcaggctttggtctttataggtcagaggtggaaaccaacggagcaattaccgttcactcttatgggcggggcttcttaggttccttatggagctaaagtgaaactctggaacagttccactagaatggctttcctgggagcttatgaggcttacattctgaaactgatactcttgtagtacaagaataactacaaactgatgtggaattaggaggccagagaggggagaagccacatgtagctctcattctcacaagtcctttggctggcgaacagaggtttttcccgtcactaagcagatatttggttatatattgacaaatcctctctaaacaattcttagaatagaagactgattctgtcttgtgctttggaggtgaaggggaagagcaatgttgaaatgagtgaaattagcttgtgatggtttaacatctgcaaatatcatctatctaaccagtctttatctcctatgtgtgttcttaaatatggtccccattgtttgaagccaagaaagataactgaggaaattctatggctgatttgccgatgttattaccaattatttattagccttagtatcggatagtttgactgatttgccatgttgttttttagaaatgggggtcttgctctgttgcccaggctggagtgcagtgacgcaatcctagctcactgcagcctcgaactcctgtgctcaagtgatcctcctgcctcacctgtgagtagctgggacaacaagcgtataccaccacttctggctaatttctttttttactttttataaagacggggtctccctatgttgcccaaaggctgatgatttgccttttttaggtagaaaacctggactgggccctcaagtttttaactttttttttttttcttggtgatacaaaatgtggggtgaagaggtctgttaaagtgaccaggcttggtgctatttaaagccgaggagggaaatactgtttcctggcaggctttattgtgtttttgtattattaaatctcttaagtcagcagtttactttttgtctagttgtatgtcttggcttgtctaaatgaatcataattaaaatttagtcactgggactcttaatcttgtctaagcaggaattatagtttagagatactataccttgctgtgtatagaataagaaaagtataagtctgctatgatcactgagatgggtttttataagtactaaacttttttagaagcatagttttctttatcacctgtcccccagaaagtttagaaagtgaaaattaaaaagtaagtaaaaataatggtattggagttataatttggaaatttgtttcattcacttgcattttaatatttattatgtaaacatgaaatgataaatttgtttcctttgaaaagattcaagaaatagaatagttttaaaagtagtcttttacattcctttgcttattgacaaaatcatcatcaggaacatcgattcagggaatgaggcttctgatccatctcaaaacgaacattactaatatttgctatggtcatttgacataagtttttattgagtcagaactatactggggcagtagccttcaagccagttaaacatgaattaagaacttgtgtgccaggtactgcactaaatgttaatggcataaaggtgaataaaacatcgtttatactgtgttttgtttcacacaggatttgagatggctgacagaaagtaactaaagtgagattgtaaaatgtaactgaggttcagaaccagggaaaagataaattagatttggaggcctagatatggttaaataattaattagacatgaaaccctatggctgaacagttcagttgaatgttgattttagtagtgatatgatacagaagctaagctttgttatagtcacgcaatgttgaggcatggttaatatatttagcaggattatgaagagttcaggcattttttggaaactcctatgaatatgtcatctagaattggttttgtaaaatggtagtgcttgtactgtttagttacatgtgttgaatatcagatggatttcagtatttttttaaaactttgcttaagcctcttaagcctcattgagtggggagactgcagtgtaagtatccaggctgaagactgaacttccaccttatttttatgtggtaatgagtttttgtttagatgatatatatgttttaatgttgagatggaaaaagtagaagtgaattgcagtgtagaaactactctgtttccttttttatctatttttatttcagtcattaagctttccccatctttagtctattgagttgtttcatggcacgttcggagggatggtgggaatgccctttgctgaatcaaaaactactgtttctccaacttcacaggttagagaagctcatcaagtcaataatttataattttaatatggaagctgttttgggaactcttgtgggcatatcttggttttaaaagaagaaaaaagatttactgatttaagaggtatataaacgcagcttgctgacagtagcttttgattttattggttcaacagatatcattgttgcacaatacataatctttcactgtggcagctaatgagatacaaaactgcataattgcaccaacagttattttccttatagaatttggcggctactaagtaaacaacttttaaaatttatcttaattggtttagttatgtgccatcattgaatgagtcttaacattttccttcacgctgttgcactccacattcttagttgaacagagaaagatattattttaagggagggcttgatcttttagcattttagccagttggcttttcttaattaggatgattactcatatttagatgaaatctaactgagaaaccacagcaaaatgcttactgaaaacattcgggtagtcagtgtggaggaaagactcctggaaaataaaatgtctcaaggttgttttgaagtttatcctcattgtttttatttatccttatgtgtgttaagtatacgaggattcctggttgtactggtattttggcaaagtcctgtactgttcctcaaatgcttctaatgcagacactgacttttaagaaccagacacatgtagatgtgcagcgagacaacactctggcctttaaccattgtgcctcctttcttacctgcgaattgcgtttactagcgtatttcacatttcagccaatagatctaaagaatacaaatgagaacatataggacctgtctgcaaataggttttaacttccagagattagaagtagctgttgagagcactgtgggtttagtgagaaagagtgctttggcagaatgggcagtgtctactgtaggctaaaaatgggggaactatagcatatcatgagccttctgtaaccctcgaagtcagttattagcagttgaacatgctctttggtcataatggcagtccccaggctccagataataatttgagcagggagctgggagaaataaggaggacatgagtacatgggacaaaagtgggccagtaaagggaaaattacatatgaatggaagaatagagaatggaaaatggtaaactggagagaaaaagatgaaaaagacatgaaaaaaaagagtagggataaacgggctctacctgtttccttttctgatcagtaaaggaaaatacttcttgaaatccttagggcatctttggacaaggaaatcagaagtaattcaaattgtattgttgtcagagtttagtcttaaaagttgtgttgccaggtagaaaacaaagcatgataatcatttatagaactcctttagttggtttacttgcctcttagggtaaaaacaaaattagacttccagagtagtctgtgatcttggaaaagtctttctgaaaaatgattatagaactgttaagacatctcccatctcatctcatatggcatcatacttttcccaattattttcagatattttagcatcaaagttttctagaatgagttttgtagaacactagtatccctcattgcttaaatatattaggaggaaaaggattttttttattaaataagtttgggaatatatagagtggacaaaattagttttaaaattacaggtcatttgagaggtcttgaagtaccagtgtcttgtggatccctgaagggctagatgagggtggggcatgtagcctttctcaaatttatgtgactaccatacagtttgaggaaagctggtctatataaatgcattacctgtgaaacctggctttcttccacatctcctctgacttgctttgctatttttttccccatctcttacagtacttcctgctatcccccaaattgggggaattctttcttttttcattttaaaatatgatattctggagatctgaattctctctttttacatttttatatgtgtattccactttgagcaatattaatactagcttacattttaaaatacgatattctggagatccaatgtataacatgagggctatagttaataatattgtattgcactgggattttttttgagagtagattttagttgcccttgctaaaaaaaaaaaaaaaaaaaggaggcaggtaactgtgaggtgatggataaattaatttgcttgactatagtaaccatttcactatatataagtatataaaaacattgtgttgtataccttaaatatatacaatgaaaaagaaaagaaaagaaaatatgatgatagtatttatatgtgaactctttatttggatctttaagtttctggataatctggtccctaatcttatctacattcccaggtttattcatcaccagtcttccatggtaagtcttcacttgagctcaatttactattccatgattatattctgtatgtggaatgttctcctctactttttgtattatggtctggctcaagtgcaccttttccatgagaccttccctgatatctttagctagaagtaatctcttccttggcacatctgtagcatttatgtactaatacctatagtgttatttacagatttatttgtggttatttatgcacatgtcttagatttcgagcttcagaagagagggaatagcatgccatatcacccagaagcttgtagcttagctattgcctagtaacattattaacagagtaataatgtcagctaacatttgttgtttactataataaatgacgagcacagttctaaatgctttagataattaatgtagtgaagaagtagagtaacttactcagtcacatgctcagttagtgatggcgccaggatttgaacctaagcattcttctgctctttatcactatacagtactgcttgctatgataggtgctcagtgagatttgaatgaacaaatgagcagacaaggctttgaaaaagagggcccatcatctgtggctcaagctcataaggcactttcttttccccttttcaaagctgacatttatcatttatctagccatgtaatgttttcagtgactaagaacaattagctagagttcaggtgggctgtgggagtggtagagatgagtgtgtggggaaatgtgtttagtcactgtgtttattttatttatacactagaacctgctgctatccttgttgaagaaatagtggtgagtccaggctttggagtcaggaaaacctggatgggagtttcagcttcttcatttattagcagtttgggcaagtttcttaacagttgtaaaccgtagttttcttctttgtaaaataatagtaactacttctttagtgtctatgtgaggattaaatcagatgatcatgtaaagcacttagctatagtacctactacatattaagtgcccaacaaatgttacttatgatacaataggttttacttaacataaaattaactcctaatttcttaaaaaaatatgtcttttgaatgtggacctttcgattttagtcagctaaagcattaagtctgttttcttccactccctcaacttcatagtaacatgtctgtttataatatgcagtgagaattgtagtgtacattgcaccatttatacactgcaaacatcatacattagtaacaagtctgtcatgaactgagttaattgtagggtttgttctgaacattttcttgccaggcatggtggcttacgcctgtgatcccagcactatgggaggctgaagtgggaggatcacttaagtgagttcaagaccagggcaacatagcgagacctcacctctacaaacaaacacaattaaaaaaatatattttttcattgttgagctttattttcggtgtttgtaatatgaagacaataggtatctttttatttatcaaataaggtttattaattatgctttttcttttaaatgacagccttgagtcaactttttctgtctttgtgctaagaattacagtagtctcaacgtagagccgaggtgattctgatctaaagatgctccgtgaatgtgcgatatttctttttcttttttttttgagatggagtctcactccgtcgcccaggctggaatgcagtggcacaatctcagctccctgcagcctccgcctcccaggttcaaacaattctcctgcctcagcctcccgagtagctgggattagaggcacacaccaccatgcctggctaatttttgtatttttagtagagatggggtttcaccattttggccaggatggtcttgatctcctgacctcagatgatatgcccgcctccgcctcccaaagtgctgggattacaggcatgagccactgcgcctggccgcatgtgggatatttcgaagaatcttagctttgatgcatctgtggggaagaaatgagtgattattaacaaaggtaaaaggagaggagagtcattgcaaataaagaatcttgtagcggccaggtgcggtggctcacacttgtaatcccaacactttgagaggccgaggaggatcacctgaggtcaggagttcgataccagcctggccaacatggtgaaacctcgtctctactgaaaatacaaaaattagccaggcgtggtggcgggtgcctgtaatcccagctactctggaggctgaggcaggagaatcgcttgaacctgggaggcagaggctgtggtgagccgagattgcaccactgcactccagcctgggagacagagcgagactctgtctcaaaaaaaaaaaaaaagtatcttgtagcagtttattctaggccagagccacagtttgtgttgatttggctagaaattattaaagttggtattctgtgaaattttgtttgagtggttctttgtttggttgagcgggttcagatgaggctgagaaaacaggaagattgtgcttggaagagggggagaaggcttccttaggccaaggcaggtcagtcattctataaggagagtctctatacaggatgtttctgcttttaaaaatatggtctgatatgcaaattcacttatctagtgcaaatgattctggcaaaggtttctactttcttgattcaggaataagacaaaagagttttccaccccatagtacacaacaaaaaagaggcattataaaacttttcagaactactaaagtggtatgattttatgatttcttgttgaattcagcatttgaaaacagaagaaatgtgaaaacagaggaaaggtgcttagcataggaattaacttgtttcttggcaaggaaaccagggtcaggtgtttgaatcacttggctttgtggtggttctgttggtttttgtgtgtgtgtttttcttcttctgctggattatcatctctttttttctgccttggaaactgttgctttatctagggcaatcaccccacttacacaggaggcaaattcaaagctggttgccttatgttgttaaaagctgtcagattcacatcctttgccatatccttcttcaggagtcaggacaatgaagacaggagtctaaacatggggccagagtgagctgccccgtcctcagtactaacacctattcctgacagcttaagttgcttctcagccttagtgaagctttctcagctattctggctcatgatgatcattccctcctttgaactgaaatagcctaattgtctctgagtcatgtggcaattagtcttgttttgctttctgatatctcttgtagttgacttttattgttaatgtatgctgcttgaaggcaagggctgttgtgaatttattatattgctatatattttacagagactcttgatttttccctggtttaccttgggaagttttcctgcctcttaaatggcgagaggatcctttagaagatttcctaactctcagaatcttttagatttttcatgtcatgctgtgtttgctatggccttgaaaaagcagtttttcccttttttgcagcagacacaaccaagattctggataaagaccaggcaacacaattttcctagagtaatacttaccttgagtagtttcttatggggaaaaaagcccccaatattcttaggcttaatttctatgatcaaatattttaaagatagaaacaaatgatatatagtagttaggtatgggggcaggcaaacaagcaaaatgttaagatcttgcatgactaattagtactgtataaaacacatttaaattttgttgtacccattcttacattagaaatgaattgattgattcatatggtattggttttcctttaagggatttatttcttaatgaatcagaggtttcacattgaaaaagaatctgcgtatttttatatactatcccaactttcatctgagttatttcatgtttttcattgccccattggaaaccgtattttgccgaagagtcatttaatatatttttcacactggctttgatttggtgacatgtagcagttctggaagaattaacgatatgttaacacaagttgactgtgatagaataattacaataaatatgcctattttcctttggggagaaaagtctaaaattctgctttatagaagctattctcagctctaaaagagcatatatgtagatcttcatttcttttcttctaacaattttaggggaaaatacaaaccttaagttatttcctgaaatatttcccaggatgattactaccttggattttaaggcttctttcttcacaagttctgactcttctataagcacaatcagaatggtcagaatgctgactctcctttaggtagtcagaatgggtcttccaaacctttgtatgagcccattagctgcctcagctttccctcaactttcaggaaaacacaggttacatattctttacgttactatgagaaactacctacattatttttttttaaattttatttttggctgggcacattggctcacacctgcaatcccaacattttgggaggctgagatgaaaggattgcttgaagccaggagttgcaagacaagcctaggtgacaaagtgagaccttgactataaaaaaaaaaaattaacctttccggcggtgatgacctacccacacgagaacatgcctcttgcaaagggtctccttcatccctctccagaaaaggagaagaggaaacacaagaagaaacgcctggtgcagagccccaattcctgcttcatggatgtgaaatgcccaggatgctataaaatcatcacggtctttagccatgcacaaacggtagttttgtgtgttggctgctccactgtcctctgccagcctacaggaggaaaagcaaggcttacagaaggatgttccttcaggaggaagcagcactaaaagcactctgaatcaagatgagtgggaaaccatctcaataaacacattttggattaaaaaaaaaaattaaaacaattagccgggcatggtggcatgcacctgtagtcccagctactctggaggctaaggtgggaggatcgcttgagcctaggagctcaaggttacagtgagctatgatcacatcactgcattccagcctgggtgacaatagccctataatgtaggtagttacttttatctgcattttacaaatgaaaagaactgacagacattgagttaaaataaccagtacaaaaatcacagatgggggatagccaaagctttaaaatggaatagcaggaagttttaatttgcaaatagaatcattaatgtttaatagaatcattaatagatttaatagaattaatgaattgatagaatcattaattcatacttagtttggagtgattgttgaacacatttctcagctaatttaggtcttcattatattttagaacatattatctgcatcattaaaaaattcctcatttcctcattgcctatctctgccttttattcactcagttttaaaataaacagattttgtttatactgcttcttttattaatatttatggtaagatattttatactgctgataaatggacattaatgatatatagcctattgtttgaaaaaagcattttggattatagcccagaactggaaacaaccaagagataaataaatggtggtatattcatacaataaaatattactcagataaaaaagttcagttcaaaactttcagttttatcattgcattatttgcagttgtaaaacatggtaacatcacaaccttatgttacaaagttattaaaaatattagcaaggtacactgattgctgtagccatgttacaattaagctaaaggaatttcttgttaaccaaaagcaaaaaataagtttggtttttttggatcttaattgactatttataatagaacttgcctttgggtagcgaacagattcacaaatgaaagaggagattctggaacttactgtataattccaggtaactctgtaaagtttgaaatgtaaagaccatgccttaatacaattgataattggaatcgtgctggcatcttcttaacatctcttgcttgtctgtggagcatggcatgattacttatacattactacatttaggaaacagcctttataagacccactttttctgaagtttttggtgttactcttttcttaaccaccagtactgatctcattatgttttggccgacttacttgagggcatgctaaaaagtgatctaaatacttaatttctcccttcaattgtgcatcgtgttttacaaataaaccgtatctttactttcatttacttgcatgtcactgagaaaatttgagatctttagcattcatgtccttgcctgaagtataaggatttcacataatttcagcttttatcattcaagtcttatagatgcttttctcttgtctctgttttcaaataatggtgctaattatatttaaggggcagtatgtttattcaatatagttatagtgttagcagtgtaggatttaacaagcttttcctctggaatgtatactagttcttcatgttctatgtgataacttatacagtgctatggtatttttgttgttagatttaagttttctttgaattttttttctgtccataatcttaggctttctttttgtgcttactgtttttttctcccccagaatgatacatggcagcgattataaatctgttttataaaacttaacttcattaaacatatgaagaacgtgggattatttttcttgtcataaaaggtgacctccagtgacaaatggctattacattatttatgtgagattccttcatttcatatactgttatcaatgtgtttgataatggttgaagaaccagttggtgttggtttctaatactaattaataatttgccttgagcctgatcaatcttcttatatccattatcagatttttttcttcaaatctgaaaatgttttcttttcttttccttttctttttttttcttttcttttctttcttttttttttttttttagacggagtctcgctctttccccccagactggagtgcagtggcgcaatctctgctcactgcaagctccgcctcctggcttcacaccattctcctgcctcagcctcctgagtagctgagactacaggcgcccaccacgacgcctggctaatttttttttgttttgtatttttagtagagacgaggtttcactgagttagccaggatggtcttgatctcttgacctcgtgatccacctgccttggcctcccaaagtgctggaattacaggtgtgagccactgcacccagctattttttctatatttttatgtagttcattgagggtaataattttatcctacaacaaacatgtaagttattgaagaatattggagttttatgataatgctgtcataaatataaaaggtagggtaagagggatccaaatagagctcacttatattgtcactgataggcagtcacgctgtgctgatagaatgtggcctgacacttgatggagtgcagcatatgtatacttgggcaatttgagcagatatatacggtcccgagtttaaagaagagaacaaacaccagtgcacagctatagtattcctaatataggatgcattttaaagaatttcacattctacaaatggagagagatggcaggagaagccttattttaagtcctgcactaaggcaggttaacctcatgggtgtaattacctggacctttttgtaaggacaaaatatttaatcattaaaaggccctctgtagggtttgaaatatctatattttatatatgaatgcttcttttattaatatttatggtaagatattttatactgctgataaacggacattaatgatatatagcctattgtttgaaaaaagcattttggattatagcccaaaactggaaataaccaacagataaataaatggtggtatattcatacaataaaatactactcagataaaaaagatgaacttaatctcataaacattatgggcaacatagtgagaacccatctcttttaaaaaaaaaaaaaaaagaaaaggtgggtgtggtgatgcgtgtcatagtcccagctactcgggaggctgagctaggaggattgcttgagcccgggagtttgaggttgtagtgagctatgatcatgccactggactctagccaggagcctgggcaacagagcaagaccttgtctctaaacaaggcaaaacaaaaacaaaaaaacaaaaatcaattgcatttttatatattagcagtgaacacatggaaatacatgcaataccatttataacagttcaatcaaaagaaatacttgagcatatatctaacaaaacgtatataggacttacttgtatactgaaaactgcaaaatgctgatgaaagaaatcaaagaccaaaatagtgagagatactgtgttcatgattggaagactcaacatagtaaagatgtcagttctcctcaaattaatctacaagtttaatgcaatttttatcaaaagcccaggaagattttttgtagatataggcaagattattatcaattgtgtgtagaaatacaaggaaactagaatagctaaactgaataaaaaaattggaggaatcactctacctgatttcaagacttattgtatagctccagtaatcaagattgtgtaatattggtagaaggatagaccaaagatcaatgaaacagaatagaaaagcaggaataacagaatagagacctatacagatatcctcagtaaatttttaaattgagatataacttacatacctgtaaaattcagtggttttttattatattcacaaagttgtataacattcaccatcatttaattccagaacatgatcatcacttaaaaaataaatgctggcctggtgcggtggctcacgcctgtaatcccagcactttgggaggcctagtgggtggatcacctgaggtcaggcattcgaaaccagcctgaccaacatggtgaaaccccgtctctactaaatatacaaaaaaaaaaaaaaaaaaaaaaaaaaattagccgggtgtggtggtacatgccagtaatcccagctacttgggagggtgaggcagagaatcccttgaacctgtgcagtggaggttgcagtgagccaagatcgcgccattgcactccagcctgggaaacaagagcaaaactctgtctcaaataaataaataaaataaaaataaaataaaataaaataaaatgctgtattcattggccattgcccaactgatttttgataaagatgcagaagcaattcagtgcaggaaggatagccttttaaataaatggtgctggagcaactggacagctataagacaaaaaaaaaaaaaggaaaaaaggaaaaatctgacctaaacttcacaccttataaaaaaattaactgagagtggatcatggacttaaatgtaaaacataaaactaaaaaaaattttagaaaataacaggagaaaatgtttaggatatagagctaggcaaagagttctgagacttgacaccaaaagtatgatctagaaaaggaaaaattggtaagttggacttcataagaactaaaacattttggtctgctaaagaccatgttaaaaggctgaaaaggcaaactacagactgggagaaaatatttttgaaccacatatccaataaagactactgtctagaatatataaataactccaaactcagtattaaaaaaccccaagtaatccaattagaaaacagcaaaagatgttaaggaacatttcactgaagaggatatacagatggcatgtaaccccatgaagagatgttcaacatcattagccgttagggaactgcaaattaaaaccacagtgagatatctcaaaatagagtttaatttttaaaaagcctgggtgcactggcacacacctgtaatcctagtactttgcgaggttgaggtgggaggatcacctgagcctggaaagtcgaggctgcagtgagctgtagtcctgccactgcacaccagcctgggcaacgggaatgagactgtgtcttaaaacaaattgttttaaaggaaaaaataatatcattaaattcagtaaatgcaggaaaaaaggctaaagcagaaaaaaaccacatgtgatctcaataactgtatataacttccagtaacattttgttgtattttatacatttttttgccctctgcatttttatattatatagttaactgaatatgcagttgtgtcttgcttttttcacaatactcaatatcatgagtatttttatcacttaaaattatccatgaatatagattttaaatggctcataatctttgttgtatggatgtacagtaatttatttaaccattcctttcatatgtttaaagtagttccattttgttgctattgcaaataatgctgtgagaaacatttttgtatgtaaacttctgtcaggatttctgattccttccttacaatacattcttagaggtagaattactgtgtcacgacgtgggcatcttagaggcctttgttaactatacattgccaaaatactttgcagaaatatagtttcgatttatgccccttttatattcttacatttctcctttctctaggaaaataaatgttcatgttactcaccttcactcaaggtttccaaacactttttcttggctctcctcctacaactctgttctcagctttccaaaattgtttctctttactccttagatatctgggtttccttaggttctgtgctctccctcttctctctatgtatattcttctttgagctaatcagaaccagccccttgccttcaactacagtttacatcataatgactcctaaatcccatatctctgctgagttttgggaaccagttctaacaccatactagatatttttaccttatgctacatagccatcacaaatgtaactcccttatccaaaactgaactcattatccaaccacactaacttcatctccactgatggcagtatgacccatccagtggtagaagccagaagtttgggagttagcctagatttctccttgaattttgtgtaccactggtcaatcattacattttaagattctgcttccaaaatagctctctaatttgttacctcccctttccactgccttaatttaggccctcatattttttgtactgctgcattggtgtcttaactgatacgcccatttctgacctagttccatccctcagtttcatccttcacattaaaaccattttgtcttttaatttttaattttatttttgagacagggtctggctctgttgctcaggctagagtgcagtggtgcaatcttggctcactgcagcctctgcctcctgggttcaattcatccttccacctcagcctcctaagtagctgggactataggtgcttgccaccatgcccagctaattttttgtagatccagggtttcaccatgttgcccaggctagtctcaaactcctgagctcaagtgatccacctgcatctgccttccaaagtgctgggataggctgggcacagtgggtcacacctgtaatcccagcactttgggagaccgaggttggcggatcacttgaggtcaagagttcgagaccagcctggccagcatggtgaaaccttgtctccactaaaaataccaaaattagccgggcgtagtggcgggtgcctgtaatttcagctactcgggaggctgaggcgggaaaatcacttgaacccaggaggtggaagttgcagagagccgagatcacaccactgtgacaaagcaagattcaatctcaaaaacaaaatatacaaaatgctgggattacaggtatgagccaccatgcctggcccagtttgtcattttaatgcatgcatgtcagcatgtttctcaccgtcactgtcttctgtctcctgtaaaataaagcctgttctctgtagcatggcacccatgagcctggtcttgatttccttcctccaggctactttcatgatttatccctggccatgcctgatatggctcccagtcatgctgagctagtttcctcaacatattagaattgtttttcaggcctttatgcttttgctcatgttttttttttccttgacatgcttctttcttctatccatttgccagatttctttcacatcctaagattcaggtaacatcataacctcctatggaaagcaagccctctataggaattgttaagggcttccttgtctgtgttcccactgtgccatgtacctacttctttctgccacctcctacattggtgtacttttgttgttgttgttaagctgtccctattatactagattgtaacacatgctttctaccgcctagagcaggaactgtgtactcttaattgtttcctgagggcttgagattagcatctggcatgtagtaggtgtttaataaatatttcttgagtagatgaagatatgagtgaatgaatgaagggtttcatgctgaaaaatgaaaaaagggtttaactttaagaaaaaagtcacagattttggagtcataggaattgagtttgagtcctaccgtcatttcttagtgttgatataattttaagcaggttgtttccctcctctgatctttagttcttttgcaaaagggaggtggtagtagtagtagtaatactattaacagtagtagtagtaataataaaagtgcttttaaaataaatattctgcaaattttagttaatattgttaacagtaataaaaagcatcttctatatgtaggctgcacatgcataatgcattgtcttgaacgaagtgagaggagaattacttaaaactttgggtagacgtactcatcaattacaagatcaatttacttggttttgctataatttggttgccattgttgacccattgctttattgtcccattgtctcatcacttgctcagacgctgaagatgggtcagggggagtcagttttagaaaacagccttccctgggccgggcacagtggctcacgtctgtaatcccagcacttttggaggctgaggcaggtggatcacctgaggtcaggagttcaggaccagcctggccaacatggtgaaaccccatctctactaaaaaaaaatacaaaagttagctgggcatggtggcgggcgcgtgtaatcccagctactcgggaggctgagacaggaggattgcttgaacctggaaggtggaggtggcagtgagccgagattgcaccattgcactccatccagcctgggcgacaagagtgaaattccatctcaaacaaacaaacaaacaaacaaacagatataaaaaaaagaaaaaaaaagaaaacagccttccctgaaagttgtttgtgatgcttatggtctaggatgtgaaatttacaggatgatgaaacatgcagatattaatagtgttccatattatttttgaatgtggtttgacttttctaacgatcagcagtgacaaacttgtgtactaccagtcaaccctgttttccatgttttctctacagagatgtatagttagagcagagatgactaatgtgttttcaagaaatgctactataacctttaagtctgatgggtagattgagcatttaaagctgttgctttttcatcgcatctggatgactgtatgttcctaccaaatgaatcactttatgaatatgcatgagcttataaacacaactttttagaaaaaattcttgtgttctgaaacaaaattacgttggtagtattttccaagttttccgtaagaagtagctttgcattagccctagaaattccttgaataatatgtttttacccccttacttgtattacatttaatgacatctctggctttattttctccattcttttttccatggagtttcttaatttcactgtttttgccttgccctttagacgggtgaaacaatgatgactcattttagattgatgaaagggacagcttagcagctggagagctggtagacactagagcactaaattgccagcaccagccttctcttcattgtccacgtaaggcttgtggcagaggtatgcccattcagtcatttattaatatgtaatttgtaggttagatgacttcatcaaattatatttacatctgacctggaggttcaaccatgttttgctttgggacatttttaattgttaaaaatcatagttgggttctgatcaatatgtacatgctgaagttcttatttagccacattatgggcttttttggttttcttcagcatgtcaatagtacacagcagctcagaatggtcaaaattgtttcattagtgccttaacaaccattcatgatatatcatattgtagaatgcaagtatagtcacgcactgcttagcgatggggatacattctgagaaatgcatcattaggtgattgtttccttgtgggaacatcataagagtgtacttacacagacctagatggtatagcctactacccacctagggctatgtggtatggtctgttgctcctaggctacaaacctatacagcattttcctaactcaatattgtaggcagttgtgacccaacggttaagtatttgtgtatctaaacacagctaaacaggaaaggtgcagtataaatacagcgttatcatcttacaggacctctgttggtatatggtgcacgactgtatatcctttatctacatttcccccttttggcttggatagaccatcaattccttgggtttacatttatttcatgtaatcttaaaggattttgttttatgcatggcaccattttttttcaatacaaatggttagtataaaacccaaatttgagaatttgataacaatggcttagtattgaacacaagtgttacataaagttgtggaaaaagccttagagaggtagtcaggggatttgagttccaggtctgactgtgcacttgactcaccacgtcatcttggttaataatcacctaacaataaaaataataaccttaatttatataatgctctgcagtctgcagagcacttttaaagaaagtataggctgggtgtggtggatcacatctgtaatcccagcattttgggaggctgagacaggtggatcacttgagtgattaggagttcaagaccagcctggacaacatggtgaaactctgtttctaccaaaaacacaaaaaagtagctgggtgtggtgaaacatgcctgtggtctcagctactccagaggcttgagcctgggaggcagaagttgcagtgagctgagattgtgccattgcactctagcctgggtgacagaacgagatcttgtctcaaaaaaaaaaaattgtattgggcatagatatgattattcacattttgtgatgaggaaactaaaattcaaagactttaagagatttgctcaaggtcacataccggtaagggctagaactagcattgatttttatcactttcctttcagtcataccatgctgtctctcattttacttttatgggtatcagttatgaaataagggggttggaccggatcagtgatttttttcaagctacatttacagagagtcttaggattcttttgagtggcctccaggtttgcttgtggaatgaagattgaaatatagggaaaggtgcttagctttgcaccagagtatccacactgagtgaggtagtagttgctcattgacagttgagaaactactgcatgttattaccgatggatgagtttgtgtccctttagtatgactggacaaaaagaaagtggaaagacatctgatataaacttttgaggttttgtttttgttttttaaagaatggggtagaattccatagctacttaaagcttgcaaactactgcattagatgatttttttttttttaaggtagggtctcactctgtcactcaggctagagtgcagtggcgctgatctcagctctctgcaacctccgcttcctgggttcaagtgatcctcccacctcagcctgctaagtagctgggactacaggcacatgccaccacgcctgggtaatttttgtatattttggtagagttggggttttgccatgttgcccaggctggtcttgaactcctgagctcaagcaaacaaactgccttggcctcccgaagtgctgggattacaggtgtgagctaccatgcccagccagatggtttttaaggaatttttcagcctgtgagtttgtaaaatattgcaaccttaactttggtggtgttacctgatgaatccctgatgactttacagctgttgcaggcttacatcagtttagagttatggggcattattgaagccctgtttatcttccaagatagtctttattcttctttgctaaggtggctatttttagtaatctttagggaaaagaggcacaatggcagaaatgagcatgtgttattattagtatatttatgcagccaatattggtaatgctttttttttttttttttaaagactgtgtaggagtgaaaggggagttttcctttccgcctttgaggttagctgaaaatcaactgacaaaagtcagattaataggagaaaaggcataaacatttttattaacatgtatggaggaaaatcacagagagattgcccacaacccagtggggtacagatgcttatgtacccttgtttttagaggaagggagatggggaggtatggatgattttacagggctagtaaatgatttttaaagttattcagtgggcttggagaatatacagtggtctgggacaaagttttttgggcctacagagcagatagtggtttgtgacaaaagtctgtccaggcccgggtgtggtggctcatgcctgtaattccagcactttgggaggctaacgcaggtgaatcacttgaggccaggagttcaagaccagcctggccaacatagcaagaccccgtctctactaaaaatacaaaaaattagttatgccacggtggcgcacatctgtaatcccagctacttgagaggctgaagtgggagaatcacttgaaccctagaggcggaggttgcagtgaggtgagattgcgccactgcactccagcctgggtgacacagagagaccctgtgtcaaaaaaaagataaaagttactcccaagcactggcatagtgcagtgtgcaatatatatatatatatatatatatttttttttttttgtttgtttgtttgtttgtttgtttgtttttaagaatattagctgggcatagtggcacatgactatagtcccatctaccagggaggttgagactagaggatcacttgagcccagtaggtcaagggtgcagtgagctgtgattgtgattccagcttgagcgacagagtgagtccctgtctaaaaaaaaaaaaaaaaatcatcaggtgtattgacatacttcagtctctcttcctgcaatattagttcagttaatgaaaactcggggaagggacagagataactattttcttctttggcaggtccagatttaggcagataagggaacttcagagaacaacttctccctgtgctttgggggtggtgaggggatggtcagagaggccttgaggattgtacagttcagcatgtcaaagtgccatattttgaggtatcggtttctgggcctcaacaactgctaataagaatgattgactttggagttgccttggagttatttcaaaaagtgaaaatgttattgtttagcccacactagttatcttagttgtcatttgtgttttctacaatctgccaatggttaaacctggcatttctatcaagaaggaactctttttgcttccagagtaaaggtatttttattatattaacccttgaaatagatccagttatgtattcactttgcgtttgtttctgaacaaaataaacctgtgtggtaagatggaagtgggtttttcacttacaatattagttacttacatttgtaccttttttttttttttaacttcttcacatttcctcccttgccctccacaatctgataagcatctcattgatgactatgagagactaatttaggccgtgtggttataaatgagatttcaattcatttcttcttctcttaacccgtctcagaggagatatcacagggtgactttctatgttgcgttttgacacaaggacagtttgtttttgctttggctgatggatggggcagctctagttgatgaatgtggtttatatgctcacaggcagatgaaagtgtccactctgccctgagaccctctcctttctgcttagtggtgttatgaaagccccatgggtatttgatttttcaagaattaatcagtacacagaagttgaaatgtagaccaaaggaaagaatatgttttttcagttaggctttttgtctttttttaattatatggggtttaccctttgtgtttcccaactcaggggtttcactattaaataattgtctttgactcttaaactttttaggtaaaatttatataccaggaaatgcatagatattaaatatacagtttaatgagatttgatgaattattataaccaccaccttaatcaatagagaaaatctctatatcccagatagttcccttgtgcctctttccagtcaatctctagacacatttacttgtataataaaaagattttgacatacccaactacaaaatgatcagatctttgtttctgtagcaatgggtagaataaaataaagtaggatttacttaaaactaatattttctttgtaggcaggcctgttgttacaggtagaaggtgctcaaaagctggtttcttaactaatttatggattatttttattttttatttgttattttgttatttttaggtttttttttttttttttttttttttttttttttgtagagacagaggctcactgtgctatccagggtggtctcaaacacgttggctgaaatgatcttcctgcctcggcctcccaaagtgttgggtgtgagccactgtgcccagatttattttattttattctgtttttttagagatgacgtcttgttacgttgcccagacaggactcgagttcctaggggattctcctgcttcagcctcctgagtagctgggactataggtgcacaccatggtgcctagcttaattaatggagtttttgataatggttgacaaagatagtggtaagcaaagcagcccttatatagactttacatcttaaaacataatcccctatgtgtgaaattgagaacagctttctagaataataaacagagatctgtatgctaactaaaaggcagagagaatattggctcagccaggccctcacttttttgttcctccctatctgtaaaacatcatttacctcatcagcgtgctacggacatgggttaatgtttggaaaattctgtggaaagagtggggttctgacaatgtgctctgaccaaggcagtttagcaaatttgtactaagtggctgacctttgataagcaccactccttccccacctgacctgtgattccatttttcttttgtgcaaatagttctgaaggtttaatgtttattttttactacgatgcagtagactttcttctctcgtgtagaaactgctcgaatgactgtggatgactcctagaatataggaataacagaattggtttctcctgtactctcaacacaaaatacttctgtgaccaaatgtgtgggagtgtgtccccacacaccaagcagtcaaccagttctgcagcagctgccagctggtgtcctctaatgcagttcagttcagttcagttctgacactgtctacctggagatagcgtcagatctcacagattgagggctcagtcccacaagtctgtccccagtcttcagtgccagtcacaggctccaggtggttttacctgtgcttctgacctgctggctataaactggtttcccaatatccccttattgggttccatgaaattgttagagtggctcacagaactcaggaaacatactgaccagttcattagaaaggatgttttaaaggacacaagtgaacagccagatgaagagatacccagggcaaagcctggaagagtactgaacgcaggagcttccatcccggtagagctggggtgcctcaccctcccagcaagtggatgtgttcctcttcactctcctggatgcccccttttaggtttttatggaggcttcattaggtaagcatgattgattaagtcattggccattggttatcagtgcaaccttcagcccctctcctttccctggaggttgagggtggggttttgagttctaactgtatgagcacagggttgattcccctggcaattggccaccagtcctgtggttatctagggactttgcaaaaatcatctcattaacataagctcaggtgtggttgaaaggggcttgttataaatagcaaaagactgtcttttgcttttatcactctggagctgttcaggaaccagtggcaagaggccgaatacagtattttaaccaaagtcacttaggaaattacaagggttatataggagctttaagccaggaaccatggagatatatgtatgtgtatatatatatgcacatatacacatacaaatatcaccgcgacccatgatgctcttctcaagggcctgtgccttctgataaacggctgagttggctgttacacttactttttcgagcaaatgaatgtgtagtttcatctggctcattcgtcaaaccccgggtttggaaggttgtatgtttttatttagctagtagcagttgatgtggttgaggtggggcttttctttggggaaggtacagctttgaatggctgttatctttcaagtacaaatagtgtagctccttatggctcaatagtatcaataaactgttttatttgctttccttttctcttcctttttttctttttttttaaacggagtctctctctgttgaccaatctgaagtacagtggtgtatctaaactcactgaaacctccgcctcctggattcacggtgaaatcccgtctgtactaaaaaatacaaaaattagccgggcgtggtggcacgcgcctgtagtcccagctactcaggaggctgaggcaggagaatcacgtgaacccgggaggcagaggttgcagtgagtcaagatcacgccactgcatcccagcctgggaaacagcgagactctgtctcaaaaaaaaaaaagaaggggttgactgccaagtttaaatattggcaggagatgaggagatttcagtttttatggagctttgttaatgagccgtgactgtttattacaagacttttacttttaaaatttacttagtaattatttactcataaaacagctacttactgtaaccagtaggtcagttctactcttgaggcttcacatttcttcatttgtaaaattagtacttgtattggtgtccattccctttctgaaattctgtgatatatacatttcctttaaaatgttacaattgaaaaaaataaagttacaataaagaccgtgtgcggtggctcaccctgtaatcctggcactttgggaggctgaggtgggtggattgcctgagctcaggagttcgagaccagcctgggcaacacggtgaaaccttgtctccactaaaatatgaaaaattagccaggtgtggcggtgtgcacctgtagtcccagctacttgggaggctgaggcaggagaattgctagaacccgggaggtggaggttgcagtgagctgagatcatgccactgcactccagcctgggccacagagtaagactctgtctctaagggaaaaaaaaaagttacaataaaagccaggtgcagtggctcaccctgtaatcccagcactttgggaggccaaggcgggtggatcacctaaggtcaggagttcaagaccagcctggccagcatggtgaaaccccttctctactaaaaatacaaaaattagccgggcatggtggcaggcgcctgtaattccagctactcaggaggctgaggcaggagaatcacttgaacacaggaggtggaggtttcagtgagttgagatgcactactgtactccagactgggtgacggagtgaaactgtttcaaaaaaaaaaaataaataaaataaaataaaaacaatgatacaataattcagtcttgtttagagttgccattttctgagtgttctggccatagcatttcttcttcttgcctccttcccagcaacatttgcccacttgctgtggactgcagttaattaggctggtttggagctctttccttcctgttccatttgtgttacacctaaagcatctcatgaagatgatttagattagttcctgccatcaaagataatccagtttaggatgaagtcaacagtattttaagggtggagttctcttttggaactgtcatttggtcagaattagtgaatgctgttgtagagctgacccctgcacaacacaggtttgagctgcgttttttctttttaaaacaatccacttatatgtggatttgttttcatcccaatgctgatcaaaacagtggtatctgcaggatgtgaaacctgtctgtacagagggccaactttttgtatatgcaggttcctcgggggactgcaggacttgagtgtgtgtgtaatttggtgtactcaggggtccttcctggaaccagtcccccagtataccgagggacaactgtgttgagatatcagctgcgggtttccccccaagctgttactcaattttcacattatctggggtttcctctgttctcatattacccccgaagattttataccaatttagggacatcgtgttttccaaatcctaaatgaaaagcaggatatgaagtgttcgtattttcatgttctatggtatttcctctcatgctcgatttatttatatctaaaatcatgtcatgtaatagtatattaataatgctatacatttggtactttgccattcataaagtgtttttacaaatattgtttaatttgaacctcatgataagctatctagacaggtattttctcagacagatgaggaaactgagatttatagagattaatttgttcaattccaagtagctaattgaaatccatacgacctttctcatttataggatttgtagatcctacctcctttaggtgcaaaggagttgtataaccagttttttttctactagaatgatgacctaatcaggagtaaatgacttttacttcatgtgtgacttcttcatactcacaggtactttgattctttcaatgtgtgttacaccaatttgatagtatcttgccttaaaaaaacatttgttttattgaatgtttactatgtactaggcctgtgcttagcactttcaaaaacctttttgttttgaaagaaaagaggtatactgaaaagtgtataataaaatacacagcttaatgagctgttataaatactcctatatacaacacacagatcaagaaatagaacatttttagcatgcctaggagccagctttttgtgtgctgtgtccaatcaacatgctaactttttgatattcacttctttttcttcttcttatttattattatttttttagagacagaatcttgctctgtcaccctggagtgcagtggcatgattatggcttactgcagccttggcctcctggcctgaagtgattctcccacctcagccttccaagtagctgggactataggcacgtgccattgcactcagctaattctttgcttttctttattgatttacttcctaaacaagcatctttaaacaatatagtttgcctagtttttagcgttatataattggcattacacaatatgtattctgttgtatcagcttcttacatcctgttttatatttttctctattatgtgtagcagtagtttgttctttttcattgctgtatagtattccactgcatgaatatgccactatttcttcattctattgttggtggacatttgtgggtgttttcctgtttggggatactatgaatttgcagctgagaacatttcctcaccctcccagctttattgacgtacagttaacaaaatttgtgtatattcaaggtatacgccatgatgtcttgatagatatatacattatgcagtgattaccataacctaactaattaacataaagaacattattttattttttaaattaaaacaattttttcggagacagggtcttgctgttttgctcaggctggtcttgaactcctggtgtcagattatcctgctgcctcagcctcccaattagctgggattacagtcatgaaccactgtgcttagctcaagaactttcttatgtgtttattctggcacatctcagcacatatttgtgttggggatatacccaaaaatagataggtcatgggattccttccttccttccttccttccttccttccttccttccttccttccttccctccctccctctctccctccctctccttccctccctccctccctccctccttccttccttcctttttttttcgcagagtctctctctgtcgcccaggctagagtgcagtggcgtgatcgcggctcactgcaagggccgcctcctgggttcgagcgattctcctgcctcagcctcctgagtagctgggattacaggcatacaccattacactaggctaatttttgtattttttgtaaagacggggtttcattacattggccaggcttgccttgaactcctggcctcaagtgatctatctgccttggcctcccaaagtgttgggattacagatgtgaaccatgatgcctagccaggatttctttatcttcagtttattagctactgcccaacttttttcttttttaaaagccagtcaaatttagcaatggggggttgtataccaactttagtgacactaaagttaataagttctgataacccactaccataggaccagcctgtcaaacatttttctaaagtggttgtaggctgggcacggtggctcacgcttgtaatcccagcactttgggaggctgaggtgggcggatcacctgaggtcaggagttcgagaccagcctggccaacatggtgaaaccccgtttctactaaaagtacaaaattagctgggcatggtggcacatgcctgtaattagtttgggaggctgaggcaggagaatcacttgaacccaggaggcggaggttgcagtgagctgagattgtgccattgtactccagcctgggcaataagagtgaaacaacgtctcaaaaaaaaaaaaattagctggacatggggttgtatgtctgtaatcccagctactccagaggctgaggcaggagaattgcttgaacccaggaggtggaggttgcagtgagccaagatcgtgccactgtactccagcctgggtgacagagcgagactctgtctccaaaaataaaaaataaaaataaataaataaagtggttatagcagtttaaggtactcaccagcagtataggtgagttcccatttcttcagatcttctctaacacttgctgttgtcaacttctaaatttaaaattttaaaatttaaataattaaattaaaaattcctaatgtagtaggaatatagtggtatctcattgtggttttagtttgcatttctctggttaacaataggagcaccttttcatgagtttattagctgtgatattcaagtcttttgcacatttttcttttgggttatttgtcttttattgacttgtggtagttcttaaaaaaattttttttaaattaaaaacttttgtgtattttggagacagggccttgctcttttgcccaggctggagtgcagtggcgtgatcacagcttgctacagcctcaacttcctgggctcaagtgatcctcctgcctcagcctcctgagtagctgggactaaaggtgcacactatcgtgatcggctaattttcatatttttagtagaaacagggtcttgccatgttgcccaggctggtctcaaactcctaggctcaagccattcacctgcctcggcctcctaaagtgagagattccaggtgtgaactacccacttaaaaatcgttttaatttaaaaaataaaatgaaaagaatgttcttcatgttaattggttaggttatggtaatcattgcataatgtatacatctatcaaaacatcatggtgtatgccttgaatatatacaaatcttatttgttaataaattgttgaggaaatacctggccggtagttccctctatattttggagatgagccccccttttttttattgtacttgttacagatatcttttttcccctctgtagcttgtcttttccctgttagttgtgtcttttgataaataaattcttaattttaatgttgtaatgaaatttaatctttttttctgtatgattagtgctttctgtgagttatgacataaagtcataaagataatctctaatattatcttctaaaagttttattgctttgcctttcacatttagatttcttaagggctaaaattattagataactaggtattagttgattatatgtaattagtaaacaaatatttattgtgacttcagctatgtagaagagtcagtggtagatactaagagatgtaagacttggttcctgccctaaaataatcaacattctgtttgtgtaagtaaggcccttggcatcagcacgatgtaatagaaagaacactgactggactgggcctggtggctgatgcctgtaatcccagcattttgggaggctgaggtgggaggatcacttgagcccaggaggttgaggctgcagtgagccgtgagtacaacactgcactccagactgggtgacagagcaagaccatcctgtctcaaaaaaaaaaaaaaaaaaaaaagaaaagaaaaaaagaaataaaacacacacacacacacacacacacacacacacacaccctccccccccccccctcagaatctggagacttatatccatgtccttttggggacctggctgtgacaccacctttgtgattttagaaatctcctttccttctctgggtctcagttttatcagtaaaataagggattggcttaagtatgtagttcttgattttggttcctcagattgataaggggtctgagtagatagcactggaagcattttttttttaaagctaaaagtatacatttttagccatggtgatgccacacaggttaaccaaaaaataaaatatctttgcttttaactggagtcgtgtgtcctttctgtgtgagaactgagtttaacagctttgatttacaataaaagttttaacttagtttttcaaaaaaatacacttcgtttattgataatcccagtttggtatacaaagtttttttatgtttttttgaaatggagtttcactcttgacgcccaggctagagtgcagtggcacaggcttggctcactgcaacccctgcctcctgggttcaagtgggtcccagcctatctaggattataggcgtgtggcaccatgccctggtgattttttgtacttttagtggagacgaggtttcaccatgttggccaggctggtctcgagctcctgacctcaggtgatttgcccactttggcctcccaaagtggtgggattacaggcgtgagccactgtgcctgaccttatacaaagttttaaataacatggccttctgactttaacttagaaaccaaagagtggtaggagtagggggaaggtattaaataacagaaactatctttggtgattaaaaagttgggtacctactattctaataacttttaagggctcttctgtaggttagtgtaaaagtaattgtggtttttgccattaaaagtaatggcaaatggcgggcgcttgtagtcccagctactcgggaggctgaggcaggataatggtgtgaacccgggaggcagagcttgcagtgagccgagatcacgccgctgcactccagcctgggcaacagagcgagactctgtctcaaaaaaaaaaaaaaaaaaaagcagtaatggcaaaaaaaaaaaccctaagaatttcaatatattatgagtcagtgaaaatatagtatttgttgttttgtttccctaagtgcccaattgagagatctggacaattactattatagagattgtgaggatggacagagaaccttttgttgactgaggtagtcaaagaaggaaggctaccagggtgagctaggattgagcagtgagaaggattgtttctatgtatggagaaaaatgggaaagagggaattgtggacagagcagtgtaagcaaggatacggaaatagcaaagtacaggtcatttttagggacagaagatgaatcagtttagcattagaagatgatgaaaaagtagtctgaagttaaagtatggaaagccttcttcaaacataaggtcaaatacagctttggaaaagttaacagttacaagtatgatggtgtaatgaagattctagttcttctgtaagccaagcaggggccattggctttaggatgccctctatgctccaatataatggtgctgcctggcatcattgaaaacattaaaaaaacttttctaaaaagtatttgaggactgggcatggtggctcatgcctataatcccaacactttggaaggctgagatgagagaattgcttgagtccgggaattcgagaccagcctgcaacatagggagaccctgcctctacaaagaaataaaaataattagccaggtgtgggggtacatgcgtgtagtcccagctacttgggaggctgggaggatcacttgagcttgggagatgaaggctgcagtgagctgtgatcatgtcattgcactccagtcagtgatagagtgagatcctgtttctgaaaataaaaagtgtttaggggataaccagattgggcttgtattgatagccagaccgccaagcaggaaactttatgtatttattttttaagagttggagtctctttctctctattgcgtaggctggagtgccacagtcgttgggactacaggtactgccaccatgcctaattaaaaaaaattaaaagatggggtcttgctgtgttgtccaggctggtcttgaactcctggtctcaagcagtccttctgcctcagctccccaagctcccaagggagtataggcgtgagtcaccatgcctggccagaaaccttattttgtggtagttgttcagctataccttgcagaattttttatgtgaatcctcagtaaatcccaaacagcttctctcagtactaacacatggctgataaatggtactgaattctttgtaaatctcaccaatctcaacagaatttctggttcggggtaaaaaaaaaaatttccgtttaatttctgtagaaaataaccactcagaatccactctctgttatgtgtaacaatggacagaaattttactgttgttggtacaaaacaatgactcatcccaaatcatctcttggaattaagaatgtaatcgtaatacactcatactcatatgtacgtgctcagacagtccctttctgcctttctttttattaccccttctcactccgctgtggtttagcttgactaatctatttgcagcacatcagcatccttaatgcagaaagtttgcagcttctgtttacagggggaaaaaaaaaggagtgtggagattgcagatttcatctcttttttcttcttttaaaatttataatttccttttttcaggaggagggtgattattttcgtttttgtttgagacagggtctcacgctgtcccccaggctgtagtgcagtggcgcaatcttggctcactgcaacctctgcctcccatgctcaagcgatcctcccacgtcagcctcctgagtagctgggactacaggcatgcgccatcacacccagctgatttttgtagcttttggagagacaggatctgtccatgttggccaggctggtctcgaacttcagagctccagtgacccagccacctcggccttccaaagtgctgggattacaggtatgagccaccgtgcctggcctacattttgtctctgacatttctcaatctaaagtatatgtatatgtacatttatacatatgttatttacatatatttttttctttaaaaaattattttttggtggactgagtcgctttaattaagactcagtcattttaatgaagtggggttatttactttgaccttcctccccaggaaatagcacttaaatacttaaaggaaaaattaaagaggaccaaggccatggtggcagggactgggagcatggtggccatacagcctgataagccagcagagaagagtcccacagtaaactgacacaaccctggtgatgtaggtggtttaggcacagaaaaaaggaaagtcagatttgagtaccctcagcaggccttgtactggtcacccccaatacccatgagaacacagcatcctagtcctccctggcttatcggtgctctccacatgggggatacctgtcacagcttttattccaggactggggaagtcacacttttctgcccaccccacccattgttttgcagagaagaatctctaaaaccttcattactcatgctgaaagtgctataggtatttggaatgggagaatgggaaagagtaaattctgaatgcattggagccttaatttgctgccctttctttccttccctctctcatcttcatgaaggagggcccattgtgaataaggaagaggggaagcctgtctgggagaggctttttgggtactgggcttcccaggaagaagccacttcccaccgtccccttgatgatcatgtgacccttttctccatgcagccagaatcagcttctttggggatgaactggtaatagatgttgtcgttagtgttatttttaaatttttagatatttttttccagatgcatcttcaaaatgtaggctttggaggttgataaggttttgtgggattggtaagtgttaatctagaagttgggcagtaaacaagaatagtaccttatcagcattaaaacaaagcatctgaaagaaatgtttttgaggagtagttgaatatttagttggttaaaaatttagactcagaaaattttcaggaaggtgataaagattcactaatcattaagtagggaatctcttaaaggttttatattgatttgatacattagagaatgctataataatagtgtactttgattggtggcctataaagtaattgtgccttttatggtatttatgaattggttatattttaaacaataaatcttgacttttgcgtcagagtttctctgttttgttttttgtttttttttttgagacctgctttgtcacccaggctggagtgcagcagtgctgtcattgctaactgcagcctcaacctcctgggctcaagtgatactcctgcatcagcttcctgagtagctgagagcacaggtgcgtgccaccattcccagtgcctcactttaggctaagtttttcattttttgtagagacagggtcttgctttgttgcccaggctggtctcgaactcctgggctcaagcaatcttccctccttggcctcccaaagtgctgggattacaggcatgagctatcatgcctggccctgcatcatagatttttttttttttttttttgagacagtgtctcactctgtcgcccaggctggagtgcagtggtacaatctcgctcactgcaacctctgcctcctgggttcaagtgatctcctgcctcagccccccaagtagctgggattacaggcgcacaccactacacctggctgatttttgtacttttagtagagatggggtttcgccatgttggtcaggctggtcttgatctcctgacttcaggtgatccacctgcctcggcctcccaaagtgctggaattagaggtgtgagccaccgcacctggctacatcatagtttcttaaaatcaccaactgttatctatgttttcctattttaattagtctaatttttaataatttatttctgggttagtttctgtacttttggtagaattgcagactcacaacaggcttcaggaaagtaattttaccaaatgcaaggctatttgcaatttagttttctgattcagaagccataactctgtgctggatttgattattcattatttaaccaaacatttttcaaatgccttccttattttctgtcttaactgcgtagaattaagcccatttccaaaaggattttgaggtaattctggagtttgagattaatatttttaaaaagaaaccagagttcattttctgcagagaaagcttttaatcaaatatacatatagtaccctgtgtccttaattgaattgagggtttgacttttctccatgcagaattcgagttgatatttttgtagtttaggagttttgacttttctcttttgcctttatgttaacaaacttgtgagtttgcaaggttataatagaaagagtatatagggtttggagtcaggaagtcctaggttcaaattttagcttaatgagcaagttacttaatttttccaagccacaggttccccagctatgaaatggaataatattacccatctattggggttcttgtggggattaaatcagatgaaagtgcttagcatagcatataaatgttagtttattttcctttggcaattatttaggctttagggcaaaattgcctacttgttttggaatgaacccaaattttatggttaattttaggctttttcttcagttagacttttgatatgtctaactccttcccaattttttttttttttttttttttttttttttgagatggagtctctctctgttgcccaggctgaagtgccatggtgcgatctcagtttactgcagcttctgctacccgggttcaagcgattctcctgcctcagcctcctgagtagctgggattacatcactatgcccagctaatttttgtatttttagtagagatggggtttcaccatgttggccaggctggtctcgaactcctgacctcaggtgatctactcgcctcagcctcccaaagtgttgggattacaggcatgagccagcacacctgggtggcagtgcattttttaatgaggaagattgaacaacttgacagaagggtgagctcatattctgaactcttacagttcatctaatgtcaaatttctagaaaaaaattatctaaatctaaaagttagtatgacactccataacattaattgtgagtccctgagggggcagctataaagataaaatggagtataggatcccccaacacacataacacaaacgcttgtgattgagtgtgcattggcacatgtacacctgtgtgctcacccctcctctcccttccttcacctctatcatgagtacaggtgtgttgctttgaattggtgaggagtgggaaagagagtccttttggtgacaagaaagcaaactggttttatttagttcaccaaaatattgttttgatccttttttgtttgtttgtttgttttgagacagagtcttgctctctcacccaggctggagtgcagtggcgtgatcttcgctcactgcaacctctgcctcccaggttcaagcgattgtctcacatcagcctcccaagtagctgggattacaggtgctcaccacccagcccggataatttttatatttttagtagagacagggtttcactgtgttggccaggctggtctcaatctcctgacgtcaggtgatctacctgcctcggcctcccgaagtgctgagattacaggcgtgagccactgtgcccagccgatccttttattttcaatataaaactgttgctgtaagcacgagcatgtccaaagggaacaccatgggatagtagtgaattgagggtgataatccagttttgaggcttaagtctgcaattcctggattaatttggctgctctgttattggtggctttgctaggatcattttcaaatcactttattttcctttatggtaagtgtattaatagtatttaataacaagattaatctgggccaagggctttcctgtgaaagttactattttcattatgggagaaaaatagagcagcatggccagtgtgcatttttgttatcccatccttaggtaagtgagtttagacagcctgagctaaatacctagatttgcaaaaacacctcctacccccatgctttccttttaccatttaaaattgtttgtgaagatcttttttttctttctttctttcttttttttttaaacacagagatagggtctcactgtgttgtttgtttgggtttgcaactcctaggctaaagggttcctcccgcctctgcctcccaaagtgctgggaatacaggtgtgagccgcagtgtgcagcagcttaagtttctgatctccctcaccacctcgcactttcactcctcataccccttccttgtttaatagaaggatcctttgttttgagtagtctccaagtggagtattttggagagactttgaataaatcctggcccaagcctgatcacaacacttggacattgagcttacctgcattctgctgttgggtagatatggaatctctgcccctcttgatcaaagctacatagcccataaggaaacatccattgagcagccttctttcctttcacttaatcaatttcaatgtattgtggtagaggtctttgtgatattccattttagactatatgatctttaggaatgcttaaccctgctgtgccaaagaccaggggaaggctgtgtattcaaactcatttgttctctgcttttttctttttaattattagtagttaactctaaatgaaagtatagaactgtttagtttgagcaaggaacactatttgttggcctctgctttctgttccccttccttcccttccctccctttactgtggcatcatgattcttccttcctgtattcttggtcattctcccagcacctcactttagccctacagtggagattcttctgttcactaataactgcagtggtgtcagtttcagtagatcagccttcgtcttcctttgcttgaatggagtgtttaacatgctggatatcctgcctctttctgctgaagcatctttcctggggtcattttgacttgctgcttatataactattatgtcctttgggtttgtgatactttatattatcaaaagcagcaaaagatagtaatagaagtaagatttttattactctcattctatgaatcagatgttattatcccattttagagataagtaaattaagagagtggttatacctgaagttccagagttattaaatgacatgactggattcaaacccaagagagcctgacttcaaaatctgtgcattgatctctactgagtctgaaggttactgacccagtgaaccagtcactgttctgtttctaagaaacgtttaggttctggctcttgcagggatctttatagtcctgtatttgcaaaaacacctcccacctccatgctttccttttaccatttaaaaatgtttgtgaagatcttttttatctttttttttttttttttttttttttctgagacggggtctcgctctgtcaccaggctagagtgcagtggtgcgatctcggctcactgcagccttcacctcctgggttggccaggctggtctcgaactcctgacctcaggtgatctgcccgcctcagcctcccaaagtgctgggattacaggtgtgagccaccatgcccagcccacattttgtttttatattctgagtattatatagtaaaaaaggagaagagttcattgatacagtcttttaaaaactgatctcaatgatatagtaggaaaaacactggattaggagataggggttttaagttctaatcctgcctggctgtgcccttaactagctgtatgagactaggcaacatttaccatttccttcccaattaaattgaggtagccgtactagatttatctaacatgcctttcattgctcacatcatgcgacattaagctttaattagaaagctttggttttgggacctctttgttttcccataggctttaaccttgtttcctttcttattgcccagcaggaattggactagagttggccaaaggtgggatgaggagaagaggtaggaatcttacaagagttggttggagtaaagttattgacaggtgggaagaagtattcctgtgactctgtggttgttcccttgtaagatttgaaggaaagtaatgagtcaggtcttaataatagtgcctctatgttatttcctccaccccattatcttttgtcagaattgattagcaaaatgcacttacccaagtattttcagggtccctgtttggatagtctaaataacgttgttctttttttttgttttggagacagggtctcactttgtcacccaggctggagtgcagtggcacaatcttggcttactgcagcctcgaccttctgggctcaagcaatcctcccacctcatcctcctgagtagctgggaccacaggtgtgcaccatcacgcctggctaattttttgtattttttgtagagatggggtttcaccatgttgcccaggctggtctcaaactcctgggctcaagcgatctgcccacctcggcctcgcaacatgctgggattacaggtgtgagccactgctccctgcctttagttacctttatcaacctatggtcctaaaggtagattcattgaacttgcctgtcagtgcttaaggatcagtcctgtcttagttcagacaagttaaattcagggttgcattctgtcaactttgtttctaatcagtggatgatcagatgatatttggagaggatttttaatatatgtgaatcttatggtggcattctgttacttaataaatactttaatttcttagcttttttccccatattctccataatttttgtagatagatgctcagacgaaggcagcagtagcacatggataatcagagttttttgtttgtttgttttaacatttctcgttaaagtataatgttcagcaatggggaccaatctatactcctcatctgtagtctgtcaataaataggttgctccgactttaaattctcagcttgaattgtttcttttttgtgtgtggaatttatgaccctctgtgatgttgaccctacctaaagcaagtagaatagctacaccagcaaaatgaaataccataacaacaacgtatgcttatgtttatatagtgcttactgtgtgcctggcatggcattgaataaatatatatatttaataaatagagttggggtctcgctttgttgcctaccttgtgttgaactcctggcctcaagtgatccttctgcctccgccccgtcaaagtgctaggattacaggcatgagccactgctcccagccagcattgaatatatttttttttttatttcatcctgagaacaaccttatgaggtactttcaggtcatacttttattaccctcattttatactagaaaaattgtgctttaagatgttaagcaaattgcccaaagtgcaaaaccagtgtgttggagcttgaattccaaaccagatctgcctgagtcaagcttttcttttatgttcttatttactaaaggcttcttgaacagaagtatgtgagagttgggcacatgcagcttggtcaattctatgtaaacccggtcagattctgagtagtgtagatctgataaagtcaatgtgaatttcttatcattcgttgcaagagacttaatgtagcaaaaatcagtatcataggaaacgagatgttactgtggtaggcacactgttctctctcagctacctcatttttgttgttattggtggtggctattgctctggcaactacaaaggcagcatttacttgacacggcgtgtatgcttaaggcagaacactgactgcttttcattgctggcaaatccggacttcatcagtactggctacctgtaaggaatgtgagcatgttggattttagaacaggaaaaacacaacttccacctcatttcacagtagagttcacttagggatacagactttttggtgacagtaactgttactttctgcttattaattcagatacttgcataatgctaacctggtagatattgtcagatgacaagccttcctcctacatgttctctataaaagaactgctagtgacaagcattttattatattaaaaattctacttcatactgttttaagttaaaatgtatttattatgaagccaatattgtgaaatgtttttttctttttccagaatgtggtttttttttcttgtaatggactaagatgcaggcttattgtgtagaatgaggagctattgcccagatggaccttagtgaaagtaacttaaataagcaagtagattttgcttctgtttgggaaaatgatctaagacggatgctggtattttgggcaggtggagactaatgttttatctcaatgtttgcaacttaagttcagcctacttaagggctgtcccttaagggtgtccaattgtttggcttccctggccacactggaagaattgtgttgggccacatataaaaatacactaacactaacaatagctgatgagctaaaaaaaaaaaattgcaaaaaagtgtgataatgttttaagaaagtttatgaatttgtgttgggccacattcaaagccgtcctgggacgcatgtagcccacaggctgggttggacaagcttggtctagaagttttctagattttactacaatgttcaaatggcaaactttaaaagtggggaaaggaattttgggtgagataaaaagacaggtttgaaaaagcatacaagttcagggaactgcaaatggtttcttaagaccaaagcgcaatgtcagtgtgaagaagtggcaggcaatgggaaaggataaatcagtggagcccagacaatgaaggagctttgtacttgatgctgaggagtgtggatttgtttctgcagataatggggaacttctgatttttctttttttaggtggacagatagaatcaagtttgcttttgttaattcatgtgacaatgtagaaggtggactgaaggtagggagagtattgtattcattggagactcattaattgttagaagactattgtaatcattcaagcaagaaataatgacctaggccaggtacagtggttcatgcctgtaattttagcactttgggaggccgaggtgggagaatcgtttgaggcctggaggcagggtcttgctctgttgcccgggctggagttcagtggtgtgatcatggctcactgcagcctccaattcctgggcttgtgattctcttgtctcagcctcccaagtagctgggactatagacgtgagccactgtgcccagctcaaattactttattttaaattttttttttttgagatggaatcttgctgtgttgcccaggctggagtgcagtggggcgatctcagctcactgcaacctccacctcctgggttcaagtgattctcctgcctcaacctcccaagtagctgggaatataggtgcacaccgccatgcctggctaatttttgtagttttagtagagatggggtttcaccatatttgtcaggctggtcttgaactcctgacctcaggtgatgcacctgccttggcctcccaaagtgttgggattacaggcgtgagccactgcacctggcctcagattactttttatacattgaaagatgacctagaaattagtcaagacattaatttagatagtcatacagtcaagtgacataaacctcagagaagaggaaggtttccgtgctatcgccccacccactagagtggaagaactttgagggagatagaatagtgatattataatctagttcctatagataaagaatgtttgccaagaaggttaacttctgtagctgagctcctttgctgagaagatgaaggaacactgtttaatggatagatttagtctgtgattctctgtggaggtgattactgtcagttctctttatcctagcagcatttggaaaactgcagctaagcaacccgtcgtcatttcctaatgttactataatctggtgtcaatgactaatgatctcattgggctagttattcccttccagcgatgctggcatcaggaagcacattaatagtctgtaagaaatgcattcattaaaaaccaggtaatcactttggagctggtcctggcagtgtctgaataaattggacaagttagagaaaatcttgaacctgaaagctactttgtctttcagcttggtttgggcaaggtaggaagagatgaatcagttataatttgatgggatctaatgttacttttataagatacatcactttaatatgatgcttcatcattaatgttttagtaatctgacagcattagacagaattgatattccccttattttattatttcttggcttcatgacagaactgtgcattaaaaggcacttaagattttaaaagggatatctaagaaagtggttaaaaaacaaacaaatcccaagtggcttgatctgacttacaaactctaacaatgtgtagctaattgcagatagattttattattcacagtattgtgtcaagtctcctgtgcacatcttctgtattggagcataagtaatggagatgttatcttgcccaacattaggtttgaggaagtcgtttttaagacagaaatagtagaacagtgttattccatactgtactttccccttttatataagcttgctaaaattaaggttgggcaataggcccttgagctaaatgtgacctgatagaaagttttagcaacaatgaaaaaaattataactatctaatatacatatctaatattagatatttaccttacttacatatcatgcacaatcaaacaaatggcaattataactacattcttttttacttgccataatggaaaaactttattaaacaaattatgcccactgttgctctgggatttggggactaggtaggcatgatttcaatggaaaataatttagtaatggtatgtctcaataatgtatcaacaacctggaaagtatatattctttgacttaggattttcatttctaagaatttgtcttatagaaataatagtaggtcaaaacaagaatgtagtcataagagtatttactgcaatgttgtttagaagagggagaaaacaaatgaaaatgggctgggtgcagtggctcacgcctgtaatcccagcactttggaaggctgaggtgggtagaccacttgaggccaggagtttgagaccagcctggtgaaaccccatctctactgaaaaaacaaaaaagaaaagaaaagaaaagaaaacaaaatgccacaaaaaacaaagagatgaaaatgaaaagagatctcacaagacatatgaatatgttgcacttcaaactgatgcaaacaggtgtccatctaaattcaatagtgggcagttagaatttgaaacttagttgtcattgatgattgccctgtgctcagaggaatcacagattaaaaaaattttttttagaaagaattgaagttgagtttcagaaaagtcagacatttaagtttacaaccgtagttggagtgcaaacacatatatgtcttaattacaaaatgtctgttctgttagtacaacttagcataaagaagagatggacctacaagtgaagtatatcaactgataagaaacaaaatgctttaaaactttggattcaaacctatgattccagaactgttctaacattttaaacaatatggtcaaactctaggcaagtttggttcccttgtgtttgtgaaactatatttttcatacatcttctgaagtaaaaactaaacactctcattagttgtttaaatctggaattggatttggaatttgccttgattttatatacctttgttcttgaggctacctgtatttgtcagttttatcttaacttactcaaaatgggtcacttagtaaaaataattgtctaactatacacttttagtttgattaagctttttggattagtttgggattttgactaagtttctatatttgtatgatcaataatttcatacttatagtaaacaaaaatttatatatctgtactcctatagatttatgattctgtggctctaaaaatttcagtgctcttagagttgtggaaagagcagagcactagattaaatgaaacctctgtgtgccaggccctagctgggctttctcgaggcattagagtgataaagttggttgaggaaatggtgaaagccatacctttgtcctgccattttttttctttatgagatcatggttgaagtccctgactctcatgatagtgaaattgagattttaaatatttgtttctctttacatcccaaatccattatagctaagaggaggaatttcagatatttttccaagagcggttgtcaattttttttttttttttttttttaagacggagtcttgttctttcgcccatgctggagtgcaatggcatgatctcagctcactgcagccttcgcctccagggttcaagtgattctcctgcctcagcctcctgagtagctgggactacaggcgtgcgccaccatgcctggctaattttttgtatttttagtagagacggggtttcaccatgttagtcaggctggtttcaaactcctgaccttgtgatctgcctgcctcagcctcccaaagttgtcagtattttacttacttttctttccttgcatattggaatagcttttttttttttttaaattatcatatacactacctgtggaggtaaaaacataaactgttgttttcttggaggctgaggcaggaggatcacttgagcccaacagtttgagaccagcctgggtaacatagcaagaccctgtctttataaaaataaaaagaattactgggtggtgtgcacctgtagtcctagctacttgggaggctgagtcaggaggattgcttgagcccaggaatttaaagctgcaatgagctatgattatggcactgcactgcagtctgggtgacaaagtgagaccccatctctaagaataaaataaaatggaattaacattcactgtcaacaaaggcactcttgtgccgtttttgtccccttcttgactgtcctggtcgtatgagatctgtttttcctctaaattcattgtatactattttctttacattgtacatttggccatctctgggaaaatgttaagaatgttaatgttctcattttagtatactgatatctcacttttcagaatatcaccttcctaatctttttctttagtcattttatccagttgtacttatgtaagctaccataaactttttctgaatcaaagcaaaatataaattaataaatgtttgcttctttaatagtgtatattttattccttttatcaaatttttaagtcagtaagtactgtgatttaagaactttttatcctataatactgaataaagtgttttgatatagaatacggtacatagatgtagatatgcatttagtgccttgcatatttgttgaatgaatgattactacacatatgagctaagtcagctgtttggggtcttctttttgcctgcatctgattggcttgtcaagcagactgactgcccacctgttagacccatatgggctggctgagtatatagctagtgttttgctcagcacacctgcttgtgcgcatggattgatgtctgctcttaaactagttgccaaggagtcaagtgtatggcaaggtgaaggaagactggcagtgaagatatcttaaagaggtaatctaataataatggccagtggttcccctgaatcttgtttgctcaagttgttcacatcagagagatgtaaaattgctttcatttgggtggatttgggaattcttttttgataatgggaaaaaatgagaaggtcctctatgatattgttgtggatggatgtgcatatggtcagagaacatgaacctgttaaattttgagcttgaatacttttcattaacaacttaattgagaatagctagatagcatctattgtttattctttttataacaagtagagaaatagagaaatgtcttttttttttttttttttttttttttttgagagagagtctccctctggcgcccaggctggagtgtagtggcgcgatcttggctcacagcaacctccgcctcccgagttcaagcgattcctatgcctcagcctcttgagtagctgggattacaggtgcccgtcaccacacccagctaattttcatatttctagtagagatggggtttcatgatgttggccaggctggtcttgaattcctggccttaggtgatccacccgccttgggctccccaagtgttgggattacaggcgtgagccaccgtgcccggcctgagaactgtcatatttttaatcctgttgggtctcccccttctcctgtcactgtatttgagcaagtttatataaattattgatatttttctggccacaaaagtgcagctatatttaagataatatttttttattttcaccctcttgacataatcaagccataacatgaaatggagatttattatttattgtttattgaataaaattttgttccttcttctattttttttggagacagaatctcattctgtcacccaggctggagtgcagtggcacaatctcggctcattgcaacctttgtctcccaggttcaagcgattctcatgcctcagcctcccgaatagctgggattataggcacacaccaccacacctggctaatttttgtatttttagtagagacagggttttgccatgttggccaggcaggtctcgaactcctggcctaaaatgatctgcctgccttggcctcccaaagtgctgggattataggcatgaaccactgcacccagccagaattttgttcctttttaataattaattaattaattaattaagatgaagtctcactatgttgtccaggctagccttgaactccttgggctcaaatgattctcccatctcagccttctaagtatttgggactacaggcaggttctaccacacctgacttgttccttattttagatgttgaaaataagcaagtgaaataaaggcttatcaaagtgtacacagcactttgctagatactgtggatgatttttcagggaagatgccattcctcccctgaagaagataattattgtagagttagagctaacagacaaaatagatgatatataaatttattcttaggagccaggttgttgagaggattaagagcaatcactagacgattagaatattggggacttccaaaacatctgaagtgtatctagaatagtagataagatctgcacaggtaggaagtagggtgagccgggtgtggcggctcatacctgtaatcccagcactttgggagggttgaggtgggtggatgccttgagcgcaggagtttgggaccagcctgggcaacatagtgaaaccttgtctctacaaaaatacaaaaattagctgggtgtgatggtgcacacctgtagtcctagctactcgggaggctgaggcgggaggatctcctgagcctgggaggtggaggttgcaatgagccaagatcacgccactgcactccagcctgggtgacagagtgagaccctgtctttttttttttttttttgagacggagtcttgctctgtcgcctaggctggagtgcaatggtgcgatcttggctcactgcaacctccacctcctgggttcaagcgattctcctgcctcagcctcctgagtagctgggattacgggcatgcgccatcatgcccagctaatttttgtatttttgtagagacaaggtttcactatgttgcccaggctggtctcaaactcctgacctcaggtgacatacctacctcagcctcccaagtgctgggattacaggcgtgagccaccatgcccggcctgagactctgtcttaaagaaaaaaagaaaaaaaaaggagtgaaagtagaggtgagaagtgcctggaaaacgggacttttaaactgagcttgctgcagaggtggacacaaaaatttggggctgttttgtttgaggaatgaagaatagcaggacaaaaacagattgttttggggttggtattaataattgtataggtagcgtggggaaaacttttagagagccttaaaagctgaacccgtatgttttagtttggtgtgagtaaacgtagattcctggtgctctgtaacaggagtgtttgtcgcagtttagtccgacagtgatggcttatagtacatatgattgtggtcaagatgaggagattaattagctaatcccaaagggatttcgtgatcatttattgaatccttaccaccaagcactttttgtcatgaatcattatttcatctaaacctggcaactgccctgtgagtttgatattgttataatcctcaccgtaacaagtgagaatgctgatacccagcaagggcaagcacctttcttagggtcacaaaacgaggaaggagtagagcagtcagtgtggctccaggaaccagaatcttaaccactatgctctaaagtgtttttcagagaaaggaagattaacattctttccttcgatgtatttttttccttgctaattccctatctccttacctacaatgtggcttagtgatcttaggacaaaggtttggcttggagacttcaaagaggtttgtccatttcagactcttcaaaaacagttactggttacttacaaataacactttgtaattcaataactgaaaaatcaaaacaactttaaatagattttaaggctggagaagggaggctagctaatttcataaatttgttgaagtttgattttctttaccctagttgtatcataaataggaatggttttttatatttatacttgtttaaatatactgtttatacctgtttaaatgctaagccaacaaaagctctctgaaagaatacatgcacacaaacacatgtctgtttcgtcacggatgtgtaactcactcatggttgctcctcctgatgtctgtgtgccacacagttcggaaaaggcacttgcttggctgtcacgctgtaagttccctttgtcatttgtgacaattggtctctttgctgtacatcttttgggatgaaggattgagctcttgtaaaagcatttcagaggtttttcagctaatgatttttccgctcattctttactgtttggtttcctaggcaacccatcctccccttgcaccctgctgacgtctgttcagcccctcttcctctccactacccctcccattactcaagttgttttttcattgctgctttaggattgcactaaaggaatatacatgttttcctaaatatctgctcctctatactttttagaatatattagaaggatgggaagaaaaaaaatcatttttagaagctaagtaacctgtatttttaggtcagttataacagggtttcatccatataaggctaaatttattctgttgtttctaggttggttttcttttttaaagttaaacaataataaagaaattgttgtccatttaaaccaggaattccataattaagctattttaggaatgtaaggtgttgtataggaaaaaacagtctgaaaatggtgggcatagttgcgtttctagatggttatgctgtgatttatttttttaaaaaatcagttgtgtctgttaaaagcatttctgttactgtggggaggggtttttaaagttttaaaaatctagcttttgggtgagtgcagtggctcatgccagtaatcccaccactttgggaggctgatgtgggaggatcacctcaggccaggagtttgagacccatctgggcaacatagtgagactctgtttattaaaataaaaataaaagtagaaataaaataaaataaaaatctgtttagttgttgttcacatttggtcctttagagatacttttttgagacagaatctcactctgtcacccaggctggagagcagtggcatgatcacggctcactgcagcctctatctcctggacttaagtgaccctcccacctcagcctcccaaatagctgggactacaggtgcatggcactatgtctggctaatttttaaatttttctgtagagatgaggtccctccatgttgcctaggctggtcttgaacttttgggctcaagagtcctcctgccttggctccccgaggtgctgggattattatagtcatgagctactgctcctgacctagtgataactttttgaattccaattccttgatcctttagcatcctaggcaaagacaaccatttctgctgggtaaagcacagtgaaaagccctgcttctctgtatacaaatgaaacagattgtacaattaatatgtattgggtgctgcatggtccatcctaacagtagtgctaattgccatatcatttatttttacatttggaagtattttactttggcctcaatgtaattttgtttttttaatgctgtagagtgtatgggatataggtaaggagtggataagaaaggaaacaatagaatcagaaatagtaagaattgctatataaatgcctttccctgtaaatgcacacaaatatatgaggtgtttttttttgggggggggggtcttgctctgttgcccaggctggagtgcattggtaggatcttagctcactgcagcctccacctcctgggttcaagcaattctcttgcctcagcctcctgagtagctgggattataggcgcccaccaccacgcctggctaattttttgtatttttagtaaaaatgaggtttcaccatgttggccaagctggtctcgaactcctgacctcaagtgttctgcccgctttggcctccgaaagtgctgagattccaggtatgagccaccatgcccggccacgagttttttgtatgtatgtctaaatacgtagaaagacaagatttacccccttttttggtgtctgtaataaatttagtgatatacgtgtatgggtgtatatgtatatagatatgtatgctatgagttagaaatgaaaaacctgccataaaagcaagaggaaggaggagttaattttgcctgaagatgtcagagaaggctgcattgaaaaaatttgccatagacctggtgataggagattgaatgggccttactagctgtgtatagtggtttgtaccaaaaagtatggggataggaggggaaagtggctgggaatattggaaaatctagttgaaagataggttgaaggccgattgtgaaatagtttcacttactttatcatttaagtaataggttggttagaccttttagatcagatcagtattttgagagtatctctaatagtatagaattatttgtacttcttgactgaaactatatgttaaataatgaatttgtaacttagttattagagtgttcaaattatacctgtttctctcccttccctcaatttttagaaagcattctctaatgaggcaggggtttttgtttgttttgagacagcgccttgctctattgcccatactggagcgcagtggcatgatctcgactcactgcaaccttcgcctcccgggttcaagtgattctcatgcctcagcctcccttgtaggtgagattacgggcgtgtgccaccatgcctggttaatttttgtatttttgatagagacggggttttgccatgttggccagctggtctcaaactcctggccaccttggatccgcccaccttggcctcccaaagtgctggggttacaggcatgagccaccatgaccagccaaggcaggttacttttatattggttaaaagagtgcctgatattaaatccttagtctcccactaaccagctctctctctgaccttggatgagccttaaactttggtttaattcatttgtaaaacaagcataataatgcctacctgaaagaactgttgtgaggatttgattgaacgggataatatgtaaagcacagctcttgacacactgtaaatgtagctgaaaaatagtagtgattattttgtggtaacagctttcattgtagaagaaaattaatggaatgtgaaggattaatgattttgggaggtggaggggaggagaccttgttaagtagattaattaggaagttattggtttgtccaaacagtgcttttaggtgacaagggaattcagtgtggaagaggaggtttggtaggagaagaaaatataatcagtttagttgtagatgggttgagtttaaggtacccaaggacacaaaggtaatactgtggaggtggctgttggaaatacgaagcctggaggtacgaatgtggaagttattgctgtctggttggagatacttgtgtctgggaagagtgatcgagtgagtagtggcctattaatgttttctttttttaaaaaatttactttcaatatactgccaataaagtaatttgcactgttatactaaggtattagaccacgtattctgagttcagatttgttgcttgactcgttaatgtatgtaggttatacccagttttggtaagcctcctgacctttggccccattcacagcattatctctatctctcaaagggaaaaagaagttcattctttgaactggggagtgctctgatgttggcaggtctactcctcctcaggtctagacactcttggcctccacagtggttttattcaggaaagttctcacctttgaattgtagacttagtgcagacttgctggtagttggctaggcgggatcacaacagtgattggtattggtaagtacatgtattgctgccaagaagttgcatagttcatgtgttcagtcatagccttttctttatatgacgaccccgctgaaatacagaatggcctgctgccttctcacagaaggtctactgttccaagcttatttttttctgagtgagaagaaaaggtcttttgccactgttttcagactgaaatttaaatttcagctgccttggatcctatataataaaagattgagacacagaaattgttctattagacttgaaatttcaattgcttttacttcccagtttgtagtagtgtttgaacctaaaatcctatgtgtgtttttagttaccttttcaagttaaactttcagaaactatctgcttaacttaaaaatttactcttgttaattgcccaaccacatcttacttcatgtgtcaaaatctgcctgatatttttaatttggaagtccacagtagtgggaagtcataggaactcccagtcagggtattcacagtaactactcacagtaataggaactcacagtcaagtctaatttttcattttaatttttccaatcccttctttacttctagtatactaattgaaaaaaaaaaacttgggttgcctttagtttcaatttataatttttattaggattttactgatactgtatctttttggtactggaggtctcagaggactgacctggttctacttgtttgctcttgggatttagaacgatagtttctattgtgttgagccagcaacattttgcttattttcaagaggcagagtggcagagtactaaattgcaaggttgtgcagaccttaaataagtgtatggtgagctataaagttacaatgttaaattagtttctggctggcccacattgtttccaaagttgactttgcattttaaaagaccttactgatttaaaaagcgaatagagaactgcttggaaacacatatcatctgagagacattcgaacatgcggggaaaaaaaaaagtggaaggaaaggtgctgctggctgggcatcatagactagaaagctgcatttaaagtttaaactgcttgggtaagacatgttttcctggtttatcctcatgtttttttccatctgtgttctcttgccattattaccaccaaatacaggagaatactcctttacttattgtagtcttatttgggagacagactagagtgtggattatgtagggacagaaagggagacttgagggtttttttttgttttgttttgttttttcttccagtatttaggttcattgatgtacagggcatatgttgtcttcttttagatttttcagtgaagttttgtactcctctccataaaactctcacacatttatatttatacatatatatgtaatatatatattatttatttattgagaaagagtcttgctttgttacctaggctggagtgcagtggcatgatcatggctcactgaaggctcaaccccaaagactcaagcaatccttccacctcagcctcccaagtagctgggaccacaggtgcacattaatatgcttggctaattttttaatttttaaattattattattgtagagatggggtcttgctgtgttgcctaggctggtctcaaactcctgagctcaagcaattcacctgcctcggcatcccaaagtgctgggattataggtgtgagcaccactggctgggccaatgttttttctcttataatgtttcttctgatactttgtggctattctgaatgtgttcttttaaaaattatcattagaaagttacttcatttttctttttttctttttttttgagtcagagtctcgctctgttgcccgggctggagtgcagtggcgccatctcggctcactgcaagctccgcctcccgggttcacgccattctcctgccttagcctccctagtagctgggactacaggcgcctgccaccgtgccggctaattttttgtagttttagtagagacggggtttcatggtgttagccaggatggtctcaatctccttgtgatccacctgccttggcctcccaaagtgctgagattacaggcgttactgcatttttctgcaccaggatctctttattttgtacttaggctttgcttgctccctctttgctttagtttcatcatctgtgaaacaaaggggttaggttagaataagaaatttccaaagatctttctacttctcacagtacgtggtgctgtgtcgaggtaacgtcctttacatacctcatgaagttagtgctagttgtaccatccaaaccacacataagttctgtgaatacaaccaaacagctttgttcacatgtatttgcatgtgtttcaacttaccgtgttctctgcataatgattcttcaacagtttgaggtaaagagtgaatatttcagtttaaaaatacagtcaaaagtatagtttcttattctggtggacgtggtttactactacctcctccccctgtgttttagtttgttgctgtgctagttttattgcatattttctctcctaaaaatagatggtctttatctaaagcgtagtttttataaatatttgcatctcaagtaaattttttcctaccacatggatttcatgtggtgagttccatgaaagcaggttgtgttaagagggcattctcctagtacctgtttattcttttccatacctctgccccaaggatcttgtttactgatgtcagaatactggcagtttgagtagtactcttgaagagttatttttgtatttatttctgctggattgaaggaggtagatgttgtactcattatctctcagaacatctattcaatcctaacccccaaaatataccttagaaacaggctctctgtgtttttttttttttttttaatcttttatgaagacatacaatacacacatttctcttagatgctggccaggaatttgtttgaacaaattgaaatggcaagttttaaccctaatttgaatagagttccagaaaatgaagttagggcagaggttggtgaggggtcatattggagtgtcactgagctagtaccaatttgtttgtttgttttgtggtaaaatgcacataatataaaacttagcattgtaaccatttttaagtgtacggttcactagtgttaagtacacttgtatagttgtgcaatcaatctccaggactcttttcatcttgcaaaactgaaactctgtacccattaagtaacaactcctcatttccccttccctccagcctctggcaccaccattctgctttctgtttctatgagtttgagccagtatttgtttagctttttcatttttgtcttgagaacttgaccttctttatgacagctaaatggatgttgaacatgaagaggagagtaatccagtaaaactggtagccactcttcatgatccatgagtgttggtagttgccaaccccgaaattagagtatcagtcagtcttctgtaatgcagtttggaaattgctattccttgtgtttgaggatgatgacaatagctagtgactaacacttacttggtacttattacatgcctgaggttagaggaaagacctgcttctgggaagaaagagtaaaggaaagattgggtgcatgacaatgtatagatacataaaggaagttcttgtctgttttctctgttaagctcaaagctaagtcatctgttgaaagttagggggctcaggttggttaggaggtttaaataaagtgacagatgtttgcaattaccaggaaatgggatagagactcatcagggaaagtagaataatactaacagtattagtggtaataataacaacaacaagaacagctaataatgactagttatctgttctatgccagctacattttatgttgtaatctttatagcaaccttattaaagtagttgttattacaggtaagagactaagttgcagagttaggatgccagtgtcactctgctgccccaagcccaggtgttctttcctttttctgcactgttaatggcattgggagtgtctgcctgacactacaaaccagaagtttagagtataatttttagaaattgttcttcagagaaaggaggaagagtgggctgaagtaaacgctatatgtctaaaatatcacaattatgttgacttttttttgccaccagaatgattgatgcccttgatgggtcatttcactaaataaagtgagttaccacagcccagtagaaacccagatctggttgtgtgaccttaatagaggtatctgaaattataaattgattttcttccaatagcccgcatctgaaataactggattgaggttcatgtcagtaaattcttcaatttctatgtagggaaaaatgaggacctttttgtttgtaattattctatttattgaacagttattagttgtacttctaatctgtactagaagactatattacaaagtgtttattttccctaaacaatggcttctcttgattcgtgttcattattgccctaaataaattgaaatttagaaaaagaaaaacccagttttcttagtatcatacatgcaagcttaagttttcttatttgtttgtttttatttgacatacatgaaggttatttccaaagatacaaatggaggccaaaacagtttgacataaagcagaccaaaacagattgaattatactgtacctctacactgactagcattttgatgtctagatggataagtaagcatagtgctaatttacaagcgcaaactcaactagtaagattaactaatttctaggctgtaatgaatttatataaatattcttgttattcagatgggaaacctcataactgtgctgtagattagacttgcattgcctaaaactggagaatgtaactttttttgtttttttgacaaacccacagccagcatcatagagaatgtaactttgcctcccaaatctgtgtatgtcagatcacttataattggagctgcacagttccctcttctaggtttgactctttaaacttggtaacatctcattaggctaaatgaattctccatgccctattgtctgtcttgctatgttgcctaacactttgattttaacattaggaaaacaactaccaataaacatgagataaaacacaaaatagatgaataccactagcttggtaatataaaccattatataacagggatttgctgcagactcttttcacacatagaaaacttttccaaaagacatttttgaagtttcgctatgaagaaagtttgccagtgactgaaagaaccttttgtaggtccctatttgggagtgcggtaactggtgcttctggactctatacacagagatccaaggctaggaaaatatctcagggtaaagctatctaagttttgtatccaaaagctattaatttcttcagttatgagaagaaaccacaaattgcgtaatggccttggtattttgttggtatggagagaaggatgatctcagaagacttgtaggcctgtcttggggtgtctgtggtgtgtgtgtgtgttgctttttttccaacttataaaaaaactcaacaatcaatcttagccacgtttttgaaaccgtagatattctaagttagcaaatccaaatcagtacacgaaacaaccatttttgccagcaccaaatgcatactttgctgagctttcgtatctgggctccagagtttattcatagcaaattctgacatctgctaagttctattatgacccagaggggagcgaagtgaagtaggatgaagaatctggaaacgcatgctgcttatagggtaaattgcattgaggaatttgcatccatgtagcctttccccttatggaccactgtgacgtttagtaggctgagctaaaaggtcatattgctcaagatgaataacaataaatggtttgttcagtgacttgttaagcctactgccagtgcctactaatagccaaaatagctatttctcttctgggatatatgagtttggctgtcatctttttgggaatatggtaatttgtagccatcactttcagtgtggtggggagatctaacatttaaaagttcttatcccagtggtttacagatcccttttcccccacaaaccgctgctgcttcttttgaaccttgaatgctaccatggtttaattttttttttttttttttttttgagtcagggtcttgctctgtcacccaggctggagtgcagtggcatgatcatgactcactgcagccccagccgcctggactcaagtgctcctcctgcctcagccacccaagtagctgggactacaggcgtgtgccaccacacctggctaatttttagatgggatttcgcatgttgcccaggctggtcaagcagttctcccaccttggcctcccaaagtgctgggattacaggtgtgagccctcatgcccggccttcctttgctttgcttttcttcagttgtggttcagttctagaccatgtttacagtagatacaggggcacagctcccaatagtgtttaaaacatgtgaagtatcggggcagaagttagcacctctaataagtttaaattccctcggatttgctttataggaagtatgttaagaacattttccagagcattttcattcaactgatatattttacatagctgccttattaaaatacagatgtattcttgaaattattgaccaatttttttttttgagatagtcttgctgtgtcgcccaggctggagtgcagtggcacaatctcggctcactgcaacttctgcctcctgggttcaagcgattctcttgcctcagtttcccgagtagctgggattacaggcgccctccaacatgcctggctaatttttgtatttttagtagagatgggtttggcatgttgtccaggcttgtctcgaactcctgacctcaagtgatccatccacctcagccttccaaagtgctgggattacaggtgtgagctaccatgcctggccgatcaatttttttttttttttttgagacagagtctcgctctgtcgcccaggctggtgtgcagtggccgaatcttggctcactgcaagctccgcctcccgggtttatgccattctcctgcctcagcctcccgagtagctgggactacaggtgcctgccaccacgcccggctaattttttatatttcaatttttaagaaatgaaataagatgaatgatgagtaattcctttttcagtaatatagtagattagatattcagagaaatcccctcgggtcagaaattttttttttttttttttttttttttgagacggagtctcgtaccgtcacccaggctggagtgcagtggtgtgatctgagctcactgccacctccgcctcctgggttcaagcgattatcctgcttcaacctcctgagtaactgggactacaggtgtgtgccaccatgctcagctaatttttgcatttttaatagagatggttttcaccatgttggccttgatgtcttgaccttgtgatctgcccgcctcaacctcccaaagtgctgggattacaggtgtgagccagctggaacatttttaaatgaggctaggaaaggtaaaaatgtatgagcacatataatatacatataacgttctggaactagtgtaagaaaaataattgaggccgggcatagtggcgcacgcctgtaatcccagcactttgggaagccgaggtgggcaaatcacgaggtcaggagttcaagaccagcctggccaacatggtgaaaccctgtctccactaaaaatacaaacaattagctgggcgtagtggtaggcgcctgtaatcccagctactcgggaggctgaggcaggaggattgcttgaacccaggaggtggaggttgcagtgaactgagattgccccactgcactccagcccgggtgacagagtgagactccgtctgaaaaaaaaaaaaaagcatcatttcataaggcagaggaagccctgaaggtggtggtggttctgagggtttcttgtaggattagaggaaagtggagggacaagagacaagtagtacctaagcatagtggaaggtcctactggagactgtcccagatggaactgggaccctggagggtgcaagtcttcagtgcatgagtagaaaaaagatgtccaagatgtcctgcatgcagagacttgcctcttactgtcttggatctggttggagaggggaaagaagcctcccatgtgattgcctaagcagacgcccatactcaaagatttgcagtcagattttatactacctgtgaggactgaaaatctctaaactgaaaacttagttgaaagtattcctatttggttatggttcccagtgtctgggagaatcaaattcatatctcttttaaattaattaattaattttagagacagggtcttgctatgttgcccaggctagtgttgaactcctaggctcaagcagtcctcctgccccggcctcccaaagtgctgggattataggcatgagctaccacgcctggcgaaaacacactttctagtcaggccttaaagacttttaatagaggaagttgcaagaaatgtgagtttgcgtaagaaaataagcaactatgagttggttattttgagtcagatggggcagattctattttccagatatggaaacagtatttcctgactcctgctcttctagaacctcactattgtactatcaagaagtagaatctttttctgttgaagctgggcagtcctttgtgactgctttgaccaaaagaatatgacagaagtgatattatttcatttctgaggctaagtcataaaaataccacacatttctttattctcttgggatgctcattcttggaacccatcagcatactctgaagaagcccatggagagatccatgtggaaaggaactgaggtctcaggccagtggcaccagctataggcttccagctgatggtcagtactgacttgccatctttttaagtaagcgatcctgcaagtggatccttcagttctctatcaagctgccctgggtgatgccatgtggagcagaggcaagctcttctctctaagccctgaacagattactaatttgtgagcaaaataagtaattattgttattttgatccactaaattttggagtggtttgatatgcatcgattgacaggtaactaaacatcggtggtaaccatcagtcttataaagcctacagatgtttaaagaaataaaggaggaggttaaaaatatgatgaggagactcttaaaactgatgaggaaaatatggaagaagaactcagtctctgtagaacttctagaaataaaaaacatgcagatgcccccagacttatgatgatgatctgattgtaatttttctttctttatttctttttttttttcgagacagggtcttgctctgttgcccagctggaatgcagtggcatgatctcagctcactgcagcctccgcctcctaggttcaagtgatcctcccacctcagtctccctagtagctaggaatacaggcaggcaccactatactcagcaagttttttatttttagtagagacagggttttaccatgttgcccaggctggtcttgagctcctgagctcaagtgatctgcccacttcggcctcccgaagtgctggcattataggcatgagccacctcagctgacctgattatgatttttcaactttacgatggtgtgaaagtgatattcattcagtagaaattatacttcagtacagtattcatgaaatattcagcactttattgtaaaataggccttgtgttagaattcaagctgtctaaaccaccttgttttgttttgttttgttttaggcttttagcagtgtgaagccattgtttttagtttctctctctagtgataagcggaaaagagggttgaggaaggggctttaccgaaccaaccagaaacaggaactaagaacccaagcctgtgttccctcccttggacacccctgtaagatgattttgctcagtcgtaggctaacatcagtgttctgagcatatttaaggtggaccaggctatgatgtttggtaggctaggtgtattaaatgcatttttgacttagtaatatttcaacttatgatgggtttataaggacataagccccttgtaaattgaggagcatttgcagcgaaaaatacagtggaaagaggatacagagtagagtaaattaatgaactggaaaatggatctgaagaaaatttctagaatttagtacagagaaagaagagatggaacatatgagaggtttagtgacatagagaatgagacgataacatctgtctgatctagtggatcccaaactttttaaatcttaggatcccttatgccttatgctctctctctctcttttttttctttgtttgttggagatggagtcttgctctgttggccaggctagagtgcactggcatgatcttggctcactgcaaactccacctcccaggttcaaacgattctcctgcttcagcctcccaagtaactgggactacaggtgtccattaccacgcctggctagtttttgtatttttagtagagatgaggtcttgccatgttggtcagtctggtcttgaactcctgacctcaagtgatctgcccaccttggcctcccacagtgctgggattataggcatgagccactgcacccagcctactctttaaaattattgaggacccaaattgcttttgtttatgtgagttacacttataatttggccacatttttgcatatatgttatagatccattaaaagtttactttaaaaaagaaacatcatagagtgagaaggtgagccacaacttgggaaatgtactaacaaaggtttgttagccagaatataaaagaactcctcaaataaaaaaaaaaattaggaaaaatggaaataggaaagtcatgaaaaagttaattttacaggagtagaaacaaatggttcatgaacatatgaaagatcctcaacccttttagtaatcaagaaaatgcaaattaaaatggcaaggaactgtctatctcctgctcgtctcctttcccccaccaaacagggaaaaattaaaaatatagttacagttgttagagatgatatgagcagtaggagcagtcatactgttaggtaccttcatttttgaaaacaatttggctttacctagtgatgcctaggtatgtcccctagtgaaattcttgtgcgcatggcttaagagacatatgtaagaatattttaattattgttcatagtagctaaaaatccaaacaactcaaatgtctagcaactgtaaagcataaatacagttggtatatttataaaagggtgacctctgagcataaaaggaatttaagtgccactacatgcatcttcgtagaggaatattccaaaatagtggggatcaaaaaaggcagttagaaataataaatacggggtgggtgcagtggtacaggcctgtaatcccagcactttgggaggctgaggcaggaggatcccttgagcccaggagttcaagaccagcttgggcaacatagcaagaccctttccctacaacaaattaaaaaaaatattatctgggcatggtggtgtgtacccgtatttctagttactcagaaggctgaggtggaaggatctcttgagcccaggagtttacagctacagtgagttatgctcatatcactccactccagcctgtacatcattgtgagaccctgcctcaaaaaaaaaacgagtatgattctatttgcataaagtttagatgcaggcaaatctaaacaatatgttgtttggggatacatatatggtaagattataaagaaaagcaaatgaacaaacttcaggatggtggttttcttggagtgggatgaggtggtactggggaatggaagagtacgtaggaactatggtttgaatatgacatattttacaataaaattttttataagcttgttgttgaaaggaaccctgaggtgattcttttttctgaagaagacttttggtaatgcggatagtaattttttttttttgagacggagtctctgtcaccaaggctggagtgcagtggtgcgatttcggctcaccacaacctccgcctccccggttcaagcaattctcctgcctcagcctcctgagtagctgggactacaggtgcatgccaccatgcccagctaagtttttgtaattttagtagagatggggtttcaccgtgttagccaggacggtctcgatctcctgacctcgtgatccacccgcctcggcctcccaaagtgctgggattacaggcgtgagccaccgcacccggcttgcagatagtaattcttaatcttttggtacatgctcttgcacataaagttttacagtaaatatatttttcatttttttcctgaatttctttatgtcaaccttgctaaatagagagcgtgcctaggaagaagatgaaactaggagaattcatccacaagcttaagttcaatggttgtagccttagaatgagaaattaggccttttattctacctgtcttaaaattagcttattattgttaaaaaccaaagactgtttcttagtttgtttatttttattttttgttcaggagcagaagcactcttttgcccctagccctagcctgcatctgctgtttgttaaatacctccatgaattgacatctcttccttttccgaaggaatgtgaaacccaataattacacacagacctgacctactttggaagaaccagaggacaaagaaaccctagatttcttcgtctttttttaactaaaaagcagagatttttgggaggcgagggccagaacttcctgtatctattcttctttgaagagcccaactcacctaagaaatttctggctgggcatgatggctcatggttgtaatcccagcactttgtgggactgaggagggaggatgccttgagcccaggagttcaaaaccattccaggcaacataacgagactctgtctgtatgaaaaggaaggaagggagggagggagggagggagggagggagggaggaagaagagagaagttttcccttgtgtgtgctgcttgtaggctagtggacttgattctaatgaagcctttgcatgtctgctgatccggaaatatttggccttttcccaaggctctatggctttgggaaaataatgatgaaatacctatttattttttatttttaattgtcctattttatatgtttgatttttgtaaacacctcagccctttttaaaaagaaatagttggaatataaacatatattctcattaattaataaatcagctggatgactagtccaaactattattccattatcattgtcactgccctgtaacttattttagttctgtgttagttatatttacctgttgttattttgctaatttgatagtttattgtgaaaacaatttttaatatttgtctactgacattttttaaaatagaaaaaaattctcctaaaccacaatcagaaatcttttcatttgattcattaacagttactaaaacaccacaactgcgttctgggtcctaggccctgtaggggggctcacacaacttcactaaacaccagccttagcagaggaagataactatcaatatctggaatgtcaagaactagaagaaacaagataatgtggtcctagcagacagataaatgggatagattcaagaattcagaaataaaaccttacacttatggtcatttgacttttgttaagtctgcaaagataattcattggagaaagaagagtcttttcaccaaacagtgctggaataagtgtatatccatgttcaaaagaatgaagttggacctttgctttataccatatgcaaaaattaacttcaagtggaccacaaaactctctaagagttttcatagagttttatagttttagctctcacatttatgaagagaagaaaacatacgagcaaaccttcctgatttggagttaggcagtggtttcttaaatagactaccaaaagcagaagggacaaagggaaaaatagataaatggactacatcaaaattaaaaacttttgttctgcagacaataccatcagaaaattgatgacaacccatagaatggaagaaaatgtttgcaaatcgtacatctgataagggacttgtatctagaatatataaaaacttttataactcaatagtaaaaagtctaataatttaaaaatagaggaaagatttcaatgtgtaatgcccctcaaagtgtatgcagttagtccacaaacacatggaaagattctcagcatcattagtcattaggaaaatgcaaatgaaatcctcaatgagataccacgtatccactaagatggctgtaataaaaaaagatggacaataacaagtgttggttaggatatgtggaaagtagaactttctggcattgctggtgagagagaatttaatgatgcagcagctttgtcatttcttcaaaatgtttaatgttccaaaaaatgttaaaagtggaattaccatataacccagcaattccactggtaggtataaacccaagataagtgaaaacacattcacataaaaattttatgaatgttcatggcagcattattcataatagccaaaaagcagaacaaccaaaatgtccatcaactaaagaatggataattaaaattaatatatccatacaatggaatattatttggcaataaaaagtaatgaagtactgatacatgctgcaaggtgaatgccccttgaaaacattatgccaagtaaaagaaacaagtcacaaaaggaccagatattgtatgatctcattgagatgaaatatttagtataggcaaatttatagaaagaaagtggattagtggttgcctagggctggtggagggataggagtgggggaatgaggagtgacagctaaacaggtatgaggtttttttcagtcggaacaaaaatgttcagttagattgtgatggttgcactatcctgtgaatttataaaacacgttgaattttacactttaaattggtgaattgcatggtatgtgaatatctcaataaagctgcttttttttttaaataactagaatacaaagaaagcagggaaattcttgctgaggagaaatactaatgtgattatttgtcttgttaatgaatttcatgtcctcgttcgggctaaatatttgtcaatttttaaaaaaatctactttcagaaagagtttcaggtatctttaacagaagatcaacagattaaaacaaatttaaaagaattagggccaaatagtctagggaagaggagagatggatactattttaccagaaaacttaggctaagtagagctaccacagttcacttagcttttgctttctggcagtacaggccaacaagaaaacatggattccttaactaacattattaaataaaaggaaaaaatacaattgagaaaaccgatttcccagcaccacactgtaagtcaaaacttaataccctgtgacttgatatcaggttcacaaaactatgtctaaaagaaaaattcttcaataatacatttttaaaaaagatttcaaggccaggtacggtggcttatacctgtaatcccagcactttgggagtccaaggcagatcacttacagccaggagtttgagtccagcctgggcaatataacaagacactgtctctacaaaaacaaacaaacaaacaaacagaaacccctatggtggcacatgcctgtaggcccagtcgctggggaggatcacttgaggccaggaggttgaggctgtagtgaactgtgatcgtgccactgtactccagcctgggtgacaaagaccctgtttcaaaagggggaaaaaaagggttccaaagtgttctttatatggaaaccattttgattctggatataggtctagtgagtctagtgaagaaatgttgtttgttaagcgatctggttacttgaactgacggaaagcagaaagctgttgtttagtctggtatctccaacattaaatagaagtttcctaacaaaacaatttaagactgaatttgaatgtagtgctagaagagcagagcattccattatgatgtttgcagttaactattttagaatagctttagatgtgtagaaaaattgcagatacagtacagaggtcccaaataccccacggtcagtttcctctattcttattatcttacagtaatatgatacatttgtcataattaatggaccaatattagtacatccttattaaagttcatactttactcaaattccgttagtttttaccaaaatgtcctttttctgtgtcaggatcttgtccaggataccacacgccatttagtcaccatgtctccttaggtttctcttagctgtgacagtttctcagtcttttcttgtttttgatgaccttaatggttttgagtagtactggtcaggtattgtagaatgctcctcagttggaatttgtctgatgtctttgtcatgattagattggggttataggttttgagtggtaagataaccaaggtaaagcgccattttcatcacatcataccaagggcacatactatcaacatgacttattactgttgatgctaaccttgatcacctggctcaggtagtgtttgtcaagtttttccactgtaaagttctttctttccccccctttcataatgtactgtctggaaggaagtcattagatgcacatgcttttgatagcattttgtgcaattgaaaaaagtaactttgtttggtaaactaaggagcctgacatatttacttttccagtggagagcttacctatgtttacacagagtttgctggaatctctacaagtaaggctaaagcaaagcttttctcaagaaagagctttagttttgttcacatgcttgaactcttgcttgaaactgctacagttctgtactataaattatggaagagatttccttggcctagaatttcttggagatgatagttgtctaccttataaagaaccatgagctgttagttttctattactatgtagcaacctgccacaaatttagcagcttaaagcagcacacatttactgtcttacagtttccatgggtcttgagtcctggcatggcttagctgagccctctgctcagggtctcagaaggctgtacagtattaaatggactgcattgtcacctggaggcttaactgggaaagtagttacttacgagatcgttcaggtagttggtagaattgctttatgagtgaggatcccagctttttgttggctgttggctggggcttctaaagagactgatcctagagagactgcccgcagttctttgatgccacccacagttccttttcctgagggcttccgtaacatggccatttacttcattaagctctctagctccacttggaagaaagggaggatattacataaaggcatgaataggtctgtcattatgtgtgtgtgtgtgtgtatgtgtgtgtgagagagaaccattgggggccagtcatcatggggtctgtttgtcacacagaatatgacttttatttttatttttaattttttttgagggtacatagtaggtgtatatatttcataatatgacttctgaagagaatatttaattttgagtaggactgcatccagtaagtctgtcttgatgaaaattagtcacagagtacatcccaaatgttagtttaacccaatagagctggttgtagtaaaaagaataaactttacttttaaaaatattgggtacaaggttaaatggaggtaggtagagctgttcaatgcagcataccagctggggatgaagaaagaagttggaggataggtgaaatacggggatatgttttccttgtttcaaaattttgctaaagtctgatgctgtcagtcatccattcttttattagtcaattatctctgtttatatttaacaactcattaccataaaatctacttttgagaaggagcaaaacataatgaagtggagggctcaggttcttgagctcgactgtctggcttcgattcctgcctctgccattcagtactgtatatccagggcacataacttcattggtaggtgtctcagaaacatctgtaaaatgagaataatagtacctactccatagggttgttgtatgggttaagagttaatgcctgtaattattcttttcttttttttttttttttgagaccgagtctcgctctgttgcccaggctggagtgcagtgaggcgatctcagctctctgcagcctccgcccctccaggtttaagcagttctctgctcagcctctggagtagctgggattacaggcgcgtgccaccacgcccaggtaatttttcgtatttttagtagagacgggatttcaccatcttggccaagctggtcttgaactcctgacctcgtgatccacccgcctcggcctcccaaagtgctgggattacaggcgtgagccaccacgcctggccattattcctcatttttttcaagtgcagtaaagatgtcatagttatgtttaaaaaaagagaaagactcctgtttgaggtatattgaagtagttacagatgaaatgatacggtgattgggattttggagaaacttggtagagatatagataaaacaattgactataaagtaataattcttgaagctgattgatgctttgaattattttattgtctacttttgttaatatttgaaaattttcattacaaaaagtaacaaaaaaatttagtgccttgggacatattaggtgctcagtatattttacctattcttactatgcttatgtttaatatattggaattaactagtctaaaacaaaaaatataaaacaaactaaaattgactctttgagtttctcatttctaagtgagaaatttgataatggaaacatcgtcaaatttggctgacattggattatgcaacatttcttagactcggattcttggtttctgtgttcatgtctttctggtgtggttgtaatttacagtttaattaatttgacctacttgttgcccgtttcacattccatttaatttagtctgccattgtttgttctgtaagtgggatggaaattaatgtcaatattattatttagtgttcttagttttaacagtgggaaacattgactttaccaatagtgaaaatattagcaaatgccaaggcttttctgggcaaacagtggtgttatgctttagttttaatgtatttaattgaggaaagaaacacttattcaccaaggttatctcaaatgtggtaaatgcagttttctgcttattatcatatggtcctacattatatagcactgtaaaactagatgacttagggctgggtgtggtgactcatgcctgtaaccccagtgctttgggagcctgaggtgggaggattgcttgaggccaggagttccagatcagcttgggcaaaagagcaagacccttctcttaaaaaaaattaatttagctgggcatggtagtacatgcctgtagtcctgactactcaggaggctgaggtggaggatctcttgaggccaggagtttgaggctgcagtgagctattatcacatcattgcactccagcgtggtcaacggagcaagactctgtctctaaaagaaataacaaatacagccgggcgtggtggctcatgcctgttatcctagcactttgggaggctgaggcaggaggattgcttgagcccgggagtttgagagcagcctggactatagtgagacctcatctttacaaaaataagtaaataataaacagataagagaaaataaaagaaataataactaaaactaaatggcttgattactttaactaaccaagattgagagttgtatgactagtagtgattctgatttatgtgaatgaacccttaggacttaaatgtcaatttaaaaacttaaaaaagtcaaaacccaagtctcccagagttcgaattaggaattggcacagtgagaaccttatcttgataactctctttctttcttttttatagtcagggtctcactctgtcacccaggctaggagtgtagtggcttgatcacaactcactgcagccttgacctccggagctcaagcagttcttgtgccccagcctcccaaaatgctgggaccacaggcacatgctaatgtgcccaaccaatttgaaattttttttgtagagacaggattccactatgttgcctaggctggtctgaagctcctgggcttaagcgatcatctcaccttggcctcccaaagtgctgggattgcaggtgtgagccactgtgcccagctgatacctctgctttcaagtcatgtaatagatgaaaacattgaggattagaggggtaaagtgattttcccaaggtcacaaacatatcttagagatacagctggaaattgaactctcaatctcagcacccactgcattcgtctttttgctgtcacagtgatttccaaactgttctgcagagccctaggcttctaaaaagttttgtctgtaaccaggatggatactcttttttctgtcttatgtgttagggtttatgtgtgattttgttcagaaggaaaaagtttctactgctgtgtatgatcatttttatatccttcctacactctgagctccttattctgtgctgttttctacccagaaaagtacatttgattcattgaagggatttttttttacttagtttcaaaaaatgccaacttgatctcttagtttcaaaaaatgccaacttgatctatcaagaaacctgtgacccagagacctcaggaaagttgcacaaagacttttaaatatggagggataattagttttattatgacattattatcaattaacattttacttccttctagctctctacattttcattttctcatctcataaatctcattccttatgattttttggtggggatgtgttacttacggtctcttattttcctagaacaatatttatgcaaatatgtctttttttttttttttttttttttgagacggagtcttgctctgtctcccaggctggagtgcggtggtgccatctcggctcactgcaagctccgcctcctgggttcacgccattcttctgcctcagcctcccgagtagctgggactacaggcgcctgccactacgcccagctaattttttgtattttcagtagagacgaggtttcaccgtgttagccaggatggtctcaatctcctgaccttgtgatccacccgcctcggcctcccaaaatgctgggattacaggcatgagccaccgcgtcggccgtctgtctatcttaaatgaaactatttctgatatctggagattcttttggatctcattggcaatgaattaggggtcatgttaattggcttaaaagtagtattgtcataagacataaaagaggggctaatagtataatagttgggttttacttaaattgtggatgcttttaatgatttttaaaaacccacaatgttattaactatactcaatactttaatgaattgatacacagttacgacaatttcctttacataaaatccttggttctaccttagcatctttttgaaattctacacttgtactctaatgcaaatttaggaccatcagagaaggtcagtatttaggatgtctgtaatcctgctacaggaaaacacaaagaatcttgttaaatgttaactctgttatattaagcatatacttcatgtagctgtcttttgacatctgttgtggctatgtttaacctatataataattttatatttcagtggaatcattctcagttttttctatggcaatgttgtttatcagttgtccgcttaccacctttaaaataaatatcagaaatttggccaggcacggtggctcacacctgtcatcccagccctttgggaggccaaggtgtgtggatcacaaggttaggagtttgagaccagcctggccagcatggtgaaaccccatctctactaaaaatacaaaaaattagccgggcatggtggtgcgcgcctgtagtcccagctacttgggaggctgaggcaggagaattgcccgaacccaggaggtggaggttgcagtgagccgagatggcgccactgtactccagtctgggagacagagcgagattccatctcaaaaaacaaaaacaaaaaaacccagaaatttaagaattaattaatgtttactattagacttccagggattgatttaagttacttaaattacactattcatcacatgaaatgcaaacattcattatggaaataacatttgtttgacttgaaaatgtgatgattactaaatataaggaactcattgaaactggaataaatgcacaagccatcacacaaaacattccattttgaaggaatcccagaggggcattatctgtcagcgctggtagtgtgcacctgttcttcggaaaacaccttggaaggtagttggtgccatgttcctgatgggcacagggaggctggcttcttactccaggctgctcagggaagatagtctggtatcataaacatccagacaagaaatgcatgatttcacaacgatgcaccttttgacaaacaatgagcacactactgacatccgaggatgcattacaagtgagactttcagaaataggaggatgaaatgcagtctgaaaatggatattgcttcctgtttttccttagtcttcattgtcaaataattgggagatgtcaagagatgagggtttaggatagtttttcaactgttttctgtttccttggttcactcagctcctgctacttcacgcagactgtgttattagtccttgagggcatattgatataatttaaaacaatttaaaatatgaactgttgctgattttgttcaacaggaacagcactaccattgtaaggttagcaagatacccaatataataaatctccataggggaagtttaagaaaattatgttacggcagttgagttcagctctcttttcagctggagccttaagtcttggagcgttctaggttctacatctaaatgtgcttaacagtacacaggcttcttgacaaatgctgttcttgggaagagtacaatccttctgtgagtctgtgttatttttacctgtgagttggcattccaggaaagagtagcatgtactcattaagaaaattcatcttaaaatttattcagctttttgtcttctgacaaccttgtattttaggccctattgccaagttatttcccgtctttctgtcctgggactaaagtttctttttttcttttctttttctttttctttttctttttttttttgaaacagagtcttgctctgtcaccaggctggagtgcagtggtgtgatcttgactcactgcaacctccaccttcctggttcaagcaattcccctgcctcagcctcccaagtagctggggctacaggcccacgccaccatgcttggctaattttttttttgtatttttagtagagacggggtttcaccatgttggccagactgatctcaaactcctgaccccaggcagtccgcccacctcggcctcccaaagtgcaaaatttcattttttatagtttaatttcccaccataactttgacatttttctttggaaataaactacttttttaaaaatttcaaaatatttctataagttgtaggttgaacacccctaattcaaaaacgaaaaatgcccccaaatcttaaactctttgagtgccaacatgacaccatgtggaaaattctatgcataagcacttaatacaaacttgtttttaatgcacaagattatttaaaatattgtgtaaaattaccttcaagctatgtgtataaggtgtatatgaaacataacgttttggataagggatattcaacctgtattgttattcttattatttttattgttttattttttgaaatggggtctccctctcgcccaggctggagtgcagtggcgtgatcacagcccactatagccttgagctcttggactcaaatgatcttcccacctcagtctcctgagtactaggactacaggcatatgccatcatggctggataatttttaaaaaattttttgtagagttgggggtcttgctgtgttgcccaggccggtctcgaactcctgggattacagcatgagccaccaggccggcctattttgtcattatgccactttcttagacagtgttctttggttgccattttgaactattagaactgccttgttaaaccatttagcttttgcccttttcttccccagatccctaatacttttctgcccaatcctttctctctattcagagtgtttcctgtttgtcctacattctctttctgtcctccttctttcctgctcttccctctttttttttttgagacggagtcttgctctgtcacccaggctggcatgtagtggtgtcatctcggctcactgcaacctccacctcccaggttcaggcgattctcctgccttagtctcccaagtagctgggactacaggcatacaccaccatgtttggctaatttatatatatatatatatatatatatatatatatatatatatatatatattttagcagagacgggttttcaccatgttagagaggctggtcttgaactcctgacttcaagtgatctgcccgcctcagcctcccaaagtgctaggattacaggtgtgagccctgcacctggcctcttccctctcttttttttagggctttgaggcatccttttcaacagctccttaaccttaaaattaagccatcaatcccattctaagtatctccctcttaaacttctgcaatttgtttaatctgaaataaacacctgaaaatagaaaattgaatatctatattttgtaaataatcctgattgacctttatttttattgtcaactctcttttcctccactccttttttttaaaaaaaaaaaattgttgaatacatttaagtgataaacctgtaggacaagagttgatttaactataaaacattgttggcactttgcaacaataacaatcatgtcagtatgcctgagagagttgctcataatattggagacactcgtaggcttctgttttctgagagggtaaatgtcaaccagatgggaattactggaactgagaaatcattttctttttgtctttaaaaatttctcttctatatcttgaatttcaagtaatcacagaaaatttcctttgcttcagataccatttactaattttgcacagtataccattttccaacttattttcccactttcagtaaactttctgttctctatccagacattggaaatgcatgaactattttacagtcaccattcagtacagcctagagggcagaaaaataaaagttcaaccactcacctaaaaagcactatacattttattgtattttattattattattattattatttttgagatggagtttcgctcttgttgccctggctggagtgcagcggcgccatctcggctcactgcaacctccgcctcctgggttcaagcgattctccctgcctcagcctcccaagtagctgggattacaggtgcccaccaccacacctggctaatttttgtatttttagtagaggtggggtttcaccatgttggccaggctggtctcgagctcctgacctcaagtgatctgcctacctcggcctcccaaagtgctgggattagaggcatgagccaccgtgcctggagtgctatacattttaaattatagttgttaaccactttctgtggagtttattgaaagctgcctgacccttatctttgctggccatgtagagtccttgtgtctcgagttggctagcatccttgcatcccagccattccttaggcttgacagctgcatattttcccagaaacagttgtgattggtgtgtataatgaatagaataacctgttctttccaaatatacatccctgttttgccccttagtacttgatttgactaattgtttcaagctgaaatatagacttcaattaaaaaattggaagccaggtgtggtggctgttgcgtgtaaccccagcactttaggagactgaggtgggaggatccattgagaccagcctgggcaacatagtgagaccctgttgctacagaaaattaaaaaatatatattatccaggtgtggtggtgtgtccctgtagtcccagctactcagaaggctgaggtgagagaatggcttcagcccagaaggttgaggctgcagcgagctatggtcgtgtcactgcactccagcctgggtaacagtgcagacgttaggatcttcccaagaatgtggccagcctacatcctgaccttggtcatgtggcacgttattaatcatggccatttaatgtgtaacaggttgcattcaagagcctagcttgtgttggtttggggttcttttaaatttgttttctgttgacaattctattttctagtaaattttaaataaaaatgttttttcattaaggctgattccaaaggtacttaagttcctttctagccagccattcttagctgggtcctgtgaaagcattatgccctatagaaaagaaaattgagtgactattttctcagttctcccaaacatggtactattctagatgcattgaagagaagtcaattcattacatacagtgatgctttaagggcagttgttctcagagtttgattcagggatgtcatagactccaatactgtttcagtgggtcccctaggtcaaaaccatttttaaagaaatgccacaacattattttcacttttcattcatagtctctcacaattataaaatagagatttccagagactatgctatgtatgatgctgcaattgctctgatgaccaaggagatgtgtggttgtatacacgtgtcttttaaatttttgtcttaatttctgatttttaatttgatttctaagcaaatattgaaagatattactcacataatcaaaacttctttgaagtttctcctaacttttaagagaaggagtcctgagaccaaacagtttgggaactgctgtcttaaggctgtaagacttaattctctgagagaacccctcctgggaatggctgcacacaagggcagtacagtaaaccagtcagttgctcaatagacattttaaaaattgaattaaattgagctcctagaatataacttttgagaccttatttgagattttctcccaaggcaatgtttgagcattgagagccttgtaacttgggccaggtttctgtgagatagacagttggcaattctcaatatcaagtcaatgatttcagaagtcattttcaaggaatacgtcctttaactggtagattaattatgtagcctgttggcattatgtggatcagtgccgtccaagagaaagagggcacatatattatttacaatttttaaataatcatattaaaaaagtaaaaagtggtgaaattagttttaatatcttttgtttagcctaatatatctaaaatattataatttccacatgtaatcaatataaaaatgtatcagggagatagtttaattcttttttatattactatctttgaaatctggtatatattttacatttatagcgcatcagtctggatagttacacgtggctggtgcctactgtattacactgtacagatctagatcataaaatagttgtagagctgagccgagaatgttctagagtagataagctttgtcataaaaatagagaataaaaattttgctacagaagttagtataaaaacataaccccattgaaaaaagcttacaatgacaaaatgtttgatatctgcctaaattctaaagacatttctaaaagaaatagagctctttccttaaaacaaattttttaaaaaaataagcttttcttcaaactgtaatgttttctctttccttctaaaaagcatgcagtctgctcactatattctttgaaattactgtatgttcatctgcataccagtgtaaggagatcctctttctcgtcttggaagaatttgagcccttgtgatctttgcatttccctcctacgtagttctttcttgaactgtccatttgtcctggcatatccctgaatccgtactatctgctatagggcatttatttctgatggggaagggtggtttgttttgatcttaatgctgaactgtcccttagttcattgtcttttactctgttgccgtatcttgcttacaaatatggtgtcagaatatgcaagtgaatttattgcctgttgtgaagaaaccactatttttttcagcttcattcactatgaacattattgtgcttacaaaagtgagttgagttaaaaagaactgtgttttttagaagtgagaattaaaagggagaaatagtaatttttcctctcatagaatgaataataaagaactatgactttaaatttggcatgatctaaatttaatttttttcctaccacatgccaattgaaacagaagaatttgttgaatgggaatgtcttgagtagggaaattaaggactctcacaatctgttatctctttagtagcatacttgatacagtgtcatgtttaattaatattagaatgtcaatttacaaaatcatgctctttggaagataaaagaattctgtgtagaacaggcaaacttaggaaatatatggtctcttggtaacatgttggaagttttctgctttgttataattttcatatgtaagtacaattaggagatttatagattttcaaccccaatataataacattctttgagagtttatcttttctttacctactgatttacctttgttgtggacacattcagtttttcaagcaactggtgtgtactttacaccaaaacctttattatatagtcttcagtaatctgtagctgtgaaactcatactcatttatctgtttagatattctcaaaacaatcatacctgtgtgccagccacctgctgtctgacttggcagtttctctgttccaactttatttttctgctttttagaaaactcccactttccagtttgcagctaaggtaggagctgagttcctttccctgttaagtggtcttatcaggcagttatgccattgccaagcaacagtaagttctctcctctcaggtgttagctagtaggtagggttggcaaggggagcctggcctgctgtgaagaagtagaccagtgtctctctgccacagccctcagggtcgggtcttgctgtgggttccatcctatggctcactgtgactttcctgaatggaatgcgtttattttttttccagctctgttctttccatgttcttcccacatcagctggcggcagccagttggttctgaatgctgcccacaaattgttagctattttgcttcttggtccctcaatttgtcccttgaataaggaattgatgtgtttcagatccaggattatgttgcttagtgaagcaaatctaatccttgccaaggaatgcctaaagttgaaggcttgattccagaagaaaataaaataacaacagcactacctgtaattaacatatattgcctgtttactgtgccaggcattatattaatcaggttgcatgtattagctttgttaatccccaaaatcactttaaagtaggttccattgttgcccacattttacagatagggagccattggaaaattaagtaacctgttctaggttatatattaagggatagttccaagattttgaatctaagtagcttgtcttcagagtccttgctttcagtactatattcaactgctaaataaagcttcactttggtttttttgttttgttttgtttttttgttttggagaaagtgtctcattctgttgcacagattgcaatgcagtggcgtgatcacggctcacttcacccttgctaggctcatgcaatccttctgtctcagcttcctgagtaactgggactacaggcacacactaccacacctggctaatttttttattttttgtagagatgaggtctcactttgttgcccaggctggtcttgaactcctcgcctcaagccatccgcctgcctttaactcccaaagtgctggaattacaggcgtgaaccaccgtgcctggcccaaagcttcacttttcaatgtcttctggaatctgaactctcactgaagagtagacaggagtttgatgttttaatctattaaaacttctttgtacgtgccttctaagaacagattatattcaatgcaatttttcctgaaaagatgaagtacatttgtttgtaaaattcatgtatgtatgtatttatttattatagtacatatttatggggtacatttgatattttgctgcatggatacaacatgtaatgatcaaatcagggtaattaggatatccattaccccaaacatttatcatgtctttctgttggtgacatttcaaatctccttcagccattttgaaatatgtaataaattattgttaattatagccaacaaaaggcattattgctagtacagatatttcttgacttatgatgggttacgtcccaataaacccattataagttgaaaatatggtaagtcagaaatgcatttaattcactctattgttatctacccacgtgattgtgtggctgactgggagccacacaatctctgtttaccattatgaagatcctattgcttcagaatgcaaatgaaatttagagtgagtgccttgtgaatcagggaggccccactatatgactccctgtgatctcttggaggtgaaagaatgcacaaatttcataagttaacctgaaggtcacccgcttttccccagttacattgtacatgccatcaattagtagggggtgggcagaggtggaagatttcaggcacaggccttagacagttgatgccctctgttattaaggtaaataaatcctagcagttcttcccaccttttgcacatcatggcatgcacagaaagttgagattggaggtgatccattattgcttgtaacccatttccaacacacttgtttggaagttctttttttttcttttgagacagggtctcattctgttgctggcacgatcatagctcactgcaacttcagctcccgggatcaaactgtccttccacctcagcctcctgagtagctgggactacagacacatgctaccatgctcggctaatttttaaaaagttttttagtagagatggggtttcaccatattgcccatgctggtcttgaactcctggactcaatcagtctgccctccttggcctccgaaagtgctgggattacagctgtttggcagctctgctatggggatatatctgcaagtttctaagcttgttatatttatgaaagcattctgtacattacaaggtgccattcacatgtaagattttattaataatgactattaagaccaagctatttgttctaggaagagacattgtgtaccatgattttttttgttgttgttttgggagctgtcctgagagaagcaggagcagatgctagaccagttgtggagttaaggtcttgtatgtgatctggtgcagtaatgaggagaagtagaaatgcaggtggtcaagggttatattatccaagacttcttacaggaaaccaagcagctggtgagatcctcattaaattctctaccttcttctctgcctatcccagttctctctgtagtgaaattctgctttctttgtcaagtctttcccagactttttctacctcttctcctgtaggtgaaggtcattcaccatcctctgtctgttgttatacctggtacatagctccattgcttgtacttccaatgctgcattgttttcagttccacacatcttttttcctttttagactgtgatctccttgaagtttaggctgtgtctgattaatccttgtagctccagccacacccagctcctttcatcacactccctcgttaggcatggcttgaatgctctttgagtacagctgaaatttatctccctgtgcctttctcccgtgggtcctcattttaacacctgaaacagcttcagataaagttacttttatgccagccatttatacatctgaataatctgccacgtatggctccaaacagtctttatttctctgagctaaacatttttacttttgtaattttgttttcctgattttttcctcagtaagtactgtatatgttccctttacctctctggtgcatagaatcttagaatgttaagatttggagaggactagagtttgactagtctaggttcttcatctaaccagtattgcttccatactgattacataattgaaactgagatatagacatattttggagcaacacaaatattttaagtatttcactgaggaagtttagatttagtaaatttttaaaagtccttcatcgttcattcttcattaaaatgtatttgctgatgagtatcttattaaaagggggcacattggaaagatatgttttatgatgcagtgcatgtatgctaaagaaagatcttcagattcttataacattcttattaagaatttgattctaaagccaagctacctaggcttcaatcctgcacctgccacatactaggtgtaaattacttaatcttgggttaattacttaatctctgtgtgcctcagtttctgtatttctaaagcaaggttaatgataaggtgggtgttaggaggtttaaatgagttagtacttccaaaccactaagagttatgcctggcccatagtaaacatttcgtatatggtagatgctgctactgctgctgccaccaccatcactgctactattattattattattgagttctacaagcatctggtgagatgtgtaaagcccctgtgaaagttctcatagaaccttagtaagacaccatgtatttatgatacaagcttcttgcctttttaaaaattttttattttatttaaagcttcttgtcttaatgagagaccctgtataccactctgcactgaaacatgatttgacccagaccgtaacgacatctatggagtaataaagtattttttcataggattttaccgtataagcaattgaagaaatggcagaagacccattagcttttggagtctgttcctttgagaccaacttgctaggaatccatttcctatctttttaaaaagagtaaattaattttcctcattgacattctgtaaacagaatactggcagcttatattttatggaacgtaatgttttaaagtgaacctaatttttcttagtaaactgcttttaataatgcatcagagtaatttttttccctctgttgtcaggttgctatcaagatcatagataagacccagctggatgaagaaaacttgaagaagattttccgggaagttcaaattatgaagatgctttgccacccccatatcatcaggctctaccaggtaggatcattagtgtatagcagatagctgcaaagaacccagaatattgtatgtatggctccctttgaagaaatgtgggtgggtgaacatctgtgactttttttgtttctatgttaatcctgctatctttcctacccttctgtttacgcgctcagcacttagtatcctcaagtttcccctggccatttactagtacgttttccttacccaggtaggtctttttaatttgttctttaaaatttgatgccattcttagcaacaactacacaaaatgttaattcagaagatgatgagaatttattttatttagttcagagttctaacacaggatgggaaactcaaaaagaagagaatttagagaggtgaaaagttagagatgaatataacatttttttaatagcattatttgaatactagtttctgtgatcatgttataaattgttatggcaaaggactgcttcttggatcaatcaaaacctacctcttttctattctaataggattgtagacttagttttccaaggtagtaattattttgataatcaagagaccagatcaagtgaccagatctctccaataggagagatttctattttagttttttttttttttggtcttcccaagaaacatgcatatttcatgccatcatcaaaatgattccctagcataactacaaaagcagtaaatctgatggctggaatttcaagcgggataggaggagaggaccttgccttagcaggctggtgaaagagatattttgggagaggtggggcttcgggatgcttctcaaattgcaatgtgttggcagccgagaactttgcctctgcataggcccaactctacttgctgctttctgccagaacagccatctcttagttctgaaggacgtggccacccacttggttattttgctgctgttagtctgcagtaaatggttactggcccagacataggaccatgtgtaaaagtggagaaagtacacccaaggctctatgggcaagctttcgtagcctcttagttttatggaaaagaaaacatgttgtgatattaacatgtgtggttaaaactacagcgttagagctcttccctggcatcagctgctcacataatgaaattaggtcaacaggagcagacctgttgaaatttatcagcctaaattatgttgaacaacgcctaccttctgccccacaagcaaacttatgaaagcttcctggtgctgcctgaagacctatatctgtgagctcacaggtgtctaacctcagcttccttcctatcctgatgggctgaataaatttcttgaccttaccttttaaaataaatcatctttaaataattgtggggcttaggctgacctttctcaagaggttgacttatagctattacccttgtaactgaattctgcaagtttgcctgtcttacccaagattagcctatgaggatttccacaggtccagtgctagctttgagcagtgccttctttcaagctttaattttgctttctggcagctgggttttttaaattttatttatttatttatttatttatttttgagacgaagtctcactctgttgcccgggctggagtgcagtggcatgatctctgctcactgcagcctgcgcctcctgggttcaagtgattctactgcctcagccttccaagtagctgggatcacaggcatgtgccaccacgcccagctaatttttgtatttttagtagaaacggggtttcactgtgttggccaggctggtctcgaactcctaatctcaagtgatccacccacctcggcctcccaaagtgctgggattacaggcgtgagccactgcgcctggccggaactgaatttttaattgtatttagttttaattaatttaagtgtaaaactaaaaataattttaaaaagaattgttgaaatgatagtattttggatatattggggtaaataaaaagtagtattagaattatcttcaccttttcctttttcctttttaaatgtggctactagaaaagttaaaataatatatgcagttcatattatatttctattggacagcactgttgtagaaagatatacaataagcagagaacagtgttcctctggggattgagatggaggagattgggaagaggaaagcctttggtcttttgttttataatgagtgtatgtaatcattattacttttaaaaatgtttgatggaaaatgtaaaaaggaagaaaggactgacaacatactacaatgaattttaaaaaggagcaacaaagggaccaagacaaaacacaaatcacttacgttactttaaaaggttgagtattttaaattactgttctctttttttcaaataaatgggcagtggaaaggaaagttgtcatttctataaaaaaaagaaagacatatgtgatttctgtggcgttcttatgtgactcccattattttccccaaaggcttctttttgctttagtttttttttttttgatttgatagggcatttttgtgcttcagatgattgatgttgaatctgaagtttaagttttggttcttgacaacttctttgcctctcagttttatggagcttaagagattgcagagacctcatggaacatcaaaaagcctatctctctcaagcaataaatgtttcctacttttaagaacttggaggaatatctaattttccctttcttcttaataacatttatatttgtttccccaaaaatgttttaaattttctttaatctatagtggttattaatatttcaaatgagaaaagaggagtcattagtttatcttcctgtatcagcctgtcatttgtgtcactgtctgtcactttcctgcctttgcaccaggttatggagacagaacggatgatttatctggtgacagaatatgctagtggaggggaaatatttggtaagtacatttattgcattctttaaacagctattgagcacactatggcaaacctaaaatagctgttcagtgcctttgtcacttgagcagcagtcacttgatgctgttcttcaatcctgccattttctatcaacaaaggcattttaatttgttttgattaatctagtaaaatccctttaacacatttgtttccttagcaaaggtgttttgtttatttcagtcaggcgctgacagttgagattaaagatctccaaaaacaagcatcctttctgaacgtgggacttagggtctttcctgtttgcaggttttaattgaggttaccaagtgcgacagaactcacacaagtgtgtgggcctctgttgtgtcagaaagagccacttagagcacataatctcacccgagtgcgttccttaaactttgtttaaatataacatgtaactatattatttaccatgtgttcacagttcccctcagtaattcttgtaattttgggggttctgccttcagtagctatattttcctctcacacttagctttagcacaatgtcagaaataagcaagagactttgttactgacaaatctgatttttaagatgctaaaaactgacaaaacgattttttttctaacagtgataaatggagccaagtagagttaaagggtaaacttccaaatctaaattgatgtgtcttttattttttcttttggcaactaactacagagaaaagtttctttatatactttatttgtctaatttcctcattttaaaaaaaatttatcaatatgaacacttgctagtttaaaattttttaatttttattttaaacatttgctccttcctgcacgataaaatgtatttaaaagcatagaatcacttttaaaatgaatcttcttattaatgactagtcagttgtggctgcatggatgtgtgtgtgtgtgtgtttgtgtttttaaagtttccctagcgatctagtgtttttttgtgtgtcaaagtatctttagggtaagtgctagtcctttttaaaagaggtatcattatttcttaattttatatttaattggctttgtatatgtgattagttaatgtcaaagctaatggtgatagaaatttatactcaatatagtatgggaggggatactttattttaaagaaatgaaagcattacaagatttgaaggatagcattgtttgtcaagaaggtatagtaggccttcactatgtatgataattatatgccaatcatgtgccttggagatgctgactcaattaagacactggttttcctttccgtggagaaatctggtggaaaacagacagggaaatcaacatattactttgaagatgagaatggaaactgtaaaactctgtatagtagagaacagtagtgcagatggcagtttggttaactcttggagatcagggaaatcttcctggagggcatggttatatggaaatttatgaaccagaaaatgaaagcacaagagagaatatttggagagagagaaatagcagtcatgttattgggagactatactatggtctgacattccaggcacatgttatgataaacctgccttaattaagatcacaaatgtatacaaaggcaaatagaaaactttcattatctagataaggttttttctttggacaaggtattgctctgctgccctggctggaatgcagtggtgcaatcctagctcactgcagcctcgaactcctgggctcaagtgatcctcctgcctcagccatctgagtagctgatactatagctgtgcactagcatacctggctaatttttaaatttttagtagagacgggggtctcactatattgttcaggctggaagatacctttttacaagttttattctataaaaagtcaaacatctcccaaatccttgagctgcctgttaggtattttatttcatagaacgacatttattggtggggaaacaatggtaatttggggagaaaaaagatcatgtcatcttaatgtttgtaataaaaaaagacccaaacacagggcacatcaatctaccttactctttaagaaagcagattttatttatttatttatttatttatttatttatttatttatttattcttttttgagctagggtcttggctctgttgaccaggtgaagtgcagtaacgggatcacagctcagtgcacccccagcttcctgggctcaagtaatcctcctgccttagcttcctgagtagctgggactgtaggtatacaccaccatgccaggctaatttttaaatttttatagcgattaggtctcattatgttgcccaggctggttgtgaactcctgggctgtagcaatcctcctgccttggcctcccaaagtgttgggattataggcatgagctactgcacccagcaggaagcagtattagagagatccgtttcttggtcctggacttcatgtgaatgtacctcaagggatgaacaaacagaataccacttctgataatgttattttaaaaacaaaatattttaggttggtgaaaaagtaattgtggcttttgtcattgaaagtaatggcaaaaaccgcaattacttttgcaccaacctataattatatattgtaacacatattatgtaatatataacaatagaatttgaaatgttattattgatactattaagtaatattattataaaagatccagatgtggaagaaaatagtgtattacctaaagaaattattgagactgcacagggatagaactgtctcatgagctctgatttttaaaaatgtctgtgtaaaaaagatgaaaggggcttagtcaagaaaacctgggctttggatgtatttagacctaggtttgaatcagatctctgtcacctatttgcccttttacttagagcaaattactagatgattctggtgcacaggttccaggtctgtataaggtaagatctagaatatttgtattatagttgtgaagattaaatgagatcgcatatatagagctctagcacagtgcttccttacgccttcatgtgagagagagatcaacttctgccgtcaaggtgtgaggagctctgctgacctgccttgcttgctgaaacaagtgaaaactattaaagaaaacaaaacccagtcatttaaagtctctggaaatcgtcctaagagtaagcagaaaatgaaggaacattattcaagaacatctgtgcaaattcggtaagaaacaaagtctggtcagcaaggtggaaattcccgtccaggctactgcagccaagaacgcagggcttccttctgtcaaaagacaaaattgcaagtttagtttgatgatcccagttggctttatttgcgattctagaatcggacaacatttcatttcatagaataagtgttccagtaagttgagcagaagagtttggcttatggacagaagggcttaagaagtctgaacagtgtattggttacttttaaacagaacaatagaaaattaaccagttaacatcaggttacttcgggctaccttttttagtaaggattaaagcagagggaacttcatcattgtgccagttaaagattttagactgggctgtttgggaaattggctgttatctctttctcctgatttctcaggtcagataacaacctagttttcgctttggaactttagcatgagtgactccattttgatatttagtttggtctgttggtgcctagtgcagaagtttattcgaaaacaatggtctcctgtaatttttatttgtcacttctcctcaattctctccagcatctgaatagcagctttcttcccaggaggatttggacatcagcaattctcattctgccccgagctgcctattgctgagtcctggagaagtgcagttaagagatgggggccccttcttctactcagcccccacttgtggaacttgatcaggtatgccgagaatactaggacccagatcactcttgccttgggtattaagacagtggtttcactgtcttttgctgctaggagaggcaagctgagaggaccccaggctgctgtcctcccccgctctccatccaccaaactctcagttcctagagtgggagcgtcactcagagaagtttgctgttgtccccaaccccagctccagagccctaactctgagatttttacctgtggagaaaaacaaaccataaaacagctcctaatttcttcccaaaggaactgacttcatttgcaacagggagtgaagaagttcaaacctgattgtactctcaagaacagtagagggaaaagaaaaaagaaaaagaacagtggaggttgtggtaaaggacatttgagaagagattcatgaaacaggccaaatggtaggtttgctagttcgcagggggagaaccaatgaattaatttagaaagagcttctctgggattagaatgaaaataaatcactggctgggtgcacacctgtaattctagctattcaggcaggaggatggctcgagcctaggagttggaggtcagcataggcaacatagggagaccctgtcttaaataaaaacaaaaataaaacaaaaaaacactgatggcaaaaattatttcttcaaaggaaccagaatttgattgtattgtttgtagaccaatttgtgccccagggcattattcaaaacaaaagggcaatcagccagcaactagtggagtttaacggctgagtatggtcagtaaatgagaggaagaaagtcctagcaaaaacactgtgatcccaaggtaactaactgtaggcataccgaagctgcctgttccagaggaatcacattagaggctgaacactgtaaatatggagaaataaacttcactagaagaatctagcttttagctgggcatggtggcatgcgcctgtagtcatagctccttaggttattgatacgagatctttctaactgtgggcattttacagctataaatttctctctaagcatgctttggctgcatatcatgagttttagtatgccgtattttcattttcattcatttgaaagtattttctgaattcacttttgatgtcttgtttcattatttatttattagtgtgttgtttaattttcacatatttgtgaatttcccgaatgtttcctactcttgatttccaatttcattccattatagttggttgtttttctatcctctatttcataatttctgctataatatttgttatttccttctttctgcttgcttcagttttagtttgttcttcctcttctagtgtcttgaagccaagcagaaagaaggaaataaagattatagcagaaattatgaaatagagaatagaaaaacaatagaggatatcagtgaaaccaaaagatagttctttgaaaaaatcgacaacattgacagatctttagctagattgacgagagagagaagagaaaaagagaagactgaaatgactagaatcagaagtgaaagaaaggaacattactacagtcccttaagaaacaaaaatgggctgggcatggtgactcacgcctataatcccagcactttggtatgctgaggtgggaggattgctttagcccaggagttcagtaccagcatggacaacatagtgagacctcatttctactaaacataaaaaattagccggatgtggtagcatgagcctgtggtcccagctacttaggaggctgaggcaggaggatcacttgagcccaggatgtcaaggctgcagtgagccatgattgtgccaatgcatttcagcctgggcaacagagcaagaccctgtcttaaaaaaaaataaaaatgattataaaggaatattatgaacaactatacatcaacaaatcagctgggcttggtggctcatgcctataatcctagcactttggggggctgaggtgagtggattgcttgacctcaggagttcaagaccagcctgggcaacatggtgaaacaccatctctacaaaaaaaaatagaaaaattagccatgcatggtggtgcacacctgtagtcccagctactcgagaggctgaagtgggaggatcacctgagcctaggaggtggaggttgcagtgagctatgattgcaccactgcactccagtctgggcaacagagtgagaccctgtctcaaaaaaaaaaaaaaagtcagcttagatgaaatggacaaattcctagaaagataccaactgttgaaacaactgacttaagaagaaatagaggccaggcacggtggctcatgcctgtaatcccagcactttgggaggctgaggtgggcagatcacgaggtcaggagatgagaccatcctggctaacacggtgaaaccccgtctctactaaaaatacaaaaaattagctgggcaaggtggtgggcacctgtagtcccagctacttgggaggctgaggcaggagaatggcgtgaacctgggaggcggaacttgcagtgagccgagatcgtgccactgcactccagcctggacaaaagagcaagactctgtctcaaaaaaaaaaaaaatacatacatacatacatacatacatacatacatacatatatatatatatatttccctagctaaagtaaaaaatggtgttctggttgcaaattgatagtctttacttcatttgacctctttgtagcatctgaattcttgactgtttccttctaaagctcttagttttgacttccacaaatgttcaacttctgattcttctattgttcggactgttccttcttagtatcttttgctgggcctcctttctctgactgctagaacatgttgacatgttgtagcatattctctgactttatatatatatataatatataaataataattatatataaaatatataaataattatatattgtatataaataataatttgtatataatatattatatataaataataatttatatataatatattatatataaataataatttatatattatatatatatttttttgagacgaagtctcactctgtggccatgctggagtgcagtggcgcaatctcggctcactgcaagctccacgtcccaggttcagaccattctgcctcagtctcccaagtagctgggactacaggcactcgccactatgcccggctaattttttgtatttttagtagagatgggttttcaccatgttagccaggatggtcttgatctcctgaccttgtgatctgcccgcctcagcctcccaaagtgctgggattacaggcgtgagccaacgctcctggcctggctagggaaatattaataaaatggcagaggtggagacagatgttaaagaagtggaggcattgggtgctattttgagaagcattgctctgaaggaaagaagggagaagacagtagtttgtacaggaagcaaggttgttgggagagagttctccacggatatctcacatttcttcatgtttcatgagtaaggcactgactgcctttgttctagactgttttctcaaggatgtttatatagtgagcacccttgaaagacagagatagtatctccctccacagctcaaagatctgtttattgcccagtgtgaaagattccctaagctccaagctcagggttcctctcctataatggacccgactgtgtgtgtaggcgtcatctggtcccctttgcagtgccctgtgaaaattagggcttggggaactgaagcaaatatgttgatgttcatgctgcttgctgtgccgtaagtgacaaagtcttttgtctctgacagaggggtttcctatcttctgccatcacccatgtaattgtggcaggttgagttattagcttgcagaaatggtgagatctcagaccctcttgatacttgacaggaaataaggaggggtttgttttattttgattcgtttaaatatgagacttgattacaggttgaggttgaagatgcagtagtggggaagatgagtttgaaaataattgatatggaaaacaatctctaaagcaagatcaatgaggaactgagggatgagcataattgcaagaaattagccttgcacatgaagaaggatagaagataaaggatgcatgtgggtgtaggcaattttttaggtagaagaatgtgaaaaagatgtttcatgcttttcatataattttctattgagagtagcagattatgttatcagatgaattaagggtgagagggtagagacctggatcagcatggagaaagtgaaattagctgcagggaggaatgagagagagggcaattaagaatagctaaataagttgattaaaggccttagagataggaaacagttaacttgttattccattatacagaattgagtgatttttttcccctaccaccaatgctcaattacctgtgtgtaaattgaataagacagacaattggactgatcctgtttagagtttacaggacatgtgcaaatgaagaggcaacaggtgacaagggttttgaggccactagcaataatgtaattaaagtgtgggcttttgggcttaggctgaagtgggttgggaaggcaagtgagaccaggatgactgatcttaaataagaatttttaaagctggctgggcatggtggatcatacctctaatcccagcactttgggaggcccaggcaggcagatcactggagcccaggagtttgaaaccagcctgggcaacatggagaaattctctgttatttaaaaaaaaaaaaaaaaaaaaaaaagaattcatgaagctacaggtctagatgaagttgaaaagcaagtgtgttagtgtgttgggcatatgaaggttggagagatgaaagtctaaaactacactgcccaacacgacagccactgtccacatgttgctgttgtgctcacgcctgtaatcccagcactttgggaggctgaggcgggcggatcacgaggtcaggagattgagaacatcctggctaacatggtgaaaccctgtctctactaaaaatacaaaaaatgagccaggtgtggtggcggacgcctgtagtcccagctactcaggaggctgaggcaggagaatgttgtgaacccgggaggcggagcttgcagtgagtcgagatccagccactgcactccagcctacgggacagagcgagactccgtctcaaaaaaaaaaaagaaaaaagaaatgtagctagtgcccctgaggaactgagttttgaatttaatttacatttaaatttaaaaactgaggtattatgaaaagttttaggccagctgtgagagttagccaactacagactaagagagcatagtctccaagatcacccctcactctgctgtcacctacaagttcaggaaattcccaaaaccggttcagtttgataaatagctagaaggattcacaaaattcactgaaagctaatatactcccggtttggtttaatacaggtaaaggatacagattaaaatcagccagggaaggaagtgcagagtccaggagaagtacgaaatgcagaacttttgttgtcctttccatgtggatacaagatatgttacactcctggtattgatgtgttacattgtgtacagagcagtacccatcagggaagctcagcccagcctctgtgttcagtgtttttattttacataagcctgattgattgattgattgattgctcacatgattgatctgtgtgtctcggtcaactgatgctcgtgacccaaagcccacacgtcaagtcacgctgttgtgcagccaacaatgtatatccagcctctaccctgagactatatgggtgtggcgaatcccagcctaaatcatgttattagactctctggcatgacccaaggctcccagacagagacactccgagcagacataacattccaagaacccagagactgcttcccagaagccaagggaaggccaggccttctctttgggtaaggccaagttcttcactctgcagagtctaaaatatttttctattaaacgcaactcttattttgataaaactacattacaccttggctatagacaacttagtattttagttgtgatacgcttataaagtataaaatacacagtggattttgaagacttactatgaaaaaagaaggtaccctatctcattgctattatttttattgattacattctgaaatgatcttttgatgtatttggttaaagtaagttactgattttcaaaatgagtgctttttttttttacttttaaatgtgattacaagaaaatctgaaattatataaatggcacacattgtattttatttgatagtgctaatttagaaggttaagataagagagggggaagtttagaatttcagagttaaaataatgtcaagcaaagacaagttcaagatgtggccataggaatagttgctatacattggtagagttctaggtcaccggagagaaagaaggctaaaggaaccatgaagcaaactgtcaaataagttatcctcattgatgttcacattccctaggtgatggcagaatttgagtggagggcgcaatagactacaaactaggtttcggtgagtgtctttgatgaatgtgaaggcaagagaggcagaaagggagtataccagctgcccaaacatatggcgtagtattgttagtggagaccttgaagaggttacattaattcctaatccctggtggaatattgtccctttttacctcaagaggcctgtaaaggaattgctagtcttagaggagttggttggaaaagtgattatcaatgggaggtgttggccccgatgtaaaagccctgctgcccttctttgccctctttgtccctccttaacttttgtgacccatctcaaatgttattccccctgtgaactctgctctgattttgccaaatagctaattacctttttttcttcactttgaacatacctctcctatagcactttttgaagtaattttttttttcatttctaagtttgtcttttactggtaatttagactctggtccatttctttttcctttgactattttccaaggggcttgattgaatccatgaatgtggtgcccacagatagagagggaagactatatatgctgaattcaatcacttatcaccacctccataactaccaatctggtctaagccaccatcatgtcttgctaagatcactgcagtagcctttaaatagtctctctgaatctgccctgacttcccccccgattatagctagaaggattcttttaaaattcaagtgggaccttaccactgagctacttctgttggctttcccatctatttggaataaatttataattcctactatagcctataagattatataatttggtctcctgctgtctctcaccacagctcctagcactctcctcctcacatcggcatctttctttttcattaaacccttcgctgtgctcccgctttaagaccatatattccatttcttcttcctgaattactcttttcctacatatccacatggctgtctctcctgtttcttgccagtctcttatcaaatgttatctcattagagaggtgtttgctcaccatgctgtctaaaatctcattcttcctactggcccattgctctgtagtctctgtcttgctttacttttctttttggtttttatcatgaactgacatatatttatttgtttttttactgtcttgagtcaataaaatttacgtgccattaaagactttgtcatttttgtttcctaccaaatcttcaatactcaaaatagtgcctacagggaatgcatgttccataaatatttattgataagttgaataaaatactaagtgaatgaaagaacatcactggattgctgattatggcgtttaagttttattcatctgtgtcttccttgtttaatgtagtgtctaacatatagtaggcactcagtaaatgtatttcattgtgtcataatgaaatataactaagtcaagcatggaatttgcatgttatttaataacatcttagttaaatgagtttttgacatggggaaagcaccttttttgggtaactgtatagagaaagacatattgaagattatgaattctaagcagtgtaataaatagacttcagtaattggttatttcatgaatatttactactcattcaattgacttatccagtttatttttgcatactattcagccttatattatgaaggagcagtgatgacagtgtgggtttatttaatgttacaaacagaattgagaaactggttagttttgtaaaccactaaatttataatttaaaacttccacactctgatatctttagatatatatccccaaacttcctatttgagaccatgaagtcataaatccagcactttatcaagcaaaatttcctgaataccaggcagaactcatgggcatttaaaacaaattactaatttaagaggagtctgttgaaatgtgtatgatttattatgaacattctcagtgtcttaaaaataatatttcttaatggtgccaacatgtatggaaccctgaacttctcacaaagccattcatttatgccataggtcactcaaaaactattaggacagaggatcagaaagactaacttgcataaccattgtgtacaagatactgtgttaagtgtttcacataggttattttatcttgtgactgcctggaagttcaagaatacaacacatttgtttgaacactactatgtactggtttgttgtggctttttttttttttttacatgtttttatttaatccgcagcatcctttatgtcttcacaactaaactaccattttcccactagtttatttactcctttgattattaaaaaaggtattttcggccaggcgcggtggctcacgcctgtaatcccagcactttgggaggctgaggcgggcggatcacgaggtcaggagattgagaccatcctggctaacatggtgaaagcccgtctctaccgaaaatacaaaaaattagccgagcatggtggtgggcacctgtggtcccaactacttgggaggctgaggcaggaaaatggcctgaacccaggaggcggagcttgcagtgagccgagattgcgccactgcactccagcctgggggacagagcgaggctccgtctcaaaaaaatcaaaacaaaacaaacaaacaaacaaacaaaaacttagctattttctaagggtctcctaacaagcaagtaaccatgctactgaactttagtcactctgaatcaaaataattgacttgtatttatttccctaattaatttcccatttattattattcattttttgttctgttttcttaatatcagatatgactaacatttattttatttatttatccttttttttttttaatgcccccaccaggagtgtgcaagtggagagatgcatggatgaaggaggggagctggcgggggtgggtctgtgaccagcatttatattgtaactggccaagatgtatgaggaagccacctgtgctttgacctcactttacactaaaacattcatttatagtctgatcatccagtcatttctaccatgacataaaaataagagccccagagaacaaatcaaattatttttgctgtattgagtatatataaatcccaaagggccaggcatggtggctcacttctgtaatcccagcactttgggaggctgagatgggcagatcacttgagatcaggagttcaagaccagcctggccaacatgttgaaaccccgtctttactaaaaaatacaaaaattagctgggcgtggtgacacacgcctatagtcccacctactcgggaggctgaggtacaagaatcacttgaatatgggaggcagaggttgcagtgagccaagatcgcaccactgcactccagcctgggtgacagagtgagactctgtctcaaaaaaaaaaaaaaaacaaaaaaaccttaaaggaatatttttgcctggctcctacattaacatttactttctctgaaaatcataaccctgtgtttgttattatccagtgtctacaaacagcccagcttctatagttaggtaaagtaaattcaatatcagttgttctttcataatcaaaacagaagtctacaatgccattcttacatacaacagcattgacagtaattccttactatcatgtaatagccagggcatgtttagctttctgcagatgtttcaaaacatcttcttatagtttgtacaaattacgatgcaagaaatccatacatccattgagttgaaaaatgtctaaattttttataatctaaatttttaaataatctgtgacaacctcatctcttccctacaaacatttactttttttctatgctatctatttatgtaagaaactggattgtcttaaaaaatgtcctacatttggaatttggctgatcatatatttattgtgtcattcaacatgttcctgtagttcagtgtttcttggaaagtggaagttatatttaggaatttgcttagttcagtttttggaggggaagcaggagtgctccatagttttttattgcatcacttcaagagttgtataatatctgattttcccacttttagtgatacttagaataatcttcaggtatagttattgttcaccaaattgatcctttataaagtttcccatcagtcttttacgtaatgttttatctactcctgtcatttagttgcctagctatttcattagaagttgcaaggccgggcttggtggctcacacctgtaatcccagcactttgggaggccgaggcaggtggatcacgaggtcaggattttcagaccagcctgaccaacatggtgaaaccttgtctttattgaaaatacaaaaattaaccagccatggtgatgcacacctgtagtcccagctacttgggaggctgaggcaggagaattgcttgaacccaggaggcggaggttgcagtgagctgagtccgcgccattgcactacagcctgggtgacagagtgagacttgtcttaaaaacaaaacaaaacaaaaaagaagttgcaaaatggtgattatttgaattctctcattcattcaacatttatgagttattcttcttctgtaaagaactttgccttataaactacttagaaattatagtaatgacaagataaatgcttgattctttcttttccttatgtatcagtttttagaataatgaattggttctctgcaatctccagtggagactaaggaagttggttttctattttgtaacataattatgcaattatggattttagtatattttatgtgcttcagtccattaagtcattcttcttttgaaactgaaattattccacttagccagtgggagcctggagcctcttcaggctgactcctgtgtccttttgatgtgagctcaatagtctttgatatttttgttgcttttaggcaagatgtcctatgcttatcttgaacatttcctgtaccagacatggaatcaaacatttctcctaggaattctggtttggtctcctctcctctcctctcctctcctctcctctcctctcctcccctcccctctcctctcctctcctcccctctcctctcctcccctcccctcccctcccctcccctcccctcccctcccctccccttccgtcccgtccccttcttttcattttccttttctttttctctccttctcttctcctctcctctcctctcctctcctcccctcccctcccctcccgtcccgtccccttcttttcattttccttttctttttctctccttctcctctcctctcctctcctcccctcccctcccctcccctcccctcccctcccgtccccttcttttccttttccttttctttttctctccttctcttctcctctcctctcctctcctctcctctcctctcctctcctctcttctcccctcttctcccttcccctcccctcccctcccctcccctcccctcccctctagatagagtctcactctgttgcccaggcgggagtgcagtggtgtgaactcagctcactgcagcctccgcctcccaggttcaagtgattctcctgcctcagcctcccgagtagctgggactacaggcacacgccaccatgcccagctaatttttgtatttttagttgagacggggtttcaccatgttggccaagctggtcttgaactcctggcctcaagtgatccacttgtctcagcctcccagagcactgggattacaggcgtgagccaccgtgcccagccaactctggtttctttaaatggaaaatagcatttaaagaccagaatttgggcctcagggatgctcgttagtgctactgggttattattgcttagaggaggggacagagctatgaaatatatatttttaatggagaggaaaatgaaacaagtttatactaacactccaattaaaatgtaagatttcagcatttttacttcttaaatattatatctttagttctcttttcccttatgttgaaaattgtggttccagatgacgttaacatagtcacttttttgatatgagtgaggggagagactgattgattgaaaacaataccagtagtattacaaataataaggagacttgtggttctttttgttcttaggatatatcccatgaagaattgtcttagtctatttgggctgctctagcagaatacttttaactttatgtatagttaggtattatgtaccgtaatctactgattttttacaggttgctttcaatttttagaaatgttcttctatttgattcaattctgaattgtttcagttatgtaagacattacttgtttccaaagttaaagctacaaaacaaggtgcattcatatgtctggcttccacaccttttccgtaagtaaccatttatttaacattattccttttggcaaatctaaataaatatatgcatatacatacacatgcatatttgtattttcccttccttcctacacaaacagaaacacactctacatatttttctacgtcttgcagtgcttcatggatataaacccatccatggaccaaaaatccatgggctaggagggaagacacacaagataagaaattactgtaatataattgtttgctgatgtcatagaggcagatagattaaatgtcattagacacaaattatggagcagtttttctagggcgggtgagtaggttagggttagcttcagagaaatgacctttaagctggactttaaaggataaccttgaattccaaagttcagctggggatggggatgagaataggagacaggcattccagcaagaagtaaaaccctgagcaaagtgtacagcatgttggtgaaacagcaagtacacatgcaggtgaactatgtttatgaattagaactatatattgtaggctgtgagattttgttgaaaagttctaagttaaatgaatgacacgaccaaagaaatgtgttagaataactggtaacaatgtaaaggatgatgggcagaaagggaaacctgaaggatagagaagaggaggcatactctttaaatgtaagtcgaaaatttagcgtattttgtaagtaattggatgttaagagtgaggaagaaagaggagttgaagatgattccaaagtttctttcatggacatctagatgatggtaatagggattcaggaggagaactaggttacagcaggaagataaagagaacgttagttcaggccaggtgctgtggctcacgcctgtaatcccagaactttgggaggctgaggtaggtgcattacttgaggtaaagagtttgagaccagcctgaccaacatggtgaaactccgtctctattaaaaatacaaaaattagctgggcatggtggcacctgttgtcccagtgacttgggaggctgagataggagaatcacttgaacctgggaggcagaggttgtgatgagccgagatcacaccaccccgcttcagcctggatgacaaagtgagtctctgtctcaaaaatgcaaacaaacaaagagaacgctagttcagtttggtccatgttaaatttagatatctttcaaatttttttaaattataaaaataaagatgggatctcactatgttgcccaggctgatcttgaactcctggactcaagtgatcctcccttcttggcctcccagtgtgctgggatcacaggtgtgagccaccacacctggcctaaatttagatatatttatgatacctagatgaagtttttcagtagacatttgaaaacaggagtttggagctcaggaggttagatgactagaaacagtgaatttggaagccattagccttatgtattggcattagttaccatctcatgctacataaaattccctggagacatgtacttgagctgttccctttggaagactagttagagctaggattgcaacattttgatagtcaatattttaacaaatcgaaaggtacctctgttgacttggagcatgcaggttatactaggatctgattagaacctctgttacaggattagcaaaccaagtattgctaataccttggtgtagcatgagaaacattggtactatatgagaaaacttgaataacatttttgaaaggccttttgtaatatatgagattctatttcaaagcctacctgggtttatgcttagtctagaaatactttttaagaagccataagaaaacaaatccttccttatacattactgtgaatggacttgatatgaaaaggatggcatgttttttatgaagacaacttaaaaagtgtgtagtttacaaaccttgtttaatagcaaaatgaagagtaaaaaaagtgtttttgtaaaagcttatagtctcttctctcattggtattccttgagttaatttataataataaattaataagtattaataatcaatataattaataataatttatcattattaataatagtttaaagatagggtcttgccctgttgcccaggctggagtgcagtggcatgctcatagctcactgcagcctcgaactcctgggttcaagtgatcctcctgcctcagcctctcaacagattaccaggtgcataccaccatgcctggctgattttgtttgtttgttttctgagactgggtctcactctgtcgcccaggctggagtgcagtggcacgatctcggcttactgcaaactctgctttccaggttcaagcgattctcctgcctcagcctcccgaatagctgggactataggcatgcgccaccacacccggctaattttttttttgtattttgagtagaaatgaggtttcaccatgttggccaggctggtcttgaactcctgacctcaggtaatccacctacctctgcctcccaaagtgctgggattatagaggtgagccaccgcgcccggcctatgcctggctgatttttaaattttttgtagcaatggggtcttgctttgctgttcaggctggtctttaagtgcggggattataggtgtgaaccaccatgcctggcctaatctataattattaagtatccatcataggcagagtactattttatgtgtaataaggaggcatagaaaaaaatagttctagttccacattttcaaaactaaagcatatcctgtgataatgtgtttcacgaagaaattgtgttgtctcaaaactctcagggaaaaagtttagtttatttggaagagacagaagaaaatttagtatactttttgcttgtatgccaagtacagacttggatatatgaagacaggtcatatatgttagtgtgcctttttagattagttgggaagactcttgaattcattgaggtgagcaatagcatttagcattcattttgctaataaaatctaaggttcaggaaatagttttaataaacagggataggaatgtattcaatcatcttttgttcttttaataaatacttattaagtgcttaatatgcgtcagataccgttcattgtactagacacagtattgaacaaaatggcaagaatgcctgccctcatggagcttgttttctagtggagaagacagatagtacaccaactaagtagggtagaatgtgtcatttgttagaaaatgataaagtgcgtaggggaagtgaatatgaaattgaaatatcaggaggtaagctgacaatagagataggaaagacctctctgagaaggttatacttttgtaaaagatcatgcagctatttggggaggagcattccaagtagaaagaatagaaagaacaaaggccctgtggcaggagtatttctgctgtgtttgagaaatagcaaggtggcatatgtgattatagtagaacaaaagagccagtgaaagaaggtaaggtcaaaggtcatgagctgggaacccatccggaggttttgacagaaaaaaatgatgtgatcttatttaagatttaagagaattaccctgctacatagaaatgcagacttaattgtttgagtgtaggagtttgaggctacaatgagccatgattgggccactgcactccaacatgggcaacacagcaagaccttgtctcttgagagagagagagagagagaggaaggaagaaaagagaaaatgcaaacttatattcatataaaattctatacacaattgtttaattgttgatagcagctttctttgtaatagctaagaactggaaacaaccaaaatgtccttcagtaggtgaatggataaggaaactcttgtacatctattccatgctgtactactcagcagtaaaaaggagcaaatggggccaggtgcagtggctcacgcctgtaatcccagcactttggggggctgaggcgggtggagcacgaggtcaggagtttgagaccagcctggccaatatggtgaaaccctgtctctactaaaaatgcaaaaattagccgggtgtggtggcgcacgcctgtagtcccagctacttgggaggctgaggcaggagaatcacttgaacccaggaggtggaggttgcagtgagccaagattgcaccactgcactccatcctgggtgacagtgagactctgcctcaaaaaagaaaaaaaaaaaaaaaaggagcaaggttaatagacacatcaacttggatggatcttaaggacattatggtgactaaaaatatcaggccagtcatggtggtttatgcctgtaatcccaacactttggaaggcctaggcaggaatatcacttgagcccatgagtttgagaccagcttggtcaacttggtgaaaccctacctctaaataattagctaggcatggtggcagatgcttgtagtcctagctgcttgggaggctgaggtgggaggaggtcaaggctgcagtgagccgtgatcttgccactgcagtccagcttgaatgactctttctcaaaaaacaaacaaacaaaaacaagaaaataaaaaagccaatctcaaaaggtcgccgactgtatgattctgtttatatagtgttcttaaaatgatgaaattacataaatgggaaacagattagtggtttctaggagttagggatggtggggcatagaggaacaagcatgactgtgtaggggtagtgcaacggagatctttgtggtggtgaaatatttttgtatctttttttgatacaaaaaattgaacaggggaaaggcaagatccgtttacacatgcaggcatatatgtgagagtactcagtaatgactgagtccgaatagttgtaattgctattgtagtaattgcagttgttgttccacaaatctacacatgtgataaagtgacatagaactatacatacgcattgtacccatgtcaaattctgggttttgatatcgttctataattatataagatttaaccattggcggaaactgggcgaagggtacacgggacctctctgcactgtctttgcaacttcctgtgaatctataattatctcaaaataaaaagtttttaaaaaaagattactaccttggctgctcttttgaggagtaatcctaggaggttattgcagaaatctaggagtgaggtagttgctgttaaatgaggctggtggcactagagtggagtgaaggcaggggtgagaaatagttggattctgaatatgatttgaacgtagagttaatagaatttgctgatggataggatgcagggtgtgagagaaagagaagaatgaaagatgccataaaagtttttggcctggtcaatggaggagcaaagaaaagagatagtaacaagaagcagcaacaagtcaagaagcccggtaagaggtagttggattcttggcaagaaagacaaaatgacaaaccctcttcctctagtcagtggcagccacgcctgggagttagaggacaataggatattaaagtgactgcactcttattaacctgcttagggggagctgagttatcttggcctcgccctgcttttttggaaagaagcgtttgtttgataaacaggaagtcgtttccatgggtgtaggaagaagaaatgatagaactgagtggcaaagcaaagaactactagctgtggttagtttggaattggcagaagttttttcaggtagtcacctaagatgaagatgagcacacatactgccttttcccttttctaggctgggttcattcttcactgaaatgtggtatttctgcctattgcttgtcctgctgtcagggtatgttcattttcagctagtgttttgcatcaactatgagttgtagacttagcagacaaatggagacactgtctgtttagagtggaaaagtgacttattttaagaaatgttggctccgcaccactatcccattagtggcatacctctgacactccattgaagctggcctagggaaggtaagactggcttctgtgtatttttgctctttgaaaggtcagaacctaaatgtaccacaagatattttcttcctgagtaagattgggacaaaattacaaacagtgaattctgaagcaaacttacgtgctggtgctctaatactttagaaaattcaaaatcgatttcctgtacttctaacaatattactcttcgtcgggtatgtaaatctcttagtgtcacttacttcttttcattttgcaaggaagggcagaccaaaaagattaaagaagaccaatgccaagtcatggtcatgggaaagtgagaaagagaatttaaaagtactttttacttttttttactttgttttactttttacttttgaaaagcacttgaaacaggagaaccattttttttccttttaaccgagagtcacctcatccctgtctgggtacatgtttggagtgaaattgtggtcaaagaaaactttaaatttgtcccagacctataatggcaactaaatagataagtagttgattgatggtgaaaaaagcttagtgtgatggacttgactttatgcagcaggtgtctacttgaggtttgtttagattggtgggggtggggagggggcaggactctagctaggggcatggctgcagtgtggatgattgggatgaggatatgggtagtatttgtgtctcagtatttaggagaggtagttcactgaattgcctggaagaagcagaacaactctggagttccttgcaattggagtttatcctgacaaggttcaacgtacattttactttgcgtattgagtggattcaggagccatttggtttcatttgccttctgaaagtactgcagtatttgtaaaaatgctgtgactatgtgttaagtccaggctggtctacagctctggatttcttcactgaaagttaaatatcacatttgaacttgaagaatgtttgctgcctgcctctagagcatatacgaatataaagcagctatttgtcagcaggcagctgaaaggcgattttcagcagggagtgaaaaccactgcaggctgctggcttcctggcacacccactagacctcgtaggtttacagtgaaagcaaaccaatgggagtaggggttggggggataagatgggcaaaaatcagggcagaggctgaggtctgaatgcgattgagccactggaaggagcttgcatgtgaagagcacagtgctcccaaagagaagaaaacttgaaccctaaacacaatggctaggagcaaatatctaatgtgaacactttaaaaaaaaaaagtgatttgttccgtaagtgtatttagagtccaggggaaaaaaaaaagtgatttgtttatcttctttgtatctataactataggggtactgaaggtaactttggggaaagtattatagtttaagctgtactacccagtgcgctgttacagctaccttttaaccagaaccattaacagtgacaatcgatgtgtagaaaatcacctttaagctctgcagaatcctgaaggactttgtgctctattgactagatgtttaagtattccctatatagtattcagtggaccttttcaaaaatgtcttttgcaacatctttgaaagtgaaagttttaacgtatgatactcttaatcagagtacacgtttattcccaaatattctgttctttctttgggtatagcatgcaacagagtttacttgtatttagaagatcaagaggtgggggtattggcaggataaatgatttgtccagggacaactgatgtgtcactgtagagataaaacagaactaggctgcattccagcagcttctggcccgtataacagttttgagaactttccaatcactttaggaaaacaaggtacttagaaatttataaagactttcttaataaaagaaatcacttattttggaaattgtgaaattaatcattctgcagcatttaagaagcactttgatgtgttctggtaattagtatttactgccagacaaatgtctcttgggcattttaattaatgggtagcttggccaaatgagcttctgatggtaaaccttcataagggtttatttttatgtttctcaagaatagctgtctcttcaaagctctttaattagacaaggtttagcaactaaaacatattattagaataattaggccttgggttaagagaaatagggggtcagaggagcaggtactgttagaaaatggcctcttaaaacatagcattctacctctgatggatggccagttctttcacagcttctgttaagttactctccctagtttggacttcgtgttgtttaaagttcatagcagacctcaccggaagcctaaacacacccgagtgggagcttacttatccccacctctgacctcccagggaaagcttgattctagtccttttaactgctaagtggaagacttcttattttctcctttttcttctattaaatcgataatcttggctataacaatgacttgtatttttgagggagatgcttcaaaagccttgtgtgtggcgaacaaaaattacaataattcctttgaggatctttcttaatgatttatattatctacatataagatatgttcttaaagtgactacagtatttgcattccagaatgttatatttcttgtggtcagaatgcagtttgaattattttgcaatctgctctgtagatgggctggcatctaactccccttcttcaaccttctcccctaccatttcttgccacaagcgctcagtcttggcagttattgctagtaaatatgtgctaccctgaacttcctctttgtggtgaaggaaagatacacctgactggtcctgtgagggagtgagatgtcaccaaaacaattgtgtattctaccaaaactgttgataaatcacaatatatttatctatattccctcatttttcactttcctactgtctcaggatgcttaggatggcaaatatgtccttttcccagctagatcagttgattaaaggacagtgctcatgagactattagacatttctaacagaacaactgtatcatagctgacatttctaatcccactagctgtcatgacctatatgtgttgttggtttgataaagaactgagtcaaagatatgtatgttgttggtttggtataaacctactgctattattagaaagttcttaaagaacctgctaatccatcaaatcatttttgaatattgaggatagcctgctttatagtattatgattttatcacatgtaaattcttttgatataccttagttaacaacatggccaatgaaatgattttatttgagttggtagaaacttcacttggtttttgattgatgttatctgtaaaaattatcattttgtaagaaccatttggtgagccccataaatgcagatataaagatgtaggtatatcgctatgcactccagagaacagttaccgagtaagtgtgtttttatgtcaaatcgaagaactttgagaaagcagaaagatagtaacctaaacagagtgctctgtcgaggagttttctccccctagcagtgacgaatttctgtccaccctttccttaaatgatttaatattggggccttgcttttttacctcctctttaacacaggaaatatttctgatacttatcttcatgtgtgtgtttgctcatgtctgtgcagtcttctgcagtgaggatatgaaaagaaaggtagtgagttctatgacccttgaaaaacaccagaactctcttttcctaatgaaagtacaagtgtgttcttatgcatacttttgtataacaggatttatacttaaaatagtttggatacttattactaatgaattttgatagatgcaaaccaggactatcaatgtgttgttctctcattgctcattttgcctctttaactcactcgagagggccccttgtagccctccttaagtctaccttttgaaattacacaagtgtccaaaatgaaaactgactgtattcttcttcaacacagaccacctggtggcccatggtagaatggcagaaaaggaggcacgtcggaagttcaaacagatcgtcacagctgtctatttttgtcactgtcggaacattgttcatcgtgatttaaaagctgaaaatttacttctggatgccaatctgaatatcaaaatagcaggtgagaactgtactgaggatgtcagatagggacaaaggagcttttccttggggttctataagcaagggattatctgtttccatctcttcagaaagaactattgtgaaagtaaggacaatttaagatgaaaaaaaaaatagcctgaaaattgataaactttaaaagtacttcccctcccctgccctttttttttttttttcgagactgagtctcattgtcgcccaggctggagtgcagtggtgcagtcttgactcactgcagcctccatctcccaggttcaagcgattctcctgcctcagcctcccaagtagctaggattacaggtgcgcatcaccacgcctggctaatttttatacttttagtagagttggggttttgccatgttgggcaggctggtcttgaactcctgacctcaagtgatctgcctgccttggtctcccaaagtgctgggattacaggcgtgagccaccacacccggcctgtttatttttaatgtagtatcagctggaactaggctggggagaaagaagggaaaggtgatatttaaaatactattactttggttaacgggtccttttttacataagaaataaaatatgtaataaagtggaaaggaaaactactaaaattgtataccctctcaccttcacttgagaaggttgatttatgtcactgctgacacagagcatacttattctaaaggctgtaattgtatgataatttaggaaaaatagatcttagagtggcttataggcagtccagctttttgtcttctcaaattttactagtctgcttatctgacagtgccttgagagcacttttcactgccttgatctgttcatgcttaattttagtaaactatcagcattttgcctaatgaatacagactcaccatttactaataaaattaagtgactgcaatctatagagaaactgtaaatatgaaaataagccatttatgtttgccgacactttccggtatagcatcgtgtatccccggtctcccagataaaaggaaggacatctcatatagaaaactaaaatatagctagaatgtaattgtctagaaaaggcaaggtataaagcagttctaaggattttcttccttagtagaggtgggatttgagagtttggatttttatcataggtcaaagttacctaagggtacctttgcagggtcacaattcttctgagagttgcttttgtgtagataagcctgttcacttttacatcctggagcatcacctagctttttatatatctgaaactgacagctacacttttgtttagaactttcatatcatttataagttctttcactcctgcactagcttattacagagtacacaggaattaaaggctttctttatcttatataaaatcatgtttttcctttgctctcatgtcggttttattttctccaaagctctatagatactggtagttcccacaaaggtgtgtggcatggaaaagcctggcaatttcaaaccttcttttgtaattatttgttgtagcttcaattaaattaatactaataatacctactaaacttcacaacccttaaaactgtaataaaagattgattagtgtcttattattactataacaaattaccacaaacttaatgacttggaaaaacacagatttgttagcctgtagttctggaggtcagaagtccaagctgggtctcacagggtgaaagttaaaacagcagcaagggctgttcctcctggaggctctgaaggaaaaatgtgtccttgccttttttagcttctaaaggtcacctgcattctttagctcagccccttccttccttcactccaacctgtggcttccattgtcacatctcctactcctaattccgaccctcctgcttccctcttgcaaggacctttgtcattacattgggctgtctcagataatccaggatcatctctctcccacccccacctttttttgtttttgttttcgagacagggcctcattctgttgcccaggcaggagggcagtggcgtgatctcagctcactgcaacctcaacttcctgagtatctggaactacaggtgcgcgcttctatgcccagctaacttttgtatttttagtagagatggggttttaccatgttggccgtgctggtctcgaactcctggtctccagcgatccacccaccttggcctcccaaagtgctgggagccaccgtgtctgtcctcatctccccattttaagatctttaatcatgttaatacaagtcctttttaccatgtatggtaacacattcacaagtatgggggattgggatatagatgtatttgggggccattattcaacatgccacagatgtcactgtaaggctctttggattatagattagggtagtgaattaaaagaaggccctctggacacgcaccacccactctgcactgaccagcccacctggatagcagaggacacccccagcccccaccaagcattgaagacatagtttatttcctcatatcctttctccttgggtgtagttggggtggggaaggagggaagactggggtcatctccattccttgggctctgtgcccgagtccatggtgcaccactgtgctgcgagctgtggggcctgctgcagtgggagtgtgtggaacaccttgaccaaaggggagctttgtcttgtgtgttttgaaaaaggcttaatgaagagaatgttgttcattcttagtagtatagtttgcaattcttaatgacaaatagtaagtttcagtagaaaacaaaacaaaacaaaaagaaggccttctttatattctctagttttattttccgtccgctgacccaagattaaaaattttcttaatgctcccttggttcttgattttgaatttaggatgattttgatttagttaaagaaatttcttttttttctttttttttttttgagatggagtctcacactgttgcccaggctggagtgcagtggcatgatctccgctcactgcaacctctgcctcccccaggttcaagcgattctcctacctcagcctcccgtgtagctgggattacaggcatgcgccaccacgttctgctaattttttgtatttttagcagagacgagttttactatgctggccaggctagtcttgaactcctgacctcaggagttcaagatcctgatccacccgcctcagcctcccaaagtgctgggattataggcgtgagccaccacgcccggctgttaaggaaattttatatcctttagtttttacattgagaaactcagagtaaaaacagagattattgataattgaagttggaaactctactgaaatatttggtaaggagatttttaaagacttttctgttgttgttgttgttaatagttaaaacaaattcaaggagtcacaatgagagtgtctacctgctgatatataattacagactccggggtgctggcagccagccttgggctctctctgtgttaacacatatactttggcaagatttttaagttcattaacccaaagcgtacatttttattatttgttttaagagcaaaacagaaaaataaatgagcacctctagttttgcggcctgctacaatacctaacattagctttgctcatgcagtctttctcttatatgccatcgttactcagtttctcagtcattgcctgaacctcctttcttgcacataaattaaatagaattatcattctcacctcccagttcttttttgaacttaatggactagtgggagaaatgcttctagttgaagccaactagaacatgactaattttggagaggtaggttggatgtttttgacaggataaggtcagataggtaacgaaatcaactttaattctaaaagccaaaagtaactttcagattcctgatcttttcaatggcctcccttttggtaaagtatcttaaatgtcagtaagaagaaactactatatatgaaagaaacatgcaagagagaaaaagggttttttggttttattttaagaagttagtcttggctgggcgcagtggctcatgcctgtaatcccagcactttgggaggccaaggtgggtggatcacctgaggtcaggagtttgagaccagcctggccaacgtggtgaaaaccggtctctacaaaagttcacaaattagctgggcatgatggcgggtgcctgtaatcccagctactcacgaggctgaggcagaagaatcacttgaacccaggaggcagaggttgcagtgagctgagatcacgccattgcactccaacctgggtgagagagcgagactccatctcaaaaaaaaaaaaaaaaaaaaaaaaaaagagaaaagaaaaggagaaattagtcgtaagcagctcatctttaaaataatcgtatatgttatagtaccaaaataacttggaactaataaaactcagattaggaagtataaaagattcatgttttctgtatgccattgtttaagtgattttaatgaaaataatcatgcatccagtttcgtgtagaagatgaataaattggtctgtggatatttgtgtttacattaatttatttttacattttgtattaatgtggtgatttacatttgatactgtttgtttgttttgtagagacagaatctcactatgttgcctaggctggtctcaaactcctggcctcaagcgattctcctgccttggcctcataaagtgctgggattataggtgtgagccaccatgcccgccccttcccccttcttttttaagaaactgggttaccttctgttgaccaggctgcagtggcataatcatggctcactgcaacctcagcctcctgggctcaagtgatcctcctgcctcagcctcccaagtagctgggactacaggcatgttccaccacacctcgctaattttaaacattttttgtcactatgttcctcagcctggtctcaaactcttggcctcaaccagtcctccctccttaacctcccaaagtgttagaattatgggcatgagccaccgtgcctggcctacatttgatatttgatactgtaaaaagctagctatcacaactgtccatactagttctcttcgagagaataagtgttccctggatagatagatattagttatagatattataagttataattatagtataagttatatcttcagtcataaatactataagattcagctgagcaaggtggcatgcatctgtagtcccagctagttgagatcaaggctaaggcaggagtcttacttggacttaggagtttgagtctagcctcatagtgataccttgtctactgaaaaaaaaaaaagattgaaccattgttccactgtttatgattttttttgtgcttaattcttatttatgaatttttgttctagttctgtttctagagagaataaagcccaggtgaataactttgttttctttctggttttagaattattagtaacaaatccgtgttcttaatggcagtagcaaacctgtcttctgtagaatttttaaagagatgtttctgtcattagtaatacagaagaagccttgatcattttcagaataaagaattttacgacagggagaggtggctcatgcccgtaatctcagcactttgtgaagccgaagtgggaagatcacttgaggccaggattttgagacctggggcaacatagtgagattccatctcttttttattaagaagaaaaaagaaaaaaaaagaattttatttctaaaggcagttaccaagtctagaactaagaatttgtggaggtaatctagaatcttacttgttaacgaagcctccttgcataatggcacagaagagaaaaaagaagcgtgaaacgtgactccagccctaaagaactgaggctatatgggcagcaaacattagatctttgaaaagttggtaacaccaaaattatgctttgcatatatataatgtacttcacaaagcatttttacatgtatcacctaattttattggcatgcaaatatatcttattaaaaaagtaaaatctcttcatcttctggcacttttaactctccaaaacttctgaatttcttgtaaagagcacccaggcaaggtatagagaaccccaatgctgggaaaagagtaggattcttggcctccgacttttaacttttcttgcctgagatgtgtaaggatccacagaagagcagttgaaggactgacgaggcacaacacagctcactcagcatggagccggcatcgctggatgatagtatccttaacagctaccaaattatagttggatacaatagaagagatgttacaaggcatgtcatgactcattatcacattaattgtacagtctaattagcataggagttcagaggatgatagaagtactgtagtttgtaagattccacaagattgtcagttccacaaggactgtaaccatgtcctgtttattgtcacactcccactggctcatacatgcctgttctgtagcaggtgctccccagctttgtcgaactgaagttcaggcggtactgataaaggacataaatattgtattgaggacatggcatttgaggtgcgtccagtgtcatgtgattggatgatcaggtgtagaggagagaattccagcaagtgttaataaggcacctgtcagttgcagacactgatacaggcacgggggtacagcagtcagtaagataaccccttggaacttatattctaatggggataaatagacagtaaacacaaataagctctcatagggctgtgacaaagataaactcgagtaacatggcagaatgatttgtgcgagaggtactgcttttagccaggatcttcaaaacattccacgcagaaagaagaacaatgcaaaggcctgagagagataaattcaacatagaagaaaggggtagaagaaagtccagcatggctggagataatgaataaaatggggattggaagaagttggggtgagagagatggcaaaggccagttgcacgtggttaggatgtgggatttcatttaggttccagtgggcactgagttggagcagcgtgggcagcagtagaatgcacaaggtctatttgaaaaaaaaaaaaaaagggtgagcagctcagtggaagggaaggctaaaggagaggagtctccccgagaaggcaggagcagtagatgtttatattagattgaaatcatttgaatataagatataaggcttaattaatccaattcagtatggagacggcaaaaagctggaagctgagggaagggaagggcctcctggtaataggaaggccagttaaaggctgtgaatggtaaaatcccgcatgagggtgatggtggcagtaaacatgcaaaggaagaaaacggcaacaaattcaagagagaaagcaagcgagaatttctaggaccagataaccaatcatatgtcttgaccaggaagagggaattttgaaagatatgtttagaaataaagaaatgaaattttcttactgatggattatattaagctatcaaaaaaatggtgttttgaaaatggttaatgtattgctattcgaaagtaattttaatgtccttgtccccaaagattaagtagcaaggtgtctatatttaaaatagattgcctgagaaaaaactgaaatgtagctggcttactccctgaagaaaagttctttcaaatgcttagacgttataagaatgttctgaaaattgtggaaacattttttttaaacctaaggaagttggaaacttttgtctttaaatgtcgactcccagaatggtctccatgagatagtttccactctcgtgttattgttttagttggcaatcagtagacagcaaagatcagaaatgcaactatagaaaggccaatatcctggaaagaattttcagagcatggatttaaggtaccatggaaaattttgaccttaatgcagtgagagctagaccattttattattttttagggagaaattaaaacatttcctaactcaattgacctttcacccttagtatgaatatactgagataccatcatatagaaaagaaaggttggaaaccttggatttttgagtacccttccacagtgtgttgactgacagtgcctctgactggtcacaggaagtagttatgcaatactcattatatcaatctaaattgtatttcatgattctaatgccctctttttaggctatcattcattgcacctcccaggttgacatgtccagtgaattgagaccagagaggcctttgtgtttgtcctgaattcataatagagtctaggaattttaatagctagacctgtgttcttgccctgaaatggcatatgaccattaccaagaagcggctctaaataaccttcctgcacgttgacccttgggaaaagaaaatttgaaatattatctctcttgaatcctattcctgagactagaactttacaaatttgtattctacttaatgtcatatctatattttttaatattaagattattaacttagtttaacacagaaaaaacgttgatgttccaggaaggtgcaccctatttagcctacggtttctcgtatatcttggaacactgaagtgtaacacctgaggctgtgtaaacagaggccagcctgagaagctgagaatcaagaatttgatgctcaaccatagattcctcttactcacacttctagtttgtgcagagtgacttctctattacttttcctcagcctcaaggattttcatgccattatctattaattgcacgtcacttattttggggataattagaaaaagggggaatgagaggttgggaatagaaaaagggagagaagcaaagggcagaaaagaaatggaagcttttgctttgaggtcttgtgggggtgggggtggaaaaaaaagtgtaggagaagcctgagcccaaaagcttgcctcctccctctacagggaaagggagttgagcggagtgtaagagggtggatggcatgcgcttctgacctaccaaagcatctggaaatttcagactgctctttgtctctgagactgtgttgggcacagcattgaataaagtgtggatcaataagtatgtgaagtgctggatatgttaattcactggatttaatcattcctcagtgtatacatgtatcataacatgtacgatgtaccctgtaaatatatacaactattgtaatttgcccattaaaataaaacaaaatataaataaaacatgagcagtgatgattaaaagccaaagtttcatcttaatctgtataatatctagaacaaagaaaaataattttatcggcattttattgaagctgcagaaaatgacagctttgaaaaatctcaagcaacgtatggtttaaggaaattaggtgtacacttaagctatagtttgtttgtttctccctttcctttcctttcctttcctttcctttcctttcctttccttccttcttcttccttctttccttcctctcttgtcctctccttttctttctttcgttctttctctctcgctctctttcctctctctctctctctctttcccttcctcctttccttccttgcctccctccctcccttcctgtcgctcagactggagtgcagtggtgcagtcatagctcactgtaaccttgaactcatgggctcaggggatcctcccacctcagcctcccaagtagctgggactacaggtgttttgccaccatgcctggcgaatttttaaattttttgtggagatgggactcgttttgctgctcaggctggtcctgaacttttgagctcaagagatcttctcaccccacctacctaactgttgggattacaagcatgagctactgtgcccagcctcttacctgtagtttctagtttaagaagttttagaagaacattgatattctatccatttagagtagtgttttacttttattagtggctatagaaactataagaactatagaaaagttatagaaacttacagttcttataggaactctaagaacgtttatataagtctgcccaaggtcatgtgtcctcatgaggatcgtaagctcctcaaatgcaagttgatgttgggaagggactaacgaatcacccagagtgctccttcactctgattctgagggagtctttattgtgttgtgtgaagcgtgttggaagccaggtgtggtcgcacgcacctgtagtcccagctactcaagaggctgagatgggagggtcgcttgagccgcagaggttgaagctgcagtaagctatgattacaccattgctctctagcctaggcgacagagcgagaccctgtctcttaaaaaaaacaataaaattttttactttttgtagagatgaggtctcgctctgtcgcctagtttggtcttgaactcctgagctcaagtgatcttcctgcctcagcctcccaaagtgctaggattataggcatgagacactgtgcctgacctaaaaaaaaaatttttttttttttttggctcacacctgtaatcctagcactttgggaggccgaggcgggcggatcacgaggtcaggagatcgagaccatcctggctaacacggtgaaaccccgtctctactaaaaatacaaaaaattagccgggcgtggtggcaggcacctgtagtcccagctactcaggaggctgaggcaggagaatggcgtgaacccgggaggcaaagcttgcagtgagctgagattgcgccactgcactccagcctgggcgacagagcaagactctgtctcaaaaaaaaaaaaaaaatttgatgtgatattatagaaatttaaaattaaagcaatgtcaaaaagagtgaggctgactttttaggcaagcctttgcaaggtggcagaatattagtaaaggtccccattatatcagaatctggttgtcatttatgagttctgaaatataccttatcagttctcttaaaatcataagagagtgagtataatatttgtatcagttttcttagcatcaaaaagtacagtttgctagtggtaggcatgggtatttcatctagtctttttaaaatatcctgatttgagtggtctttggctcgtctttgcggaggttatacacagaccatccttaatttaccatctcaagtagtatacaggatcttttcccagccagtgacttctgaatcctcagagattttcagtgttccaagagattcatgtcatacaaagtgataatgacttttctattttttagaagttaataaatgaaataattacttaggtctttccgcccttcttaaatggaatagtttgagagcctctgagtataaatcgagtctacctgctggcagggcgctaatgagcatgcttatgacttggtcattccatttattgttcaagtagttggttatcataatagctttgaccagggtacagtttttcattgtattttattaagtttacatctattatggatcactggattatataaagcataaagaacactaatgttgaaattcaaattgatgaggataaaaatgataattctgtaatgcctcaagacaaccttcaccaaattcatgatttgtctttgtttggccatggttcttacacagcacatcaaattgtttctagggcctcaagaaacaaagtttaaaaatgttacattacatacatacacacaaaatatgtatataccacatgtatatacattttttacacacatatccgtatctatatctatctatctatattatatccagtttgatttattgggaataaagactatctacattcatagtatattatttgcaaagaagtgctaataagtaatgacccaatatttgttaatccatttcattatttaaaagcaaggcatgaaaataattcatttaatcaagtctggtttttaggttcaaacatgtaagtgttccaaatcctaggtcatgaaaagtattcatctgttttgtgtattataatctcagtatatttgtggcttccaaagccaggtgccgtggttcatgcttgtaatcccagcactttgggaggccaaggcgggaggatccctgcataccagcctgggcaacataataagaccccatctctatcccaccgcctgcccccccgccccatcaaaaagaaaaaatacacatacacacacacacacacacacacacacacacacacacatatatggcttcctactaaacatgatatatcaattttaaataaatactttttcttgaataattgaaataaatagtgtgggtcacttgtatgatgggataatatgaatttgtcttaaaattcatagtgaacttttaaattaatttttaatgtactaatgtaaaataaaatgtcttttagctaaagtctcttctgtatcataaatcatagaaaaatgacaaaattatttttaaaatttctttcccgggaggtttttaagataatacattcctttgaaaggagtttgtgagtcagaaaagctggaaaataaaaaggtaactgtactgatttctttacattctaatccaagtataccatggttttcttgatcagattgagtgagtctctgaactgttgatagaaccttcttcaggaaagccccatttctctagaatataccaattgcccctctggaacttttccttaaaactcatccagtggttataattatatagttacatgtgtgcttgtttcatgtgtatctcccccactggactaatctgctacatgagggcagggaccatgtctgtcttgttcaccttgtactgagaatacatttgtggtccatcaaaaaattgaggaggcaggccgggcgtggtggctcatgcttgtaatcccagcactttgggacctgggcggattacctgaggtcaggagttcgagaccagcctggccaacatggtgaaaccttgtctctactaaaaatacaaaaatcagccagctgtggtggcacatgcctgtagtcccagctacttgggaggctgaaacaggagaattgcttgaacccaggaggtggaggctgcagtgacccaaaatggtggcattgcactctagcctgggcgacagagtgagactccatctcaaaaaaaaaaaaaaaaaaaattgagaaggggagtactttattcccattatcatattttcacatcacctttcagttgggttacttttcagatgtctgctctcatttgaagtttttttttgtttgtttgtttcctattagctttaatctaagatagtattttgttacctactcttaatttctaggtaacaccttagagcttcttaagtgacaatcctatcttcttttctctaaaagtaggcttctgcttatcagaccatatgtcttagtttttaatttggaaaaaggtttttgttttgtttttttgtttgtggttttttgtttatttgtttgtttttttgagacacagtctcactgtgtcacccaggctggagtgcagtggcccgatctctgcccactgcaacctctgcctcctgggttcaagtgattcaagagaatttaaggggacactgattcatcctgttctataaaaggcacactaaaattttgtataccatgctcacctatcattattagaaacttacctgattaaatgattaggcttttattgttcttgttgatattctttacaatcatgactatgatatactcattaatgtttttaagaattccgatgagtactgtttgcatgtgttgtagaaagtgtctcattataatcctttcctttatacatctagtcagtactgagtttgatgcaaagatcctatattgaggaggtgtttggggatttatatgagaagggttggatgttgctatctaaaataaatagagtggagaagactggtttattacttcatttaaaatagctgagttcagctattgtacctgctaaggtgttttgggataaaaatacataagtcactcattggaaatgccaatataatgctgatccaaatctccccccaaataagatgattacttgattttttttttttccttgaaggaattttctcttgtgtatatatgctaaggctgtgagtcaggagtttttggcattacttctctattagctcctagtgaggaagttcagccaggggttgaagtgattactaaatcctgaggacttcccaatatctgtttttaagagtgaactaatattgtgacttctgagaactttgaaactcatcctttgtcactaccacaattctgagatccacacacttgacttttgttttgttcaatttcaaataaagcccttaggtcatatggtttggccagtgacattatataggaaaagcagatttaattccttattagcgtcatgttccattttaatagtcaggagaacattctaaatcctatttatatactgttcttacaccagtcttgatctttggttctttgcatcatttctagcagcaacatttctaattattagaaatttctaataattggaaattaatcaaggacctaattatttctgtcttcatctttgggtctctaattgcaaatgcagtattgggattgtgaatcctcagaagcttttagctttgaaaacatgaaggatcttgtcacagtgatttttggtgaggttgttcatttagggtaagtaaatatcttcccacttcactttttcccctctgctccctgcttccaagctgtttacttatacagcaaggaagtgaagcacaagttacccttggaaagcagggttgtccgtcgctcaaagctgtactgtattgccttagagacactgagaacactagtactggctggaaagttgtgcctaatctgtttacatctgctttggattgttctttggttagccaaaaaagaagtcaagttcattgctctaaagtggtagaccaaataagaaaattgcctgttgcagttgccctgatttataaattaatgccgcccgttttgctcttttcccttaccacatagacatatccagttgatgatatacttatttttagggatatcagttatcactaccttatatatccccaggctcctgatctcacctccaacaaagaattccaagtctcaaaattgatagtaagctctggtatttaagccttcctagaagacagtcatatggttcaaattaaagtctcctgctctgtattaagagaaagggatttaagttgccatttcagcctgcggacaaatgctaaccaactagggtgttgggggttggaaagcaacttaacaaattatattgagagccacttgcgagtggagaaataaatgaccatggccacatgaagagaccaacttcgctccactcatatggcttctgttgtgtaggtgtgcgtatccatcttaaccagcttcttctgtttctccctgttcttccgtaactctttagaatattcatcattttaatgttgactctgtaggtcatacatctttcccattgccagtaaataagcagtaagggatatcaagtattttatcggcatcagtacctgagaattacataaaactaactgctcagtgtttttgttcttattgttcaagatgatgtcttaaagtctttatacttaaaataaaaattttagttatagaataatgtaagcatactatagaaaatttaaacagcaacaaaaccgttttaaatattcaagctgcaatcccacctctgaaaccattgttaacattttgaatgcattttcttttgtctttttactatgcatgtttttcatacttataatcagtgtatttacaattttatatttcccatgttgctccatatagtcatcattttttttttttgagacagagtctggctctgtcttgcccaggctggagttcagtgccaccatctcgggtcactgcagcctccgcctcccgggttcaagcagttctcctgtctcagcctcccaagtagctgggactacaggcatgtgccaccacacccagctaattttgtatttttagtagagatggtgtttcaccgtgttgaccaggctggtctcgaactcctgacctcaggtgatccacctgcctcggcctcccaaagtgctgggattacaggcatgagccactgcacctggcctcatcatttttaatgagtgcacatcaagtagatgtaccataatttacctgatctaccccatattgtttttgttttgttttgttttgttttaaaagacagggtttcgctctgtcacccaggttggagtgcagtggcatgatcatggttcactgcaccttgaactcctgggctccagggatcctctggcctcagcctcccaagtagctggaactacaggtgtgcgccgcttcaccaggcaccatattgttttatgatctcaccaattcttggtattagcacaatcctcactttttctttggcatttattactgcattctaaaacttcaaagtgtgtttacttaaccttttgaacgtacagggaatcctttctttgccttaagtttctgtgttttttttgttgttgttgttcttgtttttcacttacattgaagttgtcattcttctggattttttttcctttatatttcaccagcatttggcctgctagcactcttcatcttgagccatgtgaactaaacttcagcttatggtagtctagtttactttatgtcttctggaatccagctagtggtaatgatcccaggccttgtccctttctctttcccaggctgacttgagctggagcagtacagcactccggtgttccttagagcgatatgagctctggaatggtgaaagaagattgttaccaaatacaaagtgcctgtggttttggggagatgatgaggctctgtgtgtttactggctgcttacctttgggatttgaataacttaaagattataatcagaaaaaaaatagattcttaaaaaaaaatggggagagttaagattatctgaaagattactaaaactatgtcaactttcagttatacaggtttttaaaaatattatctaggtttttttttcttcttttctggctatgttttttcatttgatagtttacatattgaaggaaaagaaggaaaacctaattttttttagtgttcttcgttaacagctcttgttagaactaaggaagcaagtgatattatagacaaaaatgaatttttaaattatatgtagtgtatactagctttgtctcttactaatatgggttactgagaaatagttattagtgtgggagtaatactaatattttcaatcatgtgactaataagcatatcactcacacctaattgccattttagcattaatgattatacctatcactaaaatatttactcttcctttaaaattatatttaatgataactggaaacttcatcattgtatatattcttcctagattacagtttttcttcatatatgaaaattgctattttcaacaaaaactttagttgagatctctgtcttaccaagtagttcccagttcctacactctgagttctgatacattcatttcctatttcaaactgtatcgctcttttcttccctttctcccaccctctctgttcttagttagtcagtgagttgttttaagatatttattgagtgctttctcttcctgtcagcactgtgctaggccctaggaaatcagtggtgagaaaaacctctgccctcaaaagccctaatgattgtggagcttagatcccagagcagtggttccaagtggcgagaaatagcagtggaggaggaaaaggagctattcttgtctcttttgtctttcatttattatgaaatattatgtttatacataaattttctttaagcatctgtgtatactttagtgaatcactagaagcaaatacctgtgtagtaattggcactcaggtcaaaaaactagaaaatttcatcagccaggctgtacacctcatcacaaccatatccttcccccaagagaaaaaaaattttttttgtacttttgtgttaatcacttatgtgctctactttataggtgtttttttttttcttttagtagttttgccactgatgtaatgcattacttaggagttttgctccaagggatgccatttatactgaatataatgtgtagtgggtccatccttaaacaatatagttttgcttgttttgaatgatacatgaatagaatcatattgattatattattttttgtctgtttcatccaacagtctgtgagatttatccatgttgtttgtatagctgcgatttattcatttttatttctatatagtattccatgatatgaatataccacaagttatttttccattgtacctattaatagctattttaaaagcagaagcccctattgctttcagtttggggcacttactaacagctgcaacgaacattcctaaacatttatcctggtatactcttaaacattagtgtgtattcttaaacatttaagagtgtaaactgagaagtgaaattgctgggtcatatggtgtgtgtttttaggttttatttggtaatgctgaactgtttccagtaggtgtgagagttccacttgctccatgtcctctccagtgcttgttattatctactcttaaatttttgcccatctggcaactgtgtaatgattatcttgttgtggttttaatttttactgtttctctttaataatgagattgagcttctttttgtgtctcttggcctttttttgtcaattgtcaatagtcttttgctcatttttctactggattctctattggtcttattgatttataggagtttgtttctttttgatagtctggatacaagtcctttgttttttttgtttgtttgttttttgttttttgatgattgattggttggttggttgttgagatagggtctcactccatcacccaggctgcagtgcagtggcgtgatcacagcccacagcagtctcggcttcctaggctcaggcaatcctcttgcctcagcctctcgagtagctgggaccacaggcatacaccaccatgcctggctaatttatatttagtttttgtgaagacgaggtctccctgtatttgcccaggctggtcttaaactactgagctcaagcaatcctcctgtcttggcctcccagaatgctgggattacaggagtaagccaccacgtccagccgagtcctttattttataagttacaaatatcctccctcactttgtggtttctcactttctgtttaacgtgtgtataaattttggcataattctaatgtaacgaagtttaccacttttccctttatgattagcactttttgtttcttgtttgagaaattcttccatcccctgaggccgtaaagatacctgctttttttttttttttttaaataaaaacgtgatagttttacctttcacattagggctataatccacctggaattaatttggggatagagtgtgaggatggcagcctctgtaatttttttccatatgaataacgagttgttcctgtgccactttttgagaaatttatccttttcccattgatatacagtgtctaccattcttttctatgcatgtttttaaaagaaacttgacgcagtattcctgaagcattatgtgtctttgggaattaacataagcagagcaaagggtggcagtcaataataaaatgaaaaacagtaaactgtaataactaaggaatttgcaagttttttgtttttttgagacagtgttttgctcttgtcacccaggctagagtgcagggtgcaatttcgactctggtgcaaccctccgcctcctgggttcaagcaattctcctgcctcagcctcccgagtagctgggatttcaggcacctgccaccacacctggctaattttttatttttagtagagacggggttttgccgtgttggccaggctggtcttaaactcctgacctcaagtgatccgccagccttggcctcccaaagttctgggattacaggtgtgagccactgtgcctggcaaatttttaaatttcaataaaaataattatgggatgtacgtgaacttaaatataaacacatacatgatgctgaaagcacaatgtggggctggattttgagggcactgagaactggcgttataggctgcatctgattcatactaatttttctttaacctttatacttgggaatgttacttttgaacctcacgtctcaggcataaaacaaaaataatgctcatctcaatgaggtaataaatacaaggtgctgtagcgcagcactcaacagaaggtcctttgaaaaacaactgtttaatactgcaaagtgcagcacaaataggaaaactgttgcactggagagatgagtcaaggacagtccagttccaagtctttctgggatacatggctccctccagggctcttgccactcacctgcatggccacgacgttcgtttctaagtactctgaatatatttgtatataacttaggattagtatctgttggttgtcatcaatcttggtaagaaatgcctaattttattcacagcttgacattgtagataactctgaatggatctggattatatttgtagtccatttctgtgatgtagcctgtctttacaacaaataaacaaaaattctgaggggaaaatgataccatttctcatcgagaataattatgtcatcatttgttttccctcagatcaaagttacataacacttggatgagattacatggatgctgtaagccacctttttctgcttttctgctctctcggcttccttgttacattttcctgactttcttcctttagccgcgctttctctctcctttttgctgcatcctctttctgttctcgcacctagggaataggaagtacctctgggtgttttcgaagccttaattctcatccttcccttttctctactttttctttcaaaaatattttatccttttactactataattcagtttctcagaatatcttcacttaaatttctgatcaccttctcaaactcaggacataaagaaaaagtaattttttttcttcccaaaccaacttctgctttccttaagtctgtcatctgctcagggccatattctctacttctccttctttttcatcccatatattctgtttgttatcaagtactgtccgctcctttcagaacatcttttgaattgtttttttcattttcaatatctcatctgatcacagccttcaatattcacctcacacctaacctaatcttgctttctagtttattttaccacttcacctgcctgctcagaagtcctagcaactccttattgcctgtaagtgtggctctcaaacctcttcagaaagaactgtgttttactggtacctttatattcacaccaaaagcataagtgacaaaaggaaatacagataagttggacctcatcaacatttaaaacttttgtgcatcaaaggacatcatcaagataatgaaagtccacagaatgggagaaaatatttgcaaatcatatatctaataagagatttgtatccagaatgtataaagaacactcacaactcaataataaaaagataaccaattttaaactgcacaaaagatttgaatagacatttctccaaagcagatatacaaatggctgaaaagcacatgaaaagatgctcaatattattagccatcagggaaatataaatgaaaaccactgtaagatatcatttcacatccactgggacagctgaattgacaataataagtaataataataaagacaataagtgttggcaaagatgtggagaaattggaatccttgtacgttgctggtagggatgtataatggtacggccactttggatagcagtttggatacttcctaaaaagttaagcagagttaccatatgacccagcagttccactcccaggtatatatccaagagaaatgaaaccatatggccacacagaaactcacataaatgttcatagcagcattatttttagtcgctgcaaagtggaaacaacctgaatgttcaacagatgatgaatggataaataaaatgtggaatgtccataccatggatgttattcagcagtaaaatagactcaagtgctgacataggcaacaacatggatgaacctccaaaatattatgctcagtgaaagaagccagacactaaagcttatatattgtatgattccatttatgtgaaatgtccaaaattgacaagtctcatagagacagaaagtagaaagcctagggctgggccattggtgaaagacttgaagggtgttggggagtaactcctaattagcacagggtttctttttggggtgatgaaaatgttctaaaatttcttctttggttttttcactgccttttccttacaaggtgaaaaatgttctaaaactgattgtggtcatcgtcgcacaactctgtgaatgcgctaaaagccgctgggcattacactttcaatgcgtgaattgtatgggatatggaatacaagaaatatgttatggccaggtgcagcggctcatgcctgtaatcccagcgcttcggaaggccgaggtgggaggatcatgtgagctcaggagttcgagaccagcctgggcaacacagcaagaccctgtctctattttattctatgttttaaaatttaaaaattaaaaagaaaaaagaataacattttataagaaaatattttatgagagacttataaaagagacattaagaatatgaagtaatatatttcgtattccttatctcaataatgctgtagggaaaaaacaattgaaataaaagcagtaaatgagtggagcatggagagtgtgtcatgagccaaaggttataataaattcataatcaagtttttttgtatctgaagtctaataaaatttttaaatgtggaggaaaaaaaaaggaaagaaaaaatagtaatggttcacaggatgaagtccaaggtcttcattctgtcatttgaagctgtattttatctggcatgatgctgctgtgcactctttatttcttgccatatgcccctacaaaccctttattgtacccagggcagtgtcttgcttgtcacttgaacttagcgagttaattctaagtgttctgcccttgctcgtgctccctcctgactgccattcagagcaccctttccaccttccttcattgcctctccagatcctggccattcaaccaagttctgcttcctttgagcctttccctagaactatgttttatgcctttggtttgttagaagatctaacacattgctattcccattggaagagttccataaatacatgttacataaagagtgaaggaaatggaggaacttacttagagacttataaaagagacattaagaataggaagctttagtaaataatgaaagatattgtgaattagagtagctccagagccaaaataagatgaaaaagcctattaaatagaaatggttttctaggttcaagttcagatcaaacttaagctctaaagcttttcttggcttggtgcagtggctgttgcttgtaatcccagcacttacgaaggcctagtcaggaggatcgcttgagcctaggagtttgagaccagcctggacaacatagcaagacccccatcactacaaaaaaattttttttaaatagctaggcatggtggtgtttgcctgaagtcccagctacttaggaggctgaggcaggaagatggcttgagcccaggaggtaaaggcttcagtgaactatgattgtgccactgcactcccatctgggaaacagagcaagactccatctccaaaaaaaaagtttttctttacctttttctttggcatttctgacttaagccagtgagaattcttcctcattcttttttactcattgcttgaatttgtgttatgagaatttttttcctccaacttggatgatctttcaattttttccagttgtctatacatgtagataactgaaaacagcaaagctcttagtgattctgttccatgtctatctgttccccacctccatttcctaccacacaccccagcattcccctagtacatcactaaactatcaacagaacctaaaatagactagtttgttttaactgtatttttctttccagtcctcttaaaatgtgcagcaaaatgtccccaaaggcaagcagctaagagaatgaagaggaggtattctcccatcacagttactcagtcccagaagtattgattggaaggcactgaattttcaaaatgacttccagatttagtacatggtaataatttgaggctttcccacacggataatttaaatgttcagaaaataagttatgttatagctgaatgggcagcaaattagacagaattttaacttacaagatgcatagcaatagtgaagattaatgtgaaatactagtaaagagccactggtagggaagagaagacagcgatatgctttcaatgaaaccgtcaatttataataatatgtatattgaaaagggagagtggatcagatcctgttaggtttggtacgttaaagaaagaattaggataccgcaggctcagtaattaaaggaatctgcccataattggggggtaaaaggtgtcttgtaggcagggaatagcaagattttgcttgaatgtacaccttagagttgggagtaacaatacttggaatgattatagaagacctctcgacaggtttctgagactagaggattttgtttggtgcataataggagatgagagcaagccagtagtatttggttgttgttgaatcttacagaaatcttgcatttggttattgggtctagctgttgaagccagctgtttggatgtaacatagtggaagcaggtgcttctgcagatgtggctctctctagttgtctggctgtaatatatcattcattctcatacactcatttctcatataaaatccttataactattagcagtctaagcctgcagacattgctgaagctggttccctttgatattgttttctttgtaacagtttcctgtttggtagataaaataacaagctcacactattaggtttgtgccttcacctccctggcaaagtaacatgctagaaaggttactaaacattagtggttcaaaatgagaagtctgtacattttatctgcttataggcgaatttaaactcaactggtttaaattcattgcttagcctgttgcatgctccattgaaaacacaaacaaaaaactccatgattcttctagccatgattcttctagagtttgttatccagtcattccagtgccagaatccatcaggcagaacagaatcattcgcatttctcctctgcactggagagaagaggaaggctgatcatggaaaaggacctggtgaaggttttttgcaaatctaaggatcttttttctgtcttttatttttgcaaacctaaggatcttccttctggataattcccagagacgtcaactttgctgaatctcagttgttgggatttttagcaacctgttcccactctcctaagaaaaaaatcttaatagtgaccagtgtgtgcagactttaatttgtaagtgaaagttacggtgtttcaaaagttgcaggttagttggtagagcattaaatgcagttttgttcatagtcaacattaagtgcccactgtgttaaacactgttagatactgtgaaagagagaagaataaggtaaggaactagagagagagggtagatctttacaagagaggatgtttttcaggagctagaagaatacattatttatgtattcaaataataaagggaaagaaagtacagacagagtagataggggacatttcttgtaggggatccaggaggacttcacagaagaagtattatttatttccattaatgaatgagagtattcatcttctcatagaagaagctataatgattctatttgtggtcctgactgccacaccccttatgatcattaagttaattttagaaccttgggagggacagctaggaggcagaggctctcgttgctggccagctgccattgtcagtttgagaagtctccagtagtcaggaggtgacaagaggattggcccagttattttattgcagtttaatttcgtgaccctttcttgagtctctgctatgtattagaaccactgtgtagagactaggataaataaaacggtatctcctccatttactaattaatggagggtataaacacacaatacaattaagtataatataaggcagaggctgggcgcagtggcttacgcctgtaatcccagcactttgggaggccgaggtgggctgatcacctgatgtcgggagttcgagaccagcctgaccaacatggagaaaccccgtctctactaaaaatacaaaaattagccaggcatggtgatgcatgcctgtaatcccagctacctgggaggctgaggcaggagaatctcttgaacctgggaggtggaggttgcggtgagccaagatcgcaccactgcactccagcctaggcaacaagagtgaaactctgtctcaaaaaaaaaaaaaaaataaataatatatatgtatatgtatatgacagaacagtaatgggatgtagaggcgtaaacaaaaggctgtggaagcacggaggaggaagccattgacatggtgttttctggtggaaatcagttaagccttcatacaggaagtaatatttgactgggccttgaaaatgagtgatactttaaagatggaaaagaaaggaaaaggcatggtacagagaggaaatagcatgtggaaggcatgtaaacacaggatgtgaatagtctagtgatgctagcatggccagggataaattggaaacataggatggagctgggttgtgaagggccttaaatgacaatgctgagatgaagactcttctgtaagtagaagggaggcagcccatgttttttgagcgaggaggtaacaggatctggtttgtgtaactttgtgctatgaatggatagcttaggggaaaatgaaataggaagtaagcaatagcatcagtcaagctagggatgataagagtatgaactgcagtggtagaaatggaaatagaaaagaggaggtggagtcaagacacatggagttgaagcagtaagagttttattaccaggttgaaatgggaaacgagggagaaaggacttgaagatgactccagtgtttctagtaacacaggtggtgatgtcactaatgagggtaaaagcactgaaagcgcaggtatgactttggaaaatggtgggtttgaggtgtttcttcccaagcaagtattggggattcatgccaagaacttaagagtggtaccagggccagacatataaatttggggtatttatatcaaatgctggtagaagtagcgagattaaaagagttagccctgagaaaacatagagcaaggagaggcagttaaaatcagcagagcctgctgaaaaacaccttctgtagaaggtagaaagaaggaaagcaaatagcaaaaggagagttgtcaacaagagtaaaactggaaaagagagggacgggtttcagagagtaggtgggtgcttaacattttcagatgctgtgatttcagggagcatggtgtccctggggcatgagggatttctagcctgtcacatgggtacacatacataaataaaagcatttctacaccagagactcaatcctttggccagccatccttgctcattgtcttagtgtagctcctgaagactcatccctgctacctcccatctgctgcgtcttgtagcagtaggagagggagagaagaagggaggaaaattgaagcacaaggagagttaaaattaaaatgtaagcattcttgcttcagtttgtaaataagttgcatattcttccttttgaataaactacttaattataataatgtcactttgtctaatttttaaatggtcatagatgtgtttgtcataagaagtaaatataacataaaaattctgggtccaagccaaaagaacaaagctggaggcatcacactacctgacttcgaactatactacaaggctacagtaaccaaaacagcatggtactggtaccaaaacagagatatagatcaatggaacagaacagagccctcagaaataacgctgcatatctacaactatctgatctttgacaaacctgagaaaaacaagcaatggggaaaggattccctatttaataaatggtgctgggaaaactggctagccatatgtagaaagctgaaactggatcccttccttacaccttacacaaaaatcaattcacgatggattaaagacctaaaccttagacctaaaaccataaaaaccctagaagaaaacctaggcattaccattcaggacataggcatgggcaaggacttcatgtctaaaacaccaaaagcaatggcaacaaaagccaaaattgacaagtgggatctaattaaactaaagagcttctgcacagcaaaagaaactaccatgagagtgaacaggcaacctacaaaatgggagaaaattttcgcaacctactcatctgacaaagggctaatatccagaatctacaatgaactcaaacaaatttacaagaaaaaaacaacaccatcaaaaagtgggcaaaggacatgaacagacacttctcaaaagaagacatttatgcagccaaaaaacacatgaaaaaatgctcaccatcactggccatcagagaaatgcaaatcaaaaccacaatgagataccatctcacaccagttagaatggcaatcattaaaaagtcaggaaacaacaggtgctggagaggatgtggagaaataggaacacttttacactgttggtgggactgtaaactagttccaccattgtggaagtcagtgtggtgattcctcagggatctagaactagaaataccatttgacccagccatcccattactgggtatatacccaaaggactataaatcatgttgctataaagacacatgcacacgtatgtttattgcggcactattcacaatagcaaagacttggaaccaacccaaatgtccaacaatgatagactggattaagaaaatgtgtcacatatacaccatggaatactatgcagccatagaaaatgatgagttcatgtcctttgtagggacatggatgaaattggaaatcatcattctcagtaaactatcgcaagaacaaaaaaccaaacatcgcatgttctcactcataggtgggaattgaacaatgagaacacatggacacaggaaggggaacatcacactctggggactgttgtggggtggggggacgggggagggatagcattgggagatatacctaatgctagatgacgagttagtgggtgcagcgcaccagcatggcacatgtatacatatgtaactaacctgcacattgtgcacatgtaccctaaaacttaaagtataataaaaaaaaaaattctgggtccagctgagtaggcttacatgtgtttcctgattctaatgtggtcttaacatcatccagtttcatttgcattcttttttttttttggagacggagtcttgctctgtcgcccaggctggagtgcagtggcgccatcttggctccctgtaatctctgcctcccaggttcaagcaattcccctgcctcagcctcccgagtacctgggactacaggcgcacgccaccacgcccggctaattttttgtatgttggtggagaggaggtttcaacatgttggtcagaatgatctcctgacctcgtgatccgcccacctcggcctcacaaagtgatgggattacaggcatgagccactgcccccaggcccatttgcattcttaaaggaacaagtaccactcgctttattctgcctaggtttatgaagggagcagtactatttttgctgacataaactgatcatgtttatatttcagctcatctatatctctgtttcactattattgttttaagtgtctggctatgtggtttctaaatgttctctttttgcatttaatattcagacaatgatttggaatctttagtgactagagactagtgtttgctcagttataataaaaggttacaataatacgaattatgtccatttgcctttctagattttggtttcagtaacctcttcactcctgggcagctgctgaagacctggtgtggcagccctccctatgctgcacctgaactctttgaaggaaaagaatatgatgggcccaaagtggacatctgggtaagtaactgccttctcttataccccacagcattagctacccttggttgatgacagctattcgcatcctgaaggatacataatgatgcaacatgaattgagatcctggtcacctgttctttcaagtcccaattcctgtgcaaagcctttttttttttttttttttgaaacagagtctcactctgtcgcccaggctggagagcagcaggatgatcttggcacactgcaacctccacctcccaggttcaagtgattctcctgcctcagcctcacaagtagttgggattacaggcacaagccaccacacttggctaattttttgtatttttaatagagacagggtttcaccatgttggccaggctggtctcaaactcctgacctcaggtgatcctcccgccttggcctcccaaaatgctgggattataggcatgagccactgcacccggcctactcgtgcaaaatctttcctccaatacttaccttgtggactgagccacatatttcaaatttcccctttgcatttgcaaaagaagcccaagggccagcttggatgggggccgttgccaagaagagagattatttctactgtggccacttaccttatccccagagaatgagtactgagaaaaattcaggatgttaccctaaattaatgcctagaagcaaagaagattgttaactgttctaagatggaagaaaaagtttgttccataatcgtatgcatgactcaccatcatctgcatacacacactacagtagtcttttttgtttcccctgatgtgattaattgtacatcctctctgtttgggatgcagagccttggagttgtcctctacgtgcttgtgtgcggtgccctgccatttgatggaagcacactgcagaatctgcgggcccgcgtgctgagtggaaagttccgcatcccattttttatgtccacaggtaagggagtcgctagcacacagctatgaatgggttcatgaaagttagacccactcagttatcccaggaatttagtgatggagtataaatggcccacttacaaccttttttaactccagcttgctgacctgatgcctccaggaggcaaggttctgtagaaacagtatataggttttggcatcagagagccctacttgggtttgaatctgggccctaagtctgtctcagctttagtgtcctcatctataaattggctgagagttttgtgagggctgctattactgtaaggattaaatgagataatgtatgtgaagactcagtaggcccatggcatagcagtaatgcaataaatgcttttgtttcacttctgtcttcctaccctttttcaggatatttccacttattgggttctcattgcaatgtggttttaaatgccaaggataaagtaggctttgcatcttagtcttgctactgcttcatttcctatttctgtgctctttgtcctccagaatcaaatttaaaaaattttatttaacgagtgggcagtaaggtaggcaggtcttggaaaaatttaacaccgaaaatagatacaagatactcagaattaacagtattttatcaccatttatttgcacataagaagggaacattttagagaacgcaaaaagtcatatagttttgcttaatcatctgttttcattttaaggaagaacatgtgtccactgggttgacaacaaggtagaagcccatggtaattgcattttagaacaaagaggtgaaccttggagtagatttaacttggctcctttgaactgataacgtcatagtgtagaagatagtgctaaatgctgtgggacaaataaaatagagaaggagttaggatagtggttggtaagttacatgaaaaccccttcatggagaaagggacctttcagcaaagcctgaaagaaggtgagggtgaatgctgtgcagtccggggaagagcaccccctggctgttgaggggtcagcgcagaggccgcggggatggagcatggctgcatgtgaaggaacgggaaggaggcctgcgtgcctggaaggaaggagcggtgagagatgaggaagagagatgaggtcagagaggtaagagggagcttaattttagggcctagttaatgtaaagactttagattttactgtgactgaagtatacaggattggagggttttgacaggagtgatgtaatctgagttttattttttccaaattttatgatgaaaaatttcaaacatacaaaaaaattgaaaaattttgcagtgacttttgtttaaaaaagatcactttggctgctatgttgccggtaggctaaaaggtacaaaggctgaaggagggacaccagttaggaggagacttttacaatagtccagataagagatgttggtggctggttcccagtctggggtgtcgagatggagatggtaagaagtgatcagattcaagagatgctacctaccatgtgtggcaggcactgttcaaagcacttcacaaacattaactcacttcattattttaacaaccctatgagatacacaagattattgtctccattttactggtgataaaactgaagccaggagagattaggcaattttcccaagataacactgctaccaagtggctgaagtagaatttgaacccaggtattttggctccaataacatttagtgttggatttgatatgaaagaaagactccagagtttctatcctgagcaaatggaaggatggttttactgccaactgagatggggatgactggggaagaatacttacattttggagagatgttttagacatgtcatgtttgaggtgcacattagacatcagagttaagatatgaattggcagtcgcatttaggagagaattctgggttggggatgtatgtttggaatccccagtgtatagataatagttaaagccatgaggtgagctcactttttaggcagtggttacagagaagagaagaggtccatgaattaaactctggaacataccgctatttagagaacaagcaggtgaagaggtatcataagagttgctggtgaggtaagccagagggcctgctgtcctaggagacaagtgaagagactgttcccaggaggagggaggagggagtgaggagctgtggggagtgaatgctgctgccaagtcaggtaagaggactgagaactgaatgttgcatttagaaatgtggagatcgttaatgattttgtttcttttttatccccccacaccctcaccttcctagatcattaatgattctgaagtacacttttggcagaggaacaggagcaaaagcttaatcatgtggttgcaacaaaaaaggaatagaaggaaaatagacgacacgctctttccagtttactataaaaggaagcagagaagtggtccagtattgctctggccagggtcaccagtgatctcgttattgatcaactgcatatccttagtctttttcttaatcactgcccagcagtgattaacacttcacccttgccctccctccctctctcctttcctcccttcctccctaactcccttttttgggactgggtcttgctctgttgctcaggttggaatgcagtggtgtgatcgtggctcactgcagctggacctcccaggctcaagtgatcctcccttagcctcccaaatagctggagctgcaggcacacaccactatgcctgactaatttttttttttggtagagatggggttttgccatgttgtccaggctgatctcaaactcttgagttcaggcgatctgcctgccttggcctcccaaagtgctgggactattggtgtgagctactgtgccctgtctctttagagttatatgttagagcagctttagattcacagcagtattgagtggaaggtacacagtttgcatgtaccctctgtgctgtcctgcctccctcccctgctgacccctgtcataatcaatgtgccccaccagagtggtatgtttgttacaatcaatgaacatgcattgacacattatcacccaaagtccatagcttacatttgggttttctctcagtgttacacattctgtgggttttggtaaatgtatagtgacatgtattcaccactataatacatataaaattgtttcactgcccccaaatcctctgtgctctgcctgtttatccatttctccctaaccccctgcaactactgatcctttcactgtctccacaagtttttccttttccagaatgtcatatgggtagaaacatacaggatgcagccttttcagattggtgtttttcaaatagtaatatgcaataaggttcctccatgtctcttcatggcttgagagcccgtttctttttagcactgaataatatttccttgcctggatgtaccaccctttatcctttcacctacggatgacttggttgcttccaaattttgacaattatgaataaagctactgtaacatctttgtgcaggtttttgtgtggacataaatttttaattcatttggttaaacactaaggagcacaattcctggatcatatggtaagagcatggatagttttgtaggaaactgccaaactgtcttccaaagtggctatgctattttgcattcctgccagcaatgagtgagagcttctgctgcgccacatccttgtcagcatttggtggtgtcagcattttggattttggccactctaataggtatatagtgatatttcattgttgttttaatttttaattctctaatgatgtatgaggatgagcatcttttcttatgcttatttgccatctatatatctttgttgaggtgtctcttcaggtctattggtcgtttttaacttcaggttgttttattttcttattgttgagtcactcattacattttaaaacactttttctcattgcttctgagacgccatattctccagttttcctcctgtcctctggaagcaccttctccatcttctctaccagacttatttttctctgctcatcctttagatcttttcatctttacaacatctttctggagccatgttatttactgctgtagcttcactgatcactgtggtgatcagtcctcagttaactttttgtcccagacctctcgatctagggcgacatatccaagtatttgctaaccattatcttcactttcatgtattgaagtcagatcaatggagacatattcagaaatgaacttgacttccccctccctagatttgctctattctgtatttgctgccttagtgaatagcatcaccatctgaccaaggccagcacaagccttgatgtttcctctctcaccagtgccacagctgatcagttaccaaatcctgtcaattcaaccctccattcatgtaggcacttctaagaccatactatcatcttcccttgcctcaattaaacaatagccaattatatggattcctggctccagtcttgtccccctctaatctattgtcaactttgctacatgactaatctttccagaacacaaacatataaataaataaaacataccacacacacacatacacgtacattttctctctctttctctctctcttacttaaacacacaaatctgattatatcattttctagcctgaaacttttcagtggtttaccattgcctctaaggtaaagtttactccataaggtggcaaagcattggcttacaaacatttttggctatgataagaaaaaagtacattttatactgtgacccagaacacgcatatatagatacaaatgaacaaaagctttgtttgcttgatttagagatggggtcttgctattttgtccagactgaactcgaactcctgggttcaagtgaccctcctgcctcagtctcccaagtagctgagactagaggcgtataccaccatgactgaaaacaaaagacttttttttgagacggagtctcgctctgtcacccaggctggagtgcagtgatgtgatcatagcttcctgcaatctccagttcctgggctcaggcagtcctcccacctcagcctcccaagtagctgggactacaggcaagcaccaagcaccatcatgcccgtctaatttttaaacatttttttatagagatggactctctctctgttgaccaagctggtcttgaattcctaaccttaagcgatcctccctccttgacctccatgagccactgcgcccagccagcaaacaatttttttaaaaaagcaaaacttaccttactatgtacagtgcatttcaatatattttattctattccattttaaaaaatgctgatttcgacttactaaattgatctcctatctgctatttcagaaacaatgacatagaaatacctttataacctgactcctgcctagctcttcagccccagctcccactctcccaccagtcaccctaattttcttctcgttccctgaacaagttctgttttctggagcatttcccactgccgagaatacatcttccctatcccaccccactccacccactcctgtattctagaattcagaataaaaaaaattagattggatagaaataagaatctagataatttctattcactcttcatgtctctaaactttctcttatcgtggtgcttaccaagctttatattgtaactacttctttcattgtatgtcttccacaccagactgaacttagtgaaagtacagacgaaacatgtctttttcacaactgtcaataacctaccacaggatctggtgtgtagtaggacttagtaaatatgaaatctgaatcagaaccaccccatccccagtggcatttgtttacattcagaataaaattcaaggagtcattattactatggcctacaaggcacagctgtcattgccccttctttggtctcatttcctgttactgttcacctccggttctgagctccagtcacagggccttccttgctgtttctcagacttgccaaacacatacattcccctcagagaggagtcataggtcccctcagagaggcctgtcctggctacccccatcattctctttctgtaattctgctttttcttcatagcacttactttattgtctcctcacctcctatcaccacttgaccataataagcatttggtttttgtttactgttatgttcccagggctttggacggtgcctgagttctagtaggcactcagtaaatatttgttgaatgaattaatgcatagggttgttcgaacactgactccaaaagcccctctggagagtagtcttatccaaatcataatatcagtagtaatatcaaataattacatttgtttagggcttttgagtttataaaataatttcttttttaataggtttattttttgagacaggatctctgtcgcccaggctggagtgcagtggcgtgatcttggctcactgcagcctccgcctcctgggcccaagccatcctcccacctcagcctcctgagtagcttggtctacaggcgcacgccaccacgcccacctaatttttgtatttttttgtagagatgggatcttattatgttgcccaggctggtcttgaactcctggactcaagcagtccgcccaccacggcctcccaaagttttgggattacaggtgtgagccactgcacccagccaatatattttttaaaaatatttcaatttttcagtttttatatttttggcgacagggtcttgctctgtcacctaagctagagcctagtggtatgaccatagctcactgtagcctcaaactcctgggttcaaacaaccctcctacctcaggctccaaagtagctaggactataggcctgtgccaccattccaagctaattttttaaaagattttttgtagagatgagtctcactacattgcccagtctggtcttgaactcttggcctcaagcaatcctcccaccttggcctcccagagtgctgggattatgggcagaagccagcatacgcaacctaaattattttcttttacttaatctaatttgagctacataactatattttagaataggtaatagcacatattttatcatcttgctgatgaagttttggaagctgaagtttagagaaatgagttaacttgccaaagccacacaggtaataagtaactaggtcagtattcaaatttagtgtttgttttactacaccatactgttgcaaaaagagcaagataaaccacttcctttacttttccaatgtccacagtgtttcctgtgagcaacttggatcttttctatcctccacccccatcacctcacaccatggcaagagattcttactgaacccttcccggagccggcttcagatagggggtcctagaaaacagctaagcatgctgtcagccacactgtctattagtgcttagaaataaactaacagtctaactgcttagaactattatttgtaatatgatgttagttaacctgaaagcttcaagactcagagaaagccaacaggattatcctaaacgtagtcgctctttaatcccagttaaataattccctaagtagcaatacaagtttttgtatgattagtacagagaatgagaaacaaccagggtaggaagtcagtagatacttgctatattaccaatatgatctctctggcccttggtaatatacatgtgcttggcattgctgaatgtcataggcctaaatcccaaggcccattagagaatacttcaaaaggataaggcatagcagaaaatgaattcatcggttatttaggcttttcttagcttagacaaccttcaagtaccagaaagtgtcaggtgaaggaagtttagagtctgtcccagagtcctttttctgcttacgcctcgtgtttctgggcacagttgtatctcagtagacctggagcatagtcttctgatggaggcgagtgctggctgcttttcagcctgtgaggccagctgctattgctgtattacgggagatagcgtgattgagagaattccttatgcacaagatccttccttttctcagctgttgtcataggcttgagctgagtttatctgtttttcttcctgaagggtctagaaactccagcagagctggtatagtgttctaaatgatcacttggaagaccagagggcaaagcctctaccatgtagctgcttctagccaagttgaattccagagtagctacatacagctgtgtgggaggccatgctctgcaaatggatatagttagctcaagaattctaagctgctctctattgtcagtaatgtgtggaatgaagtatcctcacaattcatgtatatttctatgcctggtgttgtttgtttgacacaagtttcctttcataggcatcctgagatgtactaaagacatatattttcaagttggaatgacagtggcatacatttaaaagaggatttatttgaggctaggttgattgtataccacctagtttttataattatgtatgtgtcttcctcctctccccactagaatgtaagcctcttgattatcagagctgtgttttacactcaataccttccataaaacctgacagcccctggtaagacataagcattcagtaagtgtttttgaatgaaaaactgagtcatcactacttaactatggaatcttatatcagactcttgtttttttttttttttgggagacagattttgccgcccaggctggagtgcagtggtgcgacctcagctcacggcaacttccgcctcctgggttcaagtgattctcttgcctcagcctcctgggtggctgggactacaggtgcgtgccaccacacccagctaatttttgtatttttagtggagacggggtctcgtcatgttggccaggctggtcttgaactcctggcctcaagtgatctgcccgcctcggcttcccaaagtgctgggattacagacgtgagccaccgtgccctgccagactcttgtattatattattaacatgatctaaattatttattcatcaaaccacttggttttatatactttttttttttttttttttttagtgtagagacaagattttcatcatgttgcccaggctggtcttgaactcctaggttcaagcaatccgcctggctctgcctcccaaaatgctgggatcataggcgtgagccatcacgcccagccatggttttatgtagttttgttatatgagttattgtgaaggtgaccaagtcaaatgacttttaggtgtaaaagggtgttttgatctactgtagagtttgcttcctattccttaagtaaaataagtttgatccaggccagtgtttttggattaaacttctcagagcatcccaaagagcagtttgataaaaccctgagtctaaattatagaaggattaaaagttgaaacttgctgttttcttgagctgttgtggaaggtgaaacctggcctggcttcatgtgttggcaaatatttcctctgatctgcccttccaccgatggatgcaaataacttaaattttttgagcaccagattcattcaatatatttttttaacaacatacttaaagcctagtttaccctattcccctgttgtaccacctgctagcagacatactaagatcgtttatttaactgaaggaaaattaatttacagtgaaaaaactgcagcgttagtgaaggcatagagatctcttgtggacaatatttttgagtctttattgattagacttcattgtgacttaattaattgtaatactgcatgagcattttattactgggaacgcaaaacccaggcttacataatgcttctgatggagaatgtaacctgcagctactgccaaaaagcttctacttagaggcaaacaactctgccctgataggcttactcatcaagaaccacacagcatcttgcttggctaaaagcactttgtttagaaccaatggggcaagggattaaattggctcacccaccaagtctccatataccgaggggctcagagtcctcaaagcagttttctcataccttttgagacacactgcaccgccagagagaaaaatctatgtagtgctttcatgtcagtgaatgtagaaatcacagctgatgtcagaaaagaggttaagaactacttcagagtgaaacaggccagccgtgttcattcccatgacctaacataactaaaaaccagtagataaatagtggtactgccctatttattattagccttttcaaaccagctgtctcctggcttatggcaaccctaaatagaaaaataaaagaaggacattccaagtggaaggacttcagagatatggataatagtcaacatttattgaccactttctatgtaccaggcactgttgcattaccttatttaatgttcagaacaactgtctgaggtaagctgttttatgaggtaaactgtatgagaggttatttgataaataagaaaactgaggcatgataaggttaagtaacatgcccaagatgcacatctagtaagtggcaaagctgagatttgaacccaggcagtctggcttcagagaccatctaaccatatgtgtttgtattttcattctcaataaatacatagtaagttagtccaagaatcaagagagtcatagaatggatatatttgtctgcatcgggattacttactgaaaaacgagtagcaggaactctgtattggacctggaggcagaattttcttaaactgtaatgactgatactaggagtcaaaagatactagaatgtaaaccacaagatggacagcctcctgtaaaacagtatagcaagccaggatcttttcagggttgggctagagctaaatcttggcatccctaccctttaggccaggatttcctgatttctgaattttaattctggcagcatcatgcccacctagaaaaactgatcgaaagtaaggaagttcaagaaataggtgtcatttttctaataaatggatatacatgggtcaaaaccttttctttgtggtctgtctcgggttgataaacttggtaaaactgaagagaaaagcctctcagtgcatgtttattgattcctaaagaaacttttcttatgggctccatctctttgcgaaagtgttccaggccatctccctatggcctctatgttcagtcactgaaagtgtctcacagaatttagagatataaagaactttatttctattccaggatattctgattacaataatttgcagaaaccactagggttggaatttatagttaaatggataattctccaccttcttttctgatatcttactgttggaatatcatttttgaaattttactgaagtgtgggacttccatttttcttcccccgagcaactgaaaataaatgtttcaaaacatgacagttttttcttagtgccattgtgtcaagagaagctaatctcaatgcttattttttatgagtcggatcttactgcagtcagtgctgtcataggttaagttccaaggttgtgtattttctttgtttgtgtaaaactgtggcattgactacatccttgtcaggcttggtggcatgcacctgtaatcccaacaactcaggaggctgagatgggaagattgtttgaggccgggagatcaaggtggccagcctgggcaacatagcaagaccctgtctctaaaaaataaaaataaaaaaaatagccagatgtcactttgggaggccgagatgggcagatcacgaggtcaggagatcaagaccatcctggctaacacggtgaaaccccacctctactaaaaatacaaaaaattagctgggcgtggtggcatgcacctgtagtcccagcaactcaggaggcatattatcgtttatgaggcaggataatcatttgaacccgggaggcgaggttgcagtgagccgagatcgcactgctacactccagcctgggcgacagagcgagactccatcaaaaaaaaaaaaaaaaagccagatgtggtggtgtgtgcctgtagtctcagctactggagaagctgaggcaggaggatcacttgagcccaggggttcgaggctacagtgagctatgattgcacccagcctggccaacagaatgagactccatttcaaaataaaaataaataactagtcctttaacttggtatttagaaatgtttatttctattatagcagtaatatgtcaaaatttaatgtatagaataaaagcattccaatccttataacaccattgttctagcagtacccaaaataacaaaatttcagtgcaacaacaaaatccctgtattttgtattattatagttaacatttatacaatctctgaatgtatctataggttagcacatttactgtatgttatttatatatacaaatgtcattttttttttttaagacagagtctcactctgtcacccaggctggaatgcagtggcacaatctcggctcactgcaacctctgcctcccgggttcaagtgattctcctgcctcagcctcctgagtagctggaattacaggcacacgccaccatgcctggctaatttttgtatttttagtagagactgtgtttcaccatgttggccaggctggtcttgaactcctggcctcaagtgatctgcctgtctcgggctcccagagtgctgggattataggcgtgagccaccatgccgggcccaaatgtcttattttgaggaccatttgtctatttgtttacatttttaaatagtgactatgttaaataaataggtttgatcttagctggcagttgacattgacagtgtttcttgagcgtattaataaaacatcatttttagggcttagtccacaagcagagtgaagattcctaactctggctggcttcttagcaaaagaaggtatcttggcagaaaacacccctggtttcttattgatttactttttaattatttctgcagggatcatagcactgcaagatagtcacactgttctgtccatgttataacaagatcaggacattataacagactttattttcttttcatgaggaaaaacagcatgttttgtgtgcagtttgtcttttaggaaaaggcaggcagcattaaagaggtgctctgagacaaacattttttaaatccagaacatctaaaatacagggatagactcttatcaaagccatgtggctccatcctgagattgctgttgcaggccatccattggtcttgttctgtttgctataatagcatcacttctcccccagggctggtacccgagctggacaaagtgagtggataacagcatcaagcagtgtattgcatagcatccttgttctgaaaactttaagactttaatgtcatttaacttttaaaaggtttttgtcaagtaattcattttccatagaaacatgtttcagagatttaatcgccaatttatttttgtttcctttttagattttgaaatttagaaaaaatagaaccctctttgaagtgagaattgtgccagaagcaattcattactaagaagtaaacatttttaagaagtttgtttaaattattgaaaatatagaactcttgggctgggtgctttagaattacctttgaacacacctaccattgactggaccaagtacataagaaactagatcatccccttcttctgagcacctgtaagcagcatgcactttcttgcctgcaagaaagcctttctgtgccttctggtacacagatgtcttctgtttccaccagctcaaagcagctttatgtggtcagaaagaatccatgactcagtttcttctatgccattgctcaccacagagctggaaaggattgttttgccatgttctgttctttggtgtcacatgcagggtttcagggacaaatggctttccctccttcataggatcagcctgaagagtctgatgatctggttccttaaatttttacctatctcctcttatctttgatccttgattcgggaagccttctgtttcaagccttccatcatagtcttcatcaccttgcaacaactagagtatataaataagtttgctctaccacagtgtatttaatcctcaccagcaaaattatgaataagacaacgctccccatttagtgttctcatgtccctgcctcattaatccatccaacttgccgtctccccttaaagctagttcttggtctttgcaccatctatttgcctggcccattttgtactaacctagcttgtgggtgattctgtcatgatggaacctgtgaagatgacatggcatctgatctgccagaggagagaattgttttggtttgttttcataacccagaataccaataatgtgtttattttaggtaccatgtaggttaagagctccctggagtaagactgaccagaatttgtattctgctttggcctcttattatctgatcaagtttctcaacttctctgattttaaattctctttgtctataaaattgagataatagtattgggttggtttgtgaagtagatgcttaaattaacttaaagggtttagcactttgcctatcatgtaaatggtcaataaatgttagtaatgattaaataatattgttgaatgaattgctctattagtctttcattctcttcttccctattttttttactcttttctatgtatctttctctcatttttgctctcttggtatgccaaagggacattactattttcagtcaaatccacacggcttatggagaagacttatctcccaagaattgttttggtttgttgtaaccacttagagaaatttgttttattatcaaggacaaaaaaaaagaaaaaaaatgttgctttcacagatacggactcacactggctatgtcaacttaattctcattttaggaccctgcccatacagcagctctctccccacaaagtcatccaaatgcctggcagcgcagcagggcaaggcctgtgctgaacatcctctagttaacgttctgttggcagatcaggtttcctgggcccacagtgactctcactgcggagaccgcttggcgtcttgcatggagcagatgaaagcagctctgaagggaagctgcttctctggcacacacaagcagaggagcatattcttgcattgcccaaagtggttcagtttcatttagcatcagaggccctgccttttgggtgggagcaaataatggggcccttttattttttatttatttatttattttatttatttatttttttagagacggagtctcgctctgtcgcccaggctggagtgcagtggtgcgatctcggctcactgcaagctccgcctcccaggttcacgccattctcctacctcagcctcccgggtagctgggattacaggtgtgtaccaccacacccagctaatttttgtatttttagtagaaacagggttttaccatgttggccaggctggtctcgaactcctagcctcaagcaatctgcccacctcagcttcccaaagtgctgggattacagacgtgagccaccatgcctggccaacagggaccttttagacaataaaatagagtagttcttggtatctggaaaagttgatgttttgtttaatgtgagggctccatctttccatgcttgtaaattgaatgtcctgtgggtgattgtgttcttaggtttgagagcatctattcccctcgttttcaccctgtttccatgttttatgtagaatggtgtcttcaaatctcatctgaatttaatttcatgaactacatgacacttaggaaatatgaattgatgatgatactctagctttctgcattttgtcatattttccatctgcaccacatatgaaaaatgttaaatttctgttccttggcacgttcgatattatgtaggatagtcaagattaaaaagctcttgcccttgacactgtaaccaagaattgttttggttcttaatctggggcctgtagacaccagggtctgggggatctatgcaggcttcataggacatcgttgagtagtctaaagttacatgcaaggtcttgtgtataaattcttgtgcagatttttttttttttttggagaattttcaaggcatctgaggccaaataatggttaaggatgactgaatagaggtttcaagatcctgaaattgaactagatatatcttctaattaggaattattatggtactgtttttggtttggttgtgtgtgtggtggtgttgttgttattgttgtttgcttttaaggaaattgccttggaaaaaatctgttttaaagcaagcctgtaactgaacaccattcagctttggtcatcttatgcactaaattgtgtgtggagaccaaaggaaaacaggagagtgccatctagaggccttaacaacagtttggtcctagccttctccctacacaggagtctttaacaacttcctaaattaagaacacttttgtcctcttaagtaactgcaaacgataaacatatgtgtcaatgacatttataatctatacaggtgctgctacagttgtggctctagccttactactctggaaatgtaattttaataaagcgtactgttgtagatggcatttactttattctataggaatgtagaagtctttgagatgtacactgcatttgaatatagttttaattgtaaagcaacaacaaattgatgcctgatgtaagaaatcattttgatataggaactttgttgtattatcttttgaagttagagtaaattaaaataagagtaatttatcttagttacttgtagtattcttttcacaacagtaatatagaatggtgtttgccaaatggtatagaaattgaagagttgaattcaccctagaaaagtagatcaatttatatccatgtggagatgtataatagggtagtcaagagcacagcttagaagtcccaactttaccatttctttgccatgttgaatatgttaactttcaaaatcttgtttcttcttcatttataagtggagctaattatagtctctaagttaaggttgttgtgaaggttaaatgtaataaagttggtaagcacagtgcttggtatatcaaaagtagttttttgtaataatgtcttactgttgttgttattttcactggccagttttgttttcaggacggttgtgattaaatagaagcagaaaatttaaaaacctatagaaaattttattttaaaaaaattttcacaattacaatctcatttgattaaatactcaacaaatatttatttacatattcagtagatatttatgcagctcctaagtgtctagatataataaccattttaggtactggagagttgatactgggtacaacagaaagaaagacatgggccttgcattgcagtggaggagtcagacaataagtaaatacataaacaagatggtttcccaaagaaatcatttgcgtgaagacaatgaatgtgatgtaatagagagtgactggaggcccatcttagagtagatggttaaagaagagctttctgaggaagtgacgtttaaactcttacctgaatgacaaggagccaatcatatgaagatctgaggaatggccatttccactaaaggaaaaaacaaacaaaaaaacacatgtaaaggccattggatgagagtgtgttaaacatgtgcaaaaactagaaatgtgcatagtggcaggaaaccaggtcagagagggaagtagggggccaagcgcggtggctcacgcctgtaatcccagcactttgggaggctgaggcaggcggatcacttgaggtcagttgttcgagaccagcctggccaacatggtgaaacctcgcctctattaaagatgcaaaaattagctgggcgtggtggcacaggcctgtaatcccagctgctggagaagctgaggcaggagaatcacgtgaacccaggaggcggaggttgcagtgagccgagatcgcacactgcactccacagcctgggtgacagagcgagactctatgtaaaaaaaaaaaaaaaagggagagagagaagtaggagccttggaggcccaggactttagatttcattctgagggttatgggaagagattggagagttacaggcaaagtggtgatatgcccaaatttatgctttggaaaaattccttttgcctctctatagaaaacagattgtaatggagaaagaatggaagcagaaagaccgggtaggagacttttgcagcgtgtaagtcagaaatggtggcttggataaagatgttgaattaatggttcagtgctgaattagtgttgggggatttggatcccccaacaactctgcaccacaggggcagggtagcattgtggttaagagaaccaggtgaagagtcaggctatctggtttgacttaatagccatgtgaccttgacaagtttctttacctccctgtgcctggtttttgctattcctaaaatgggaacaatgatagtacattcctcctaggattgctgtgtagattaaatgaggaaataataattgtaaaatgctcagaagatgcatcaatagtgctgttttggtatcatcatcactgccttcatcacaactattactctcatcaccctcagtagccacattttatagatgagaaaacttagagggtggttttgaaatcagaatatacgtttcttgattttgaatccattgttctttctgcaatgtaatctgtaatacgagctcccagagaaaaatttctatagatctgaatatctgtagctcacagcccagttttaaatacctatgactatttaaataacattgagaagaaaatgataaataaggctagctgaatcccagggcataggagagaagtagcctgtggctctctccccacacaccttgtgccatcagaaattcaagttccctgagttttgaagaagggtattgcacacctaagccaaaagcattagtatgcgcgtggtggtacatttaggaggatagaactgaatattttgagaaccttgtaagatactgaatctctttagaggccattctactcttcattacttgtgttaaatagggccatatacataatataaataaatgaaatccatggattatccccagaccttttctggtcagccttttggtgaaggcaacaaccagactaccacacttgagtttctttttctccacctctctctgcctttgcttagccccttctggtggcataagcaacagaataggtaaggatcaaagagcaagagagacaaaattagaagcagggagttggatagcctccctgctggctttgcccctggttcctctactcccctggtgcctcccctcaccagagactgaaggcaggctgtttgtccattgcagaatgtgagcatttgatccgccatatgttggtgttagatcccaataagcgcctctccatggagcagatctgcaagcacaagtggatgaagctaggggacgccgatcccaactttgacagggtgagctgggaaccgctgctgcaggggactcctctgaaagctgctgcagcctcctttgcatgtgattgtaatcaggccataacctgaaaggcggacactgggaacaaactattatgtaacactaaagcagcacgtgaagcaagcaagaaggaatgtaaaaccagttaaactgctggagaatagtgatcatggttccctaccatgtgtccccaaattatcgtctgtttttggcttttgagatagcacagcctgcagttctgcagcttacctaccatggggatgtcgccttcctcttgtcttagtgtgctcaattcagtggcttctgtagcatgcttttatttaaaccactatggccatgccaggtatgccagggagctcaggaaacagtgagttgttgtctgtttacagctgatcactcagggctctcttccttagactttgtctgaggccaaaaatatcccaagccagagggcatggaacaggttggtcattatatatgctgtgccacatttgatgtggttaattggggggttgacagcttcctcctttttatgttacagttaatagctgaatgccaacaactaaaggaagaaagacaggtggaccccctgaatgaggatgtcctcttggccatggaggacatgggactggacaaagaacagacactgcaggtatctccgaaggagtggagaacaaagtgggatgtagcagttcctctaacctgctttttccatttttcgccttctcgggaacttgggccttttttttcctcctgtttttcttcctctgccccttcctgggccttggaaagaaggaaagaaggtgctttggctaatgttattactgaaagggttctggtcatcaacatgccatttcaccagggttttgtactcttttcccttctctcttggtagtcattaagatcagatgcctatgatcactatagtgcaatctacagcctgctgtgtgatcgacataagagacataaaaccctgcgtctcggagcacttcctagcatgccccgagccctggcctttcaagcaccagtcaatatccaggtgggcaataactccagtgacctagttcaggacaagtaacaccaggggggtaaaggttagctgttgctcactaaccctaagtcgagagtttcttgctcttccttacctctgtctcctcccatttgtcatctcttcctttgtcagaggccaatcaaagatctgaaccttttttgatggagaggagggatgagcaacaatagttgtgccttttgtttttttgaagaaatagcaaatcatgaggcgatgctatcctcttcacaggatgcttccttgttgtgacttctaagggccgatgaaccaaaaactttagtaatcagggaaacatagactttagcaatcaagactacttggaaagactcattatttctctctagtgttaaaggtatgcgtgtatatgtatgtactgctttccaggcggagcaggcaggtactgctatgaacatcagcgttccccaggtgcagctgatcaacccagagaaccaaattgtggaggcaagtagcaacctgtgggagctgtcagctgaaaccactttctttgccatatccttgcttcccttccttctgatttctaactcgatggtgtttccctccacctcagccggatgggacactgaatttggacagtgatgagggtgaagagccttcccctgaagcattggtgcgctatttgtcaatgaggaggcacacagtgggtgtggctgacccacggtgagtatccggccaacagccctcactaacactggggcaaagaattgtcacctgactttcagtgtctaccatggcacatttcctactacattgtatccccagaggagatctaatccagtggccaagtggacaaatgatatgatgtaacttatgtatgtagacaattaaaatttaaatgaataaggatccaaaatccaataacaacagtttcccaaagtgttttcccaaaatagtctttcatgatgttccctgctgcctgcacactggaaaaaatggactgaaggccagctcgccccatttttgttccacggttgaagactctcaacattaaaatagccttacctcttttctggattttttctttgctgagtaggaagagaaggttgtgggaagaattctcctgagaggtcaaatcagggcaaagctggttttcttataaatatctcttttcttccagtgaatttccaaaaaagactcccatgcctgctgatgtgcttgctttatgtctcttgttctcagcctatgatcaaataggcaataggggaacattctggctccacagactgagatagctttaaaggggtggagccctgagtcgctctgttagtggaaagatgtcttactttaaagtatgctgtaaaacctatcattgtagcaagatagccctgtacatctagtacttatctgtcctatcagcactgacaagagtaattgcattctttccctggtgaatcagttgctacttcaggcagccattatcttagtggatggcccatgttctccagaaacttggtgttcacctccaggatttgaaaacctgaactggactggtgccactatttcctcttggctcagagctgttggttttacatgaatggccaataaagaatagcaatccttcgtcccaaatagtaaaggagcagagagttaaattccacactttaggcttttgctttgctttaggatcttaaagagaaacataaattcaggaagaaaataaaataagttgtactgaacatagcaatgccatcagttttgggatataagcacttttgagtaagaatgttaactaaacttctctgtcattctgttttgtatcagcacggaagttatggaagatctgcagaagctcctacctggctttcctggagtcaacccccaggctccattcctgcaggtggcccctaatgtgaacttcatgcacaacctgttgcctatgcaaaacttgcaaccaaccgggcaacttgagtacaaggtacctagacatggaagagggctggctccagaagaaacaaacttgagcttcctttgagaggctatgaggcaccttccctaggacttaagggtttacttatagagaaagatgatttatcttgcaaagtagctcgggtgagcgggaagcgtcctctagtctctgtcatgacccatggctcccttaatttccatagatgagtggcttgcccctttctccccgccttcccctcatctcatggtccgtcctccccactctgttcctggcaggagcagtctctcctacagccgcccacgctacagctgttgaatggaatgggcccccttggccggagggcatcagatggaggagccaacatccaactgcatgcccagcagctgctgaagcgcccacggggaccctctccgcttgtcaccatgacaccagtgagtagcagcacagagcccaattcactgtctcagaggcttttgataaaaaggttgtgagcctggggttgggaacccagggccaacctacatgtctgaatttcctttttctccaaacttaggatgctccagcccattttcttcaggccagtagagttttccacactttatttttggcgaacttacttacttagccaagttatttctacattgaactccactcctggagagctttttcctcaatgggcgctcacaggtaccctggttaagtccagctgcactcctgccagcttggggcaggtagcagcctaactcagagccttctcccaggcaacctttccctgccagaaggccaaagtgcccttaaattaattggtttctagactggcttccaaaattgccttttcactaatgctttctccattgataaacacacctcacatgtttggcataacctggatcacttgatgatttgctcccacagctttagccgagtcagttatcttagtcacatgtccttcatatgatagtcacattcagagattttttttctcccttgggttctgtttattttcctgtcataggtcattcattcattcatttattcattcaatctcatagtaccataagattgggtagtaaatatatccatcacccttggagatgttgtaagggcagtgctgctttgaggacccttttccctcctttaatccatcatgggttaatcccttgtaaaatatagtaaaagtgaaacattagaacagtgaaaatttaaacacatataaaatacaaggcattttttattgagttcaacagacaaaattactctgttaaattgctaaaagtgtctctttatttatttttttaaattgctaaaagtttctgaaagccttttgttgatttctgtacttaccttatcatgaattggtaacaaaacagtttgtgggcatgggtccatgggccacactttcagtaatgaaagaattatatatcatagcccttgccatcactgacaagatcaacatatgtgaagtatttgactaatagtacaagatcatatgtgattaagtaccacagtaataacatggaaaattaggtggcagaggcattcagagatgggcaagacaggtttggaaggatcatggtcagctttatgggacgtggggtgacttactgtgtctactgtaactgtttttgccaaggtcgctaacaagttcttgttgataaattcagtggacatttttaaccttttatctttttggacgtcccaactgtattaatcactgttgacttcttttttccttgaaatattttctgttcttggtgtctgtggcaccacattccctgtgttttcccccacctctccttttcacatttcctttctgcttgttccttgaggttggcaaaacccagagttttatcctaggccctattcccatgtcctttgatgtactctctctggatgagtttgtccactcctgtaatttcagttactctctgattctccagcccagaatgctcctctgagttctacacatacgtgtacatgactgcctatgggatagatttagttggttattccacaagtattcacaactttaattcagcatgtcccaaatgaacttaccatgactctgtaaaacctgctcctcctcttgggtgacagtgaatggcactgtcattctccgggttacacaagctagggatgtgaattttatctttaactcttgtctttcttatttgccatatcaagtcagttgtccagtgcctgtgaatgaaacatcctctccactttcctttccttaactcaggtcactgtcatccattgtgtagatgaacaccacggcatcctaactgacttctttgcttccagtcatgtcccctgatccctgccaccagcccttttcacactgcagctagagtaagctggcttttgcaaatataaatctttataacatcatgcccctgcttaaaatcctttagtgattcaccactgttcttcctcaaacttcttagtgtgttattcaagaccatttgtcactggccacagcgttcctctcctgcctcatctacagccacttcctgcctcaccctgttcactccacccttgtagaactgtgggaagggatccaggaaccctgggagctttccgacaaaattattccaggagtgttttgttttgttttgttttgtaattagccattttgtaaaatactcttttataataattgaagtgtgatttttgttctagtgactggggcatggtgatgatgtgggcacccaggctatgggtagctagcaaggatgcagatgggaaagtcacagtgatacaagcattgtggtggttctcatttcactcacatgttttggcgagtaacaactattttaaagcagtgaattgatactacacaattgtatcttatgtaccaaaatgtaatttcagtaattcactatgctttcctggagttaagacatttaaactccggaaatcacattaatatgaaacaacaggtcaagtcctagacatttcaggtaaacaatcttctactgtattttcgggtcctcaaacacctacaggccttctcttttcttctgcctggaaacctgtaactcctgtccctctttgcctgaccagctcctgtgcatccttcaggttcctgctaggtgctacctcctccaggatgccttccttaattcccaaacacccccattagaagacttgatcatgctattttgtaattgtttacttgtctctatcctctactagactgtaaaatgagggcaaggtctatgtctgtaaattcacattttatcctgtaacagtaagcatttggctatttgttagattaataaatgaatgaatgaagataaataagaggaagaaattctaattagtattacctaagcaaggtaaaaatggaaaaataggtatatgaaaatcctgtataacccaggagtctagaaaagttctgtaaataagaaagttaacagaaagtcctgccccaagcccagttactagagtaagaggcatgacagaataagctgccaccttgagcttttccttcctgtctctcttcaggcagtgccagcagttacccctgtggacgaggagagctcagacggggagccagaccaggaagctgtgcagaggtaatgtgacatctggcagtgcttgcagaagcccctgggcaggctcccctgcaaccagcgaaaggtcacctctgcccaaggaggtggtagagtgcagcttcaacatttgtgtggtctctttgctcaagccagatggcatgttccaccccacatggaagtaacagaagactacccagaaaatgtcatttctgtaagcaccattggaagtcccctaagtgacagcaataaccataagaactttttctttcctccctccttcttccttgtcccctgccttcatattgcaactctgatagtattcacaaggcacaaagcctgctcgtacctgccaagaactgtttactgaaaaggaattggagatgtgggatgacagtgatcctagctagtctggccatggacctctggcatggacttttcctttccaggagaatgaatacctcttgtactgtttgctgtgtgcttcttccacccccttgtaccaacaaagagatattgaaaaagagaatatgggattcgggccagggacagatgcaaatatccattgtttacagaaccttgttgagagatgcctaactcacagagaacggcagtgaccatcaggcatgctgtactgttcatttggcctcagttccgttagccctggtccttagctccatgcatgcccccttgtgggagttgattttcttattatccggggagggggtttcaccagaatccagcatgtattttcccagaaatacaggtgttcttcaagattatatgttttttcctttgagggaagttgaaataaaatggttttcatgggcttttggggaactttgggtgtctttatccaatggttattaaaacattaatggcttactctttggcaagttcacataacactgattactctacagtctgttaactgattttagctgaaaggggcaagatagttaagaatgaaatgagaccattttttaagaacctgccagttgctggctaggactctcatcctatccccagtagctctgtgtgagagctgctattcagaaagcagctggtcctatgtggaaagaaaaccatggcaaacaggggtgttggcaggtgggccagctccttctacagcttggccaatagaaggaaaattctggtaacttttttttttccttgatgctgttgtttctatagtttgctgataagagggtatataaggttacaaatgggccctactgggtcatgaagaaatgagaaatcaggaaatttactgcctttctaccttaaaagagacagcaatattttatcttctttgtcttagactttccttcctccaggtctaccttctttcttctttagaccaacatttcaagggtataatgcccatcagttttgatgtaataaaaaaggtgtagtgcctcttttattcatgcctccagaagagcagcagcggtggaggaagtcatccaccagacaaagagggacaatatcttattgatggtattaactaagtgctgggtctgaaagatcttccgaataaaagccatcagtttgggaactcttcgtcttgtgagactcttctgtttttattttttgccttgctttttccctccctaactaaacatttcatgtggttttatttcttcatcctccacagaatgttggttccccaaggacaacatcagtttttcttctctgatgattgagttatagtcaccaagcgagagggaaagggtggttttggaattcatttatcctcaaatggaaggatcagttttctgtgacctgtagtgaagaaagtctcaaacctggggcctgtgagatcgagagacatgcacagagtccttctgaatatctccccaggttcatctctaggaatagtccttagggctcatttcctctgacttgtattttggaaatttggagggaaaagatgaataaattaacatggagaaaataaattcttctaccgagtagaatgaagcaaggaaaagtgatctcatctttgtgagctagatctactttctctcttctcttcaatggctattcttaggttcaaaattcagccacttcattgtcaagccaacttctgttggccagttagacgtgtctcacttccatccaggcagggatctgtttgccatcaagccttcgtgagctctggcactatttcattgagtgctttggattaacttctaatgcttcttgtggaggaatattcctgtctgtcttttttactatgaaatgtgctcctgcttgttgcaggtacttggcaaataggtccaaaagacatacactggccatgaccaaccctacagctgagatcccaccggacctacaacggcagctaggacagcagcctttccgttcccgggtctggcctcctcacctggtacctgatcagcatcggtgagtagccacatgagctgtgcgagctccttgaggctcatcggacaggcacccttctgattagtctcacagcgacggtgactagcatcgtggctttaaatagaagccagctgtcatcctgaactcacatcttctcagctccttgcagtaagcaatgcacagggcaaaggttttttactgcgccctggagcaatgcgagattcctctctcccattaccttgcagacctgtttattgtctgcatttgattcccatgattctagatgttgattcatagataaaattgaacttgagacctgcaagaaagtgaaactctcagaaggccacctggaaacaggaagatttttagccatatcgatagacttgacctttaataatccatcaccttcaaaagaatgagcatttcatatcgtgttaccattgaaccgccagcctggaaatgaagacaaagccccttctgaatagtagagcagagatcctcttgagcgatgtatttaagaggtcattctttcaatattctgatggcaaaaatcttttgctaggttcggttatggttataatccattctcttgaagaaataaaagcaagtttaaccttcctgaccaagaaaacttcattgactccaagtaagcctggaagcagctgcggaatgacactttgctagttgaagaagatgattatcttctgtgactatcttgatgactaaaaatctcagtcttggccactccgaagctatccccaagctcatggcccacacgttcaaagccaccaccagttactagagcgtattttatttctgtcttttggggaggacactgaaaagcagccttgggaaggttgaaaagcaatcagattccaaggaaactaggtttatatatgtggtgttatgaaatcttgcagccagcttgcactggcaagcttgacacattttttttactgaggctggttacccatttggcatcaacataatcagcagaggcaagtgaactctgagcagagtgggacataattagtgccacgttggaaccctaaaagaaggaagataagctttcataaatgactatgagtaacttggtaaaaatggtctgtcaggagtagcaagaatgacaattctcaaataaaactctgatggcacagaaagacaggctttttctaatgaaagtctctcaggacttacagtgttcgtacacactaaagagcactttgaggccaggcacggtggttcacgcctgcaatcccagcactttgggaggccgaggcgggtggatcacaaggtcaggagttcgagaccagcctggccaatatggtgaaaccccatctctactaaaaatacaaaaattagccgggtgtggcggtgggcgtctgtagtcccagctactcgggaagctaaggcaggagaattgcttgaacccgggaggcagacgttgcagtgagccgagatcatgccactgcactccagcctgggcaacagagtgagactccgtctcaataaataaataaataaagagcactttgagtgattactggagacctgccttctcctcccctatacgtttcctgtgatttctcataacttcaagctctacactggtatctaatacaccctttattccttcttttctccttgtctccttcttcccttcctccacagcctgacacttaatgtttcagcccttgtctgagtctgttgtttagctgaagtcctttaggtatccttgttgaatgctaggtgttcctcaggaggtcttcttatgaggggaacatgaagatcgtcacatttccagagtcaggctttatcacagaccctatattctgttgacatttgttactcaaggaggtccacactggaccacagctctgtctgtgtgatatccaccctgcctagagtcattgtcaaggccttgcctgctggaaatctatctgctgtctgttttcatgtgaacctttttggtgttttgagggttgcctgtggccaagcctatttgaattggaagaaaatgatgttttatgagtggcaaattgcataagatggggcatttgtgcaaacccagcatgtcttgatgggatcactatacaaatatgcagcaaaagagattaaagccagtcttcaggggaaatgagaaactttccaaggctataaaacatggaatacgggtggcctgcatgggttcttgaattcctttcattttctggaggaaatgattaaagaacagtatatatagctatccttctggggtagaagagatgaagttcaacatggaaacagaagagtggtctaatcaaccttttcatttctggaaatgtgtaatttaaggttaaaaatgttttaaaaagtgtaactaaaaaatttttttaaactaacacaagatagattttatccaggtgggaaaccaagtccctccttgaagagtatagtgtgggagtatcagcctaatgcgaggccatcctgaatttgagtgtgattgcaaataaaaataaaatcaagcacaattgatacttatcagtgcttctcaaatgagcaactgcatcagaaccgttcctctgaggttactgtgctggactgacctgggtatcagtctcttcacaacctgagcttctgaaaaagtcatgaaatacctggacctgggattttctgtgatgggagagaattatttttgtgcagaaagactgtattgctacttgaagaacatggctttctgaggggatcagaaacatgtccatttcagaaaacattgaaagcataggaatcaaattttaggagaaaatagtacttacttgcttctacttcaacctgaagtagaaacagaaatgacaagttataaggaaatgcttctcaacacagccttcatgatccctgttcctggattgtggcccgccaaattcatttgttttttgtgttgctgaaccaaatacatgttcgtgctcatttcattagctcactgctgggtcaagcctcaggtagagtctgaaacaaaagccatcattagcaaagacagggtaaaaggctttcacctgctgccagaactctctggatacctctgcacggtcattagattcctcctggtcccgcgctgtctgcattgtatttgaactcgcttgttaacctgcttcctgagctgtggttctgcttcagtcccaaatgaatcactggcaaggtagcacatcatttcatccaaagttcagtgtaatggcatctctgccctggacatgaaaccctgatcctttccatctgctactggaatgctgctgccttggcagtcttttatctgcttacctcagcccataaacatctctttctgatcatcaggtcacaagagtaggtgttagcttctaaccccgatgctgtcttaggcattccttatcaatagcttgttctttctttctgtaagattctggctgtgttccagttgagcagtggggtctttgaaggtaatccatatgattcctctttcattaggaggttgggtgagtgctgctgctctgagaagttgattttcacagtaggtgaccttatttgttgaccaggtacgtgcaggatctcaaggcccacattccttaagaatttgttgtctccatcccaggatcagaagtcttcattttcccccaccccaatcgccaccttctattttctgtcacagaacctatgagttctaggccagacctttgaccacaaaactgactgttgtttccctctggccatacggagatcattgctcagggaaaactttggctcaaatggtgaatttaaggtttctaaaggcactagatagacatatgattataaaagcaagagcttctgtacagtctggcctggaggatattgagaagcttttctctctggcctagtgtatttataagaactggatgtacttgatctcgggacctcaccaggcttggaaagtaagccaaccgaaggtaagtagaaatggaagatgtacacctggagccctctaaagggaagcaggctagggaaacgactgatgtctggaaatggcatgaaagtggcataatatgcagggctacctgggcagccagccgtctttatgttcatctggaacagcagtccctgtgtgatttggtcaaagcccctgagtcctagcctctaaccttctcttcccatatattcagctctacctacaaggactccaacactctgcacctccctacggagcgtttctcccctgtgcgccggttctcagatggggctgcgagcatccaggccttcaaagctcacctggaaaaaatgggcaacaacagcagcatcaaacagctgcagcaggtaatggaagaggtggcaggcatccctggaggagcatgggtgacagaggccaggattgcaggaggactggggtggtaaacgtaccccttttatgtcagcaacattgcagttttataggttaaaaaagtatagctttctgggccgggcgcagtggatcccgcctataatcccagcactttgggaggccaacgtgggaggattgcttgagccctgaagttctagaccagcctaggcaacgtggcaaaccctttctcccccaaaagattaaaaattagcatagtcccagctactcctgaggctgagatgggaggatcacttgaacctgggaggtagaggttgtagtaagctaagatcacacccctgcactccatcctggcaacagaacgagactctgtcttaaaagaaaaagaaagtatagctttctaatgcactttctttactttgtgttatgtacagccctccccaggatcaaacttccttcccctgtgaagggactaaatttttctcctgtctctagttcattggaaaggaatttctgggcttgggtttctgtgggaaccaccagagaaggtgctactttttttttttttttttgagaccaagtcttgctctgtcacccaggctggagtgcagtggcacaatctcagctcactgcatcgtccgcctcctgggttctagagattctcctgcctcagcatcctgggtagctgggactacaggcgtgcaccaccatgccagctaatttttgtatttttagtagagacagggtttcaccatgttgaccaggctatgtctcgaacttctgacctcaggtgatccgcccgtctcggcctcccaaagtgctaggattacaggcgtgagccaccttgcgcgcctggcactctgcgcatgatttaggatgctgggtcttgattaaacctgctgtacattgttaccacctggcattctctccaggtggtatggaacggcactctcagaggaaggaaatgtacctctatatgtttctgtactataaagattctataaagagccaatttcctttctgccttcctgatgaccaagcttccaatggcgtgtgctttgtacacagatttcacattggacacttgtactcatacaaaggccatccttgatgttttccattcattcatacagaacaggatgtgaatctatttagtgcaccagatacttaggtaaatgagttaattgctcatcaaggacactgttctcttgcggctctttctgcccatgagagcttggaggcagatctgcatctgctgaaatcactgcatgaggcgggtctggctgcatcccatctgtattaactactttcccttcaggagtgtgagcagctgcagaagatgtacggggggcagattgatgaaagaaccctggagaagacccagcagcagcatatgttataccagcaggagcagcaccatcaaattctccagcaacaaattcaagtaggccctcactctttgctttctccaacttgtttggagtttgctttcaggctgatttgcctgtgcattttggaggagaccactcagtgcaaagtggatttgaggtctgtttatggttgacatgtttgagtaaaggtaatcagaccttctggtgaacaacaaaagcataaatctgagacacagatagttctttctgtttcttcccttcctgagaatagctctgagtaatcttcaagctcacaataatttttttcctttccccatatatgttttaggactctatctgtcctcctcagccatctccacctcttcaggctgcatgtgaaaatcagccagccctccttacccatcagctccagaggtatgagtcattttgtgttgtgcctaagccattgtctcgatagcctggtacccttggcttgactcactgggagatatggactgacttgagcattcatcttgcaagaatctatttgaaaaggagagaaaccactgtaaatttcaggagccttcttgaaatcccaacttcctgtgccacttcatttccttagccccatgagcaaagtaatctgatatctaatacaggagccagacataggcccacaatgaactctgccattttggctgagttcttttcaaacaagatgtagataggttttaaatacactgtggtggatggcttatgtatatttttctaacatgaggcttatcaaagtaaaaaaaaatagtttccactgatatatgttgtatggctgaaacttaagattgtactgtcaccttaggaagcttctttgtgtatctcttttgttatttttaaggttaaggattcagccttcaagcccaccccccaaccaccccaacaaccatctcttcaggcagcccagtaatagtcctccccccatgagcagtgccatgatccagcctcacggtgagtggagaggttcagaccaaacagttcattttatgccacatgggaaaaaatgatggtctcagttttgagcaccataaaccatttgaaaggcagaataacatagtattcaggggtatggactctagagccaagctgctttggtttgcatcctggttccatcagtttcttagctgtaaacccttgggtaagttaacttgacttcttgaattagtccatttcacactgctctaaagaactgactgagactgggtaattgataaaggaaagaggtttaattgactcacagttccacatggctggggaggcctcagaaaacttacaaccatggcagaaggagaagcaaggctcatcttccatggtggcaggagagagattgcacaggggaaagcgccagaaacttatcagacaaccagatctcaagaattccctcattatcatgagaacagcatggaggaaactgccccgtgatccagtcgcctcccaccaggtccctcccttgacacatggggactacacttcaagatgtgggtacacacagagccaaaccatattacttctcaaatgtcaactgaggataattatggtacagtatgtagatatacgtaaaacacttggaacagtctctggcacaaaatagttctcaataaaggtttactattattaatatttttaacaaaacctccagccctaccaaataaaaagcagctaccagaaccttccttatagacatgcctccgtttggctgtctactatacacgtgggcccctctcttgtgggtgtacagatgggagtgaagataagtataatgtgactgtgagtcttcagaggtcagccgtcttaggatctcttgagtaacactccacgagctacgtccctagtcagtctccctaggatccttgagaagagtctgaattggcctctaggctcttcctacttaaagtggggtcccccagccaccaatattgggagaaaaagtaagatctcaggtcgtattccagacctgttagagtctgttttttttttttttgagatggagtctccccctgtcacccaggctggagtgcagtggtatgatctcggctcactgcaacctccacctccgggttcaaatgattctcctgcctcagcctcccaagtagctgggattacaggcgcccgccaccacacccagctaatttttgtatttttagtagagacagggtttcgccatggtggccaggctggtctcgaactcctgacctcatgatccgcccacctcggcctcccaagtgctgggattacaggtgtgagccaccacgcccggcctagagtctgcatttttaaccagatgccaggccatttgtgtgcatgtgaaagttcaagaagcactgcctagatccgagttaccccatgtaatccatggaccagcttttaagggaacttgttggaaacacaaattcttaggggcccatcctgacctactgaatcagagtttgaaacagaattatatagataggacccaggaatcttctgtttaacaagttctccagacttgtcctatgctcagtgcagtttgagaagcactgttctagctggtatgtcgtctgagtattctcattagctctcattacttctggctggctggtggcctgggcacttggtcactctgaggttcctttctctccaggggctgcatcttcttcccagtttcaaggcttaccttcccgcagtgcaatctttcagcagcaacctgagaactgttcctctcctcccaacgtggcactaacctgcttgggtatgcagcagcctgctcagtcacagcaggtcaccatccaagtccaagagcctgttgacatgctcagcaacatgccaggcacagctgcaggctccagtgggcgcggcatctccatcagccccagtgctggtcagatgcagatgcagcaccgtaccaacctgatggccaccctcagctatgggcaccgtcccttgtccaagcagctgagtgctgacagtgcagaggctcacaggtaagaccgcctaacgtcacccagccatctatgcatgggatccaggtgggaggaagccccttagcagagtgagagaaaaggagggaaggagaatgggtctgactaggctgtgctcttgtttcacgctttctaaaatcaggatgctgggtttggaatgaacttgtcagctttttattgacccagggttaaaattctaatgagactgaggtggaaaatgggaaagctaccttattatttgctaccttattatttgcttgcaaagaagaaaatggcctgttagaggaatgtataaaaattccagttccccttttcttgaagggagcatcttgaagttgcttccttcaaaatgagctagatctattacccacgcagtgccctcagtcccttggaggttactggacaagccagtaatggaataaatagggacaatgcatacatctgccacttctctgtcacaccacagttctctgtaccagtgggttctccctactgaggaggaggagctgttcccaggaagtctagtacttgttacatggatgtctggtactcccttttgtgtctgcagcttgaacgtgaatcggttctcccctgctaactacgaccaggcgcatttacacccccatctgttttcggaccagtcccggggttcccccagcagctacagcccttcaacaggagtggggttctctccaacccaagccctgaaagtccctccacttgaccaattccccaccttccctcccagtgcacatcagcagccgccacactataccacgtcggcactacagcaggccctgctgtctcccacgccgccagactatacaagacaccagcaggtaccccacatccttcaaggactgctttctccccggcattcgctcaccggccactcggacatccggctgcccccaacagagtttgcacagctcattaaaaggcagcagcaacaacggcagcagcagcagcaacagcagcaacagcaagaataccaggaactgttcaggcacatgaaccaaggggatgcggggagtctggctcccagccttgggggacagagcatgacagagcgccaggctttatcttatcaaaatgctgactcttatcaccatcacaccagcccccagcatctgctacaaatcagggcacaagaatgtgtctcacaggcttcctcacccaccccgccccacgggtatgctcaccagccggcactgatgcattcagagagcatggaggaggactgctcgtgtgagggggccaaggatggcttccaagacagtaagagttcaagtacattgaccaaaggttgccatgacagccctctgctcttgagtaccggtggacctggggaccctgaatctttgctaggaactgtgagtcatgcccaagaattggggatacatccctatggtcatcagccaactgctgcattcagtaaaaataaggtgcccagcagaggtaagtgtctcctcacagtggaagtcctgggccagtctgccctaatcaactgactcagtaatgttatcttttttcagctagtattctgtgttcctaagaaaaaaagaatttctgagcttcacgaccttcttggggagaagcatgtaggaagtgggtattggtgggcaaggggtccattttcaaaatcaaaggaccatgatacaaaattaacacttagtcaataagatagatgatccatttcccttattcataccacagtttcttggaatccagaaattcctgactgccatccaaacagctaactttaaacttgtgcaatagaaaaaaagtcagcccaacataatttagtgtaaatagtgtgggaacaagagtcagagcaccttaattctgctcttgcagctatcataaatacgataactttgtcatttaatccctctgattctgattttcctcatctgtgaagaaggtgttggaggaacaatggagtatcttacggtgtatctgtggagatgaaaacatgtatatatgtgtttgtttctacataatgtttgcatgagagagagaggcacattcagatcatctgaaatgtttgagttcagtgcataaatgtgaggtattattactctggtcgttttattagtgagctaaatgcagaatattacagcatcataagggcccccattatcatttcattttgtaccactttataattaatgagtatattcattatcattctgaaggagatcaggattgcaattagtaagttatacttagaaaatatagttccattagcatcacggcattcatcctagacaaaatcaggaatcttgcaatttaccactcctcaccattgccatccaagggaataaaaagcaatttatctgtaaactgtacaaccctgagactgagcagtttcttccatccttccctccccggaactacctgcatctcctgccctgtcatttaaagtcagtgctgaaaactcagccccagggggaattcggtcctgcagcacagagcagtagagaaggccttgctgtaaagcggtgtctgtgaaaacgccttggtggtgccaggttgtactcattatgcgctcttaggggggaattgttgcctgaaatgccaattcaatcctgaccttttgaacagatgggtgtcatccagctgagagattggctccagtgagatgtactgtgttcacctgtggctgctgtattcttagtagacataggagggtgggagctttcagaaccagatcataggtggaatggttaacagacctgagggtgtttaggattgggaggaaaaactaagagaaacatcacgcttgttagatggaagaagggattagatttttctgggttcatattatggggcagaaccaagatcaagatagaagttgcagcaaatttcaacaccctgtggaagacctttataagaactctccagaacaggctgccttagcagcctgggagctttctaacagaggtgggataatggtatggggatgttgtggaaaagattcccctgcaaatggaagcttccagcagattagcacactatagttggcatgaaaaggagatgagctcacgtttctttttttttttttttttgagacggagtcttgctctgtcacccaggctggagtgcagtggtgcgatctcagctcactgcaagctctgcctacaatgctcacgccattctcctgcctcagcctcccgagtagctgggactacatgtgcccgccaccacgcccggctaattttttgtatttttagtagagacagggtttcaccgtgttagccaggatggtctcgatctcctgacctcgtgatccgcacgccttggcctcccaaagtgctgggattacaggcatgagccaccgcgcccggctgagctcacatgtgccaggcaccaaatgctgttcacatacggattcatttaatccttacaacaaccctacaaccctagaataaccaactcttattcccatttaccagtgaaacagcggaggcacagagattaagtaacttgtccccaaagtcaagaggtagtcaggggcagctgaacataagagtactcacactagctgtcactgacacgagagatgctcaccgagcaagtcccgggtgtgcagggcactgaggaaggagcatagctgcagcaaacagtgctgctgccctccacccctgccccaggctgagttaccgtgtactttcaatacttcctgaaatgtttttcttcaaaaattattttctctagtttctctttaccttccttcctgtgtgacttgtgtgtgtagaaagtctggagagcataattccccattgtcccctgattgtcagaggaccccttcttcggcaggcacgctagtctgttgagtacccactgttggtgcaagtgctgtgggcgcaccagaggagggagagattacttcaatccaaggaacaacgtaggtttccagcaataagtagcctgtgggttgggtcctggtggatgaagaaggtttgccatttggatctagaggagaagcaagagaaaagaacaatgggtgagactgtctcaaggaattttccaaggacagcagcaggcttggctggtttgaagtacagtgtacatgaaggcattagtagaagctaaggacagaggttttctaaaatgcatcgtctagattcagctgtactgtgaaaaaaactcaagttttttttttttttttttttttttttggcagagtctcacactgtcacccatgctggagtgcagtggcacgatctcggctcactgcaacctacccctcctgggttcaagcgattctcctgcctcagcctcctaagtagctaggattacaggtgtgcactaccgcacccggctaatttttttttgtagagacggggtttcaccatgttggccaggctggtcttgaactcctgacttcaagtgatccaaccacctcggcctcacaaagtgctgggattacaggcatgagccaccatgcctggctttcaggtttcttttaaaaactccagagcttacatttttactttactgaaaaaatcatcagataatttgctgttcacttctgtcacgaaaggcttataatgctgtgcccccaccactctgcaggcaagtgggggagctcactcttctcaacctttttgccaggaaggaatgcctgctgtttcttttaatggtccctccatctcaactgtgttgcacaagactctactgtaggtgctgtgagaatgcagagatgaaaggataacctgtcctcagggagcttctactctactaggggatgtaaaacaagctcataaacagctttgctatgaagtgctaggtactgagtgctgcaagaagtatcactgagaagagcagagctagtgtgatcttcttagcatttcttaagggtagatgaacagggattgttggtgttatttagttactttttgagtcagggtcttgctctgtcacctaggctagagtgcagtggtgcaaccacggttcactgcagcctcgacctcctgggctcaagcagtcctcccacctcaacctcctgagcagctgggactacaggcgcgtgccactacacccagctaattttttttttcctttggtatagatggggtcttgctatgtcgccggggctgatcttgaactcctgggctcaaacaatcctcccttcttggcctcccaaaatgctggtattacaggcatgagccaccacacccagccatattggtattagtaaaggaaaattagatgccatcatatcagtgtccatggttacctatttccttgatggcgatttgccaccagccagtatgaggccaggcactgtgagagcactaagcaggcagcatgccaaaggtttcttcccaatttgtagaagtgtcaggatttcacatgccccatgctgtccgtaatctccctgcctgccaccctagaaggaaaaacaaggtttgtctttcttctatagtggtacacacacttgatctttttgactttgcaaataaacacagcagcataaccaatctacaccatgagattaccaactggaactcacaaagaaaaccacatcctcttctctgagctcagtcagcctcagctttattactcaggcctcatagagcagtaaaatgctgacagagtgggaggggttaccccagaacctttaaggggagtatgcagtcacgttattgctcccattttctctcaaaacccagtaagtgagtcaggacgagtcaacattgacagattcaatagagaattgtgcaggttgccccaaagttccccgggaaggtgggtggcgtgcattgtgtccatttgtgcacttttccccttgtgtgatcggacgatcatcccacctctgcactctcttagctttagtttgataaatattcgagcatgtagctcttgggaaccatctttcctccatgactttggtagctgctgaattggcataaagggttgccaaagatttgatcctgaatgtcatgttccttgggcagtgggttagtctgtttgtaccccccaaaatggtcgatagggtcttatttatagagtgtcacaaaggacttctagactcagggtcagcattcttaccaaaaatcagacttgacttatttggtcttttacagttgattaaagactctttcacatgtgttgtcttttcgagcccccaaacaaccgtcatttttcagatcaggaaccttgaggagaagctgaaagatttgccaacactttgctggtgagggagctgggtcctgacttcaagttttctgatcccctggtcatgtattttttcctttacgcctccttgcccactctgcaccctccaagcacagctgccaagtgaaagatgctagcccttccaggtctttgacctactgatgatactgaaacttgagcagacagagccctggggtatcccctgactcctattaatactctttttcatctggcttttaactgacatttgtctgtcctgaatcagaggcttctcctggaaattaaagtttccctgagtcatttgttcatttacatatgggtatattgtccctcataattctgcaagcagggttctgtgattaaatcaatttccttgtttgtttttgtcagctgactcagcacgtccttatgcactcagaaataacatctctaaactgaatataaatcatgctagactttattgagcctttacagtgtagtaacctctatgaagcactccacacccatggagtcagtccagttgtacagataactaagacccagcaaagcaagataacttgcccgagctcctgctcctcaggaagcagctaagccaggattcacggccaactcttcctgaccccagaacttgtgctcatgacccttgtgctcaactccagcttggctgagggatgagctctgggctgggagtcaggaaggccccctacatgatttgtcaggtggttgcttgctctgtcttggtgcctacaggcatcagacctgaaggcggggaagacagcagacaaggcagagcccaaaggagggtgggtgttttggtttgcagaggccccattctcagggataaaaacaagtctgagagagggaaggaaaagagccttaaaagacacagcaaacaaaccaaaacactgaggcctccagaagaggcaggaaggctccaaccaggactatatacattttgttagctttgctgtttcctcatggttagtaatgatgttttaaaaatctttaaacaggagagcgctcatgtttgtccttgcggagagcaaagagatgcaactgatgagatttgcatccaactatataatcaggcttaaaggaaaaaagcaccccgaggaattgagtggatgatgttagttatcaaagaagacaatataggtttttgaaaaagtaagaagcggctgctcgcattgcttcttggcaaagcagacagaatcaccatttcctcactcccacacaaccatgttgccccacttcctgccagtggtttttggttggccctggcgccaacatgcgagcagtgcccactgagaggaattgggcagagtgggtaggacgggcgggctaatcccacagagcaagtcctggtgtaggttttcttttatcttctctctgctggcttttagctttctgtagcaaaatagttggcttctggctgttccttttacctctttgctcagagaactttcaaaagatttctcacttgccatcatctttggtagctgggaagctccctcctctaatttttctccagaatgtcttgcattactagcaatgggcatgtcagttagctcccctccctttccatcctgcctctgcccctaagtcccagcctaaccttaatcattatagaaaaccattgaaatacagagacctgaaatcctttacccaacattcaagaagtatgctttactttcattatttaaatagatcattggaatggcacagttagcattacagctgtgtttgctattaagagcttttgttttaaacttagtcccaccaagagtcagttcatccaagataagctcagtagtttccaagaagctttaactcagaaaaccaaccaagcaaacacaacttattttcaagtcccaggcttttaaagactgaagtcaaaagtgctaccaggaggatcctgtcaacataggtgtggctttgatagtcttcttgactatccttgatcaagaagaagtactcattcctttttctctccaattctagtccatagaatggtatgctctgacaggatagtaacccatattaagagagtatttatttttattattcttttttgagatagagtctcactctgttgcccaggctggagtgcagtggcatggtcttggctcactgcaatctctgccttctgagttcaagcaattcccctgcctcagcctcctgagtagctgggactacaggtgcacaccaccacacccagctaatttttgtaattttagtagaggtggggtttcaccatgttggccaggctggtctcaaactcctgacctcaggtgatccacccgccccggcctcccaaaatgctgggattacacgcacccggcctaaagagcatttactgacatcagtgaaagagatcataatactgggtataggacaatgttctagaacactgaagattcacagacatacatgagatatagttcttgcctgcaaagaatttatagtctaatgtgaatgattaagtacataattgaacatggtaccaaggataatgttagagcaatcagagacaaagtcttttgaagtttaaaggaagagatgatctatttctgtttgaaaggaaaagtttaataaaaacaatagcatatgataatggatgtagaatgatgagttgctttggattggcaggagtgaaggcagaagaatcagttatttgcagatagaaggaacagtgagggcaaatgcatagaattgtgcatagatggggaacagttaagtggtcccatttgactagagcttagaatgtatggagaggggaatatgagacactgattggaagatagcccagggcagtgttgtaaaatgaaagtgaatggactacagaacggttggtctttgtagggtagtagtaggggattggttatgaggctagcataataatccaggcaagaggtaatcaggtttccatgagattggcaacaaagggactgaagtgaccagcattgcagagttagattcagcaccaggagtaaggaatcaatagtggccccaagagcttatgcctggaagatttggaaaatgaggcatcaaaacgacaatgtctgaaggagtagcaggttatgggggaagtggatgggtttggaattggacatggtaagtgttacatgctggttagatatccagggaaagatacctagtaagtagctggaagtatggatctggggcttaaaggagcacttcagtaattctttacataaaggcagtacagccatgaaaatagatgatgttgccagagtaagtgtggggagagagaaggtcaaggacaaaaatgtggagagtacttgcttagaaagggtggaggggccatcaaaggagtcagaagcagcagttagagaagtagaaagaggagagtagcagcgtggtacactgaggtcaccgggggaggagagaggacgcagccagccacagaacagatgcatcctctagggctagagggtcctgaaagctccgagagtaattctcatgtgcatttaggtttgggaatagatcactgttaattcaacagagaaatgaaagaagagaaggttcggtggggtccagccatgccctgttacgtggaattttttccctaagggtgtggtcccctcccctacagctcgtcttttggagggctggtccaggctcctctaagccatgacgccggctgaggatcagcggttggtgtacatgatctcctcagccttgcccattgtcccttgcaagacatttcttggatgggagtttccagtgctgggagaagttccgccccactgactctattctgctgtgtctcctcagagcctgtcatagggaactgcatggatagaagttctccaggacaagcagtggagctgccggatcacaatgggctcgggtacccagcacgcccctccgtccatgagcaccacaggccccgggccctccagagacaccacacgatccagaacagcgacgatgcttatgtatgttggtcccacctgctgcacagaggtggatcctcccagtcccagccttgaaacagagtatagtgatgtggggtagcctctcttggccgctctcctcagtcagcattcagcctttctggaaacggtggggagcatttctttttttttcttttttgagatggagtctcactctgtcgcccaggcgggaggacagtggcgcgatatcagctcactgcaacttctacctccccagttcaagtgacttttgtgcctcagcttcctgagtagctgggactacaggtgcctgccaccacacctggctaatttttgtatttttagtaggcatggggttttaccatgttggctaggctggtctcgaattcctgagctcaggcaattcgcctaccttaagagcattttctttgagtcaccctaacagaccaaaccttaattcaagtagaatctatgctccaaattttagaccaaagaatcagaaatagttgccatctgttccctgtagttttggttattaaacctcttctcagtctaaactcaggccccagcaaatgagcccataggcttctggttatttttcagcagctacattgagcttactcagatcaggggagctggtgggcctcagcaaagttttgttttcctagggtggtgctagtctagtagctagccacatgtggctattcaaatctaaaccaattaaaattaaaaacaatttaaaattcagttcctcagtcacaccagttacactttattttttattattattattttttgagacagagtcttgctctgtcacccaggttggagtgcagtggcgcaatctcggctcactgcaagctccgcctcccgggttcacgccattctcctgcctcaacctcccgagtagctgggactacaggcgcccgccacccttttttgtatttttagtagagctaaatttttttagcccagctaatttttcgtatttttagtagagacggggtttcaccgtgttagccaggatggtctcgatctcctgacctcatgatccaccagcctcagcctcccaaagtgctgggattacaggcatgagccaccgtgcccagcccagtcacactttaagtgctcagtagccacttgtggctactggttaccatattggacaggacagagaacatttccatcactgcagagtgtgactggacggtgctgtcctaagacaaagtcccagtggagatggggataggtcagaaacctggttttagaaggccatgtaggtatcaagatgtcaccaccagctgagatttgccacatccgccccaccctcagcccccccactgggcagagccaagcagcttcccacactgtcgctgtggagcaccccctttgggtggtgctttagaggaaggagtctggagtggggccccgggctgtcttttgcctgggctccttcagaaggaccagctgtctctaggggttgcctgagagtggtgtcttgtgtgcttatttcttctcttaactgttttctgcaggtacagctggataacttgccaggaatgagtctcgtggctgggaaagcacttagctctgcccggatgtcggatgcagttctcagtcagtcttcgctcatgggcagccagcagtttcaggatggggaaaatgagggtgaggagccttatgcatggggcactccagagaagttcctggaggggcctccctccatcttccgtaactgctcctctcttcgtaggaagagctcatggggaggtagagccacagcatcccacaggttctggacacagcccctttccccactggtcttccctgagtgtgggtgtgtaaaggaggtgtggcttctggccagatggcacagggctctcccattcctgtctctcatctctgtgatgatatgccttcaatcactttttccagttctgcttagagggcatcaggtcctaatggcacatttctacctcttcttggagccagtcaagggagggtgtcataacaaataataggcgtaggccttgggcggggcaggtctgccaccagtcccaaggctgtccttttcaggctctgcaggtgaggcacttggctttctggaccccgagatcctcatctgtaaagtggcaaaaacgatagagcctttatcctacattgtgccctgagggctggctggcttagtgagtatcaagtgcttagcacagtgtctggaagacagacagtgcccaggaatgggtgcctgcaggcagtaaaattattctccctttcactctttaagaggtgatcctttctgaaggagtcctctatcttctctcacactacagtagttgatcttacctaaggatgggaaagggtaaaggaaaagggaaaaaagcagaacaggtagaggagaatataggaagaatcttggcccccgcccatcgtcactcaacaccttgagggcctgctgtgagctagaattcagggctgggagtcaggctgtgggatgctcgacaggttgccttcaattcctcctctctctcccccttgctctcctagtcccccagttccctgccaacctcatacgttctttttggtcttgcagaatgtggggcaagcctgggaggtcatgagcacccagacctgagtgatggcagccagcatttaaactcctcttgctatccatctacgtgtattacagacattctgctcagctacaagcaccccgaagtctccttcagcatggagcaggcaggcgtgtaacaagaaacagagagtgagtgtcaccctggccagagccaaaccagccctgtggcccagtgcctgctcccaatcccatcaggagcttcagcccatgtgttgtggtggccagtgcagtcgacagtaccacgcctcccctcgtggccttcacagtttcttgcttttcattaacgacgctgctagttttagggcgcgaggtaggggtgggggtgtgcagaagaaatgctaaacacagtctcttggttcggttatgggaataagacacaagactcgccgtgtgttacaggtgctctagccttcatagcgacagaagtgagctacggctccagaggatgcaggtgacctccggtcagcataatgaggaaaggaggaagtccttaaactcagtcctaaaagacaaaacctggcaggaaaatatgtccagccatattttttaaggccatacagaagcaagtggcaggatattccagattagggaaatgtgtgatgagaggcccatggtagaaagaatggggaaattggcttgtttggctggagtaatgcaaagagtacacagcaggcaccattggttgtatctggaaaatccttgacagaagaggcctgatgaaagggaagccacttggcaaatccacatcagagcctcagtatggcaagctacctgaacacctgagggaaagtaaacccgttgcattttttaaaaggttttaaatggaatatttgagcctttctcttttcaaactaattctcctctgtgtctgctttattccaggttttgtgtacagcttgggaatgaaaaggttgattgtaaacccacagtatctagcagcgttgtgccaaattgcccttgtgtttctctccacccaaaatatcacagctgctttcctcacatttggttcatccgtgtgctgttcttttgggttctgagagggttttgccatgtttgcttgtatgaccaagtcaccaaggaaataaacaggaaggaaatccatgttctccatcttttgtgaaagtatatttgagttggtggttttttgttttgtttgggggtttgtgttttgttttgtttttggtatgttttcttccagaggtgatatactttcttttttttcttcctttcttttttttctttcgttccttttttgaaacaggagagcaaagcagttagagttcagaggccagcggcctcagggccactccctccctagccttcatcagcagagcaccctccatccccctgcattgctcttctgtgaaagcaaatactaaaggatgccatcctctggaatcctaatggcaggcaaagggagagaggaagggtgacggcttctggcacttagaaaacaaaaagaacaaaaaaagagaaacccccaagcctggaacgcagagaggtctttactgctgggatccacggaaaacatgtctgtcctagccaagatcatatgaagagtttggcacggaggctgagaatgacctggcatagatggtttgccagttaggatgtctcaatttgagcctttgcttttggtggataactcagctcccctcttgtaacctggaaagttggttgcctttatcatcctgctggttttatccatggactgaacacccaacagcagtgcactatgctttctatggcatctttcattctcattttatattgtgctataaaaaggattgtttctccatatatatattatatatgtgtgtatatatataatataatatatgtgtatatatatattatatatataatatataatataatatattatatatatattatatatataatatatatataaaatatatatatatatgctctcctctttcagcctctttgtcacagggaagaagtgtaggaggttgccttgggccctgcctctctcctaacctcctcttccccactgggtaccctcagcccctatattttaattcttgatcatgtagaaattgtttttggtaaatgttgatattattgttattatcattattaataaataaagagaaaaggaatttttgtttaaatgagaaatgtttaaccagattctgttctatttgaattgtgacttgcaccttttgttcaaagtatttcctttaggcattgtaattgtgaacagctcttacttgtgccagtgacagatgcagtggtctcctttccccagttgaagcagtgcatacgcagtagctattatttgtgttatctttatttctcttcattgttagaaaccaaagtcttctctgctggctggggctgagagagggtctgggttatctccttctgatcttcaaaacaagagagagaccttgaatacactgactcttccaccctttttttttctgggaaaggagagcaagaggtcccgagtcccctcctagtctttcatcctgaatttgcacagaggaaagcgggtgcccggcatggccatcctgatgttgctggcgggatccccatgcaccttgtccttctccactgatactggcagctcggctcctggacccaagatcccttgagtggaattctgcagtgcaagagcccttcgtgggagctgtcccatgtttccatggtccccagtctcccctccacttggtggggtcaccaactactcaccagaagggggcttaccaagaaagccctaaaaagctgttgacttatctgcgcttgttccaactcttatgcccccaacctgccctaccaccaccacgcgctcagcctgatgtgtttacatggtactgtatgtatgggagagcagactgcaccctccagcaacaacagatgaaagccagtgagcctactaaccgtgccatcttgcaaactacactttaaaaaaaactcattgctttgtattgtagtaaccaatatgtgcagtatacgttgaatgtatatgaacatactttcctatttctgttctttgaaaatgtcagaaatatttttttctttctcattttatgttgaactaaaaaggattaaaaaaaaaatctccaga

SEQ ID NO: 15803 - DNA, 88253 bp, Homo sapiens
taagacccagctggatgaagaaaacttgaagaagattttccgggaagttcaaattatgaagatgctttgccacccccatatcatcaggctctaccaggtaggatcattagtgtatagcagatagctgcaaagaacccagaatattgtatgtatggctccctttgaagaaatgtgggtgggtgaacatctgtgactttttttgtttctatgttaatcctgctatctttcctacccttctgtttacgcgctcagcacttagtatcctcaagtttcccctggccatttactagtacgttttccttacccaggtaggtctttttaatttgttctttaaaatttgatgccattcttagcaacaactacacaaaatgttaattcagaagatgatgagaatttattttatttagttcagagttctaacacaggatgggaaactcaaaaagaagagaatttagagaggtgaaaagttagagatgaatataacatttttttaatagcattatttgaatactagtttctgtgatcatgttataaattgttatggcaaaggactgcttcttggatcaatcaaaacctacctcttttctattctaataggattgtagacttagttttccaaggtagtaattattttgataatcaagagaccagatcaagtgaccagatctctccaataggagagatttctattttagttttttttttttttggtcttcccaagaaacatgcatatttcatgccatcatcaaaatgattccctagcataactacaaaagcagtaaatctgatggctggaatttcaagcgggataggaggagaggaccttgccttagcaggctggtgaaagagatattttgggagaggtggggcttcgggatgcttctcaaattgcaatgtgttggcagccgagaactttgcctctgcataggcccaactctacttgctgctttctgccagaacagccatctcttagttctgaaggacgtggccacccacttggttattttgctgctgttagtctgcagtaaatggttactggcccagacataggaccatgtgtaaaagtggagaaagtacacccaaggctctatgggcaagctttcgtagcctcttagttttatggaaaagaaaacatgttgtgatattaacatgtgtggttaaaactacagcgttagagctcttccctggcatcagctgctcacataatgaaattaggtcaacaggagcagacctgttgaaatttatcagcctaaattatgttgaacaacgcctaccttctgccccacaagcaaacttatgaaagcttcctggtgctgcctgaagacctatatctgtgagctcacaggtgtctaacctcagcttccttcctatcctgatgggctgaataaatttcttgaccttaccttttaaaataaatcatctttaaataattgtggggcttaggctgacctttctcaagaggttgacttatagctattacccttgtaactgaattctgcaagtttgcctgtcttacccaagattagcctatgaggatttccacaggtccagtgctagctttgagcagtgccttctttcaagctttaattttgctttctggcagctgggttttttaaattttatttatttatttatttatttatttttgagacgaagtctcactctgttgcccgggctggagtgcagtggcatgatctctgctcactgcagcctgcgcctcctgggttcaagtgattctactgcctcagccttccaagtagctgggatcacaggcatgtgccaccacgcccagctaatttttgtatttttagtagaaacggggtttcactgtgttggccaggctggtctcgaactcctaatctcaagtgatccacccacctcggcctcccaaagtgctgggattacaggcgtgagccactgcgcctggccggaactgaatttttaattgtatttagttttaattaatttaagtgtaaaactaaaaataattttaaaaagaattgttgaaatgatagtattttggatatattggggtaaataaaaagtagtattagaattatcttcaccttttcctttttcctttttaaatgtggctactagaaaagttaaaataatatatgcagttcatattatatttctattggacagcactgttgtagaaagatatacaataagcagagaacagtgttcctctggggattgagatggaggagattgggaagaggaaagcctttggtcttttgttttataatgagtgtatgtaatcattattacttttaaaaatgtttgatggaaaatgtaaaaaggaagaaaggactgacaacatactacaatgaattttaaaaaggagcaacaaagggaccaagacaaaacacaaatcacttacgttactttaaaaggttgagtattttaaattactgttctctttttttcaaataaatgggcagtggaaaggaaagttgtcatttctataaaaaaaagaaagacatatgtgatttctgtggcgttcttatgtgactcccattattttccccaaaggcttctttttgctttagtttttttttttttgatttgatagggcatttttgtgcttcagatgattgatgttgaatctgaagtttaagttttggttcttgacaacttctttgcctctcagttttatggagcttaagagattgcagagacctcatggaacatcaaaaagcctatctctctcaagcaataaatgtttcctacttttaagaacttggaggaatatctaattttccctttcttcttaataacatttatatttgtttccccaaaaatgttttaaattttctttaatctatagtggttattaatatttcaaatgagaaaagaggagtcattagtttatcttcctgtatcagcctgtcatttgtgtcactgtctgtcactttcctgcctttgcaccaggttatggagacagaacggatgatttatctggtgacagaatatgctagtggaggggaaatatttggtaagtacatttattgcattctttaaacagctattgagcacactatggcaaacctaaaatagctgttcagtgcctttgtcacttgagcagcagtcacttgatgctgttcttcaatcctgccattttctatcaacaaaggcattttaatttgttttgattaatctagtaaaatccctttaacacatttgtttccttagcaaaggtgttttgtttatttcagtcaggcgctgacagttgagattaaagatctccaaaaacaagcatcctttctgaacgtgggacttagggtctttcctgtttgcaggttttaattgaggttaccaagtgcgacagaactcacacaagtgtgtgggcctctgttgtgtcagaaagagccacttagagcacataatctcacccgagtgcgttccttaaactttgtttaaatataacatgtaactatattatttaccatgtgttcacagttcccctcagtaattcttgtaattttgggggttctgccttcagtagctatattttcctctcacacttagctttagcacaatgtcagaaataagcaagagactttgttactgacaaatctgatttttaagatgctaaaaactgacaaaacgattttttttctaacagtgataaatggagccaagtagagttaaagggtaaacttccaaatctaaattgatgtgtcttttattttttcttttggcaactaactacagagaaaagtttctttatatactttatttgtctaatttcctcattttaaaaaaaatttatcaatatgaacacttgctagtttaaaattttttaatttttattttaaacatttgctccttcctgcacgataaaatgtatttaaaagcatagaatcacttttaaaatgaatcttcttattaatgactagtcagttgtggctgcatggatgtgtgtgtgtgtgtgtttgtgtttttaaagtttccctagcgatctagtgtttttttgtgtgtcaaagtatctttagggtaagtgctagtcctttttaaaagaggtatcattatttcttaattttatatttaattggctttgtatatgtgattagttaatgtcaaagctaatggtgatagaaatttatactcaatatagtatgggaggggatactttattttaaagaaatgaaagcattacaagatttgaaggatagcattgtttgtcaagaaggtatagtaggccttcactatgtatgataattatatgccaatcatgtgccttggagatgctgactcaattaagacactggttttcctttccgtggagaaatctggtggaaaacagacagggaaatcaacatattactttgaagatgagaatggaaactgtaaaactctgtatagtagagaacagtagtgcagatggcagtttggttaactcttggagatcagggaaatcttcctggagggcatggttatatggaaatttatgaaccagaaaatgaaagcacaagagagaatatttggagagagagaaatagcagtcatgttattgggagactatactatggtctgacattccaggcacatgttatgataaacctgccttaattaagatcacaaatgtatacaaaggcaaatagaaaactttcattatctagataaggttttttctttggacaaggtattgctctgctgccctggctggaatgcagtggtgcaatcctagctcactgcagcctcgaactcctgggctcaagtgatcctcctgcctcagccatctgagtagctgatactatagctgtgcactagcatacctggctaatttttaaatttttagtagagacgggggtctcactatattgttcaggctggaagatacctttttacaagttttattctataaaaagtcaaacatctcccaaatccttgagctgcctgttaggtattttatttcatagaacgacatttattggtggggaaacaatggtaatttggggagaaaaaagatcatgtcatcttaatgtttgtaataaaaaaagacccaaacacagggcacatcaatctaccttactctttaagaaagcagattttatttatttatttatttatttatttatttatttatttatttattcttttttgagctagggtcttggctctgttgaccaggtgaagtgcagtaacgggatcacagctcagtgcacccccagcttcctgggctcaagtaatcctcctgccttagcttcctgagtagctgggactgtaggtatacaccaccatgccaggctaatttttaaatttttatagcgattaggtctcattatgttgcccaggctggttgtgaactcctgggctgtagcaatcctcctgccttggcctcccaaagtgttgggattataggcatgagctactgcacccagcaggaagcagtattagagagatccgtttcttggtcctggacttcatgtgaatgtacctcaagggatgaacaaacagaataccacttctgataatgttattttaaaaacaaaatattttaggttggtgaaaaagtaattgtggcttttgtcattgaaagtaatggcaaaaaccgcaattacttttgcaccaacctataattatatattgtaacacatattatgtaatatataacaatagaatttgaaatgttattattgatactattaagtaatattattataaaagatccagatgtggaagaaaatagtgtattacctaaagaaattattgagactgcacagggatagaactgtctcatgagctctgatttttaaaaatgtctgtgtaaaaaagatgaaaggggcttagtcaagaaaacctgggctttggatgtatttagacctaggtttgaatcagatctctgtcacctatttgcccttttacttagagcaaattactagatgattctggtgcacaggttccaggtctgtataaggtaagatctagaatatttgtattatagttgtgaagattaaatgagatcgcatatatagagctctagcacagtgcttccttacgccttcatgtgagagagagatcaacttctgccgtcaaggtgtgaggagctctgctgacctgccttgcttgctgaaacaagtgaaaactattaaagaaaacaaaacccagtcatttaaagtctctggaaatcgtcctaagagtaagcagaaaatgaaggaacattattcaagaacatctgtgcaaattcggtaagaaacaaagtctggtcagcaaggtggaaattcccgtccaggctactgcagccaagaacgcagggcttccttctgtcaaaagacaaaattgcaagtttagtttgatgatcccagttggctttatttgcgattctagaatcggacaacatttcatttcatagaataagtgttccagtaagttgagcagaagagtttggcttatggacagaagggcttaagaagtctgaacagtgtattggttacttttaaacagaacaatagaaaattaaccagttaacatcaggttacttcgggctaccttttttagtaaggattaaagcagagggaacttcatcattgtgccagttaaagattttagactgggctgtttgggaaattggctgttatctctttctcctgatttctcaggtcagataacaacctagttttcgctttggaactttagcatgagtgactccattttgatatttagtttggtctgttggtgcctagtgcagaagtttattcgaaaacaatggtctcctgtaatttttatttgtcacttctcctcaattctctccagcatctgaatagcagctttcttcccaggaggatttggacatcagcaattctcattctgccccgagctgcctattgctgagtcctggagaagtgcagttaagagatgggggccccttcttctactcagcccccacttgtggaacttgatcaggtatgccgagaatactaggacccagatcactcttgccttgggtattaagacagtggtttcactgtcttttgctgctaggagaggcaagctgagaggaccccaggctgctgtcctcccccgctctccatccaccaaactctcagttcctagagtgggagcgtcactcagagaagtttgctgttgtccccaaccccagctccagagccctaactctgagatttttacctgtggagaaaaacaaaccataaaacagctcctaatttcttcccaaaggaactgacttcatttgcaacagggagtgaagaagttcaaacctgattgtactctcaagaacagtagagggaaaagaaaaaagaaaaagaacagtggaggttgtggtaaaggacatttgagaagagattcatgaaacaggccaaatggtaggtttgctagttcgcagggggagaaccaatgaattaatttagaaagagcttctctgggattagaatgaaaataaatcactggctgggtgcacacctgtaattctagctattcaggcaggaggatggctcgagcctaggagttggaggtcagcataggcaacatagggagaccctgtcttaaataaaaacaaaaataaaacaaaaaaacactgatggcaaaaattatttcttcaaaggaaccagaatttgattgtattgtttgtagaccaatttgtgccccagggcattattcaaaacaaaagggcaatcagccagcaactagtggagtttaacggctgagtatggtcagtaaatgagaggaagaaagtcctagcaaaaacactgtgatcccaaggtaactaactgtaggcataccgaagctgcctgttccagaggaatcacattagaggctgaacactgtaaatatggagaaataaacttcactagaagaatctagcttttagctgggcatggtggcatgcgcctgtagtcatagctccttaggttattgatacgagatctttctaactgtgggcattttacagctataaatttctctctaagcatgctttggctgcatatcatgagttttagtatgccgtattttcattttcattcatttgaaagtattttctgaattcacttttgatgtcttgtttcattatttatttattagtgtgttgtttaattttcacatatttgtgaatttcccgaatgtttcctactcttgatttccaatttcattccattatagttggttgtttttctatcctctatttcataatttctgctataatatttgttatttccttctttctgcttgcttcagttttagtttgttcttcctcttctagtgtcttgaagccaagcagaaagaaggaaataaagattatagcagaaattatgaaatagagaatagaaaaacaatagaggatatcagtgaaaccaaaagatagttctttgaaaaaatcgacaacattgacagatctttagctagattgacgagagagagaagagaaaaagagaagactgaaatgactagaatcagaagtgaaagaaaggaacattactacagtcccttaagaaacaaaaatgggctgggcatggtgactcacgcctataatcccagcactttggtatgctgaggtgggaggattgctttagcccaggagttcagtaccagcatggacaacatagtgagacctcatttctactaaacataaaaaattagccggatgtggtagcatgagcctgtggtcccagctacttaggaggctgaggcaggaggatcacttgagcccaggatgtcaaggctgcagtgagccatgattgtgccaatgcatttcagcctgggcaacagagcaagaccctgtcttaaaaaaaaataaaaatgattataaaggaatattatgaacaactatacatcaacaaatcagctgggcttggtggctcatgcctataatcctagcactttggggggctgaggtgagtggattgcttgacctcaggagttcaagaccagcctgggcaacatggtgaaacaccatctctacaaaaaaaaatagaaaaattagccatgcatggtggtgcacacctgtagtcccagctactcgagaggctgaagtgggaggatcacctgagcctaggaggtggaggttgcagtgagctatgattgcaccactgcactccagtctgggcaacagagtgagaccctgtctcaaaaaaaaaaaaaaagtcagcttagatgaaatggacaaattcctagaaagataccaactgttgaaacaactgacttaagaagaaatagaggccaggcacggtggctcatgcctgtaatcccagcactttgggaggctgaggtgggcagatcacgaggtcaggagatgagaccatcctggctaacacggtgaaaccccgtctctactaaaaatacaaaaaattagctgggcaaggtggtgggcacctgtagtcccagctacttgggaggctgaggcaggagaatggcgtgaacctgggaggcggaacttgcagtgagccgagatcgtgccactgcactccagcctggacaaaagagcaagactctgtctcaaaaaaaaaaaaaatacatacatacatacatacatacatacatacatacatatatatatatatatttccctagctaaagtaaaaaatggtgttctggttgcaaattgatagtctttacttcatttgacctctttgtagcatctgaattcttgactgtttccttctaaagctcttagttttgacttccacaaatgttcaacttctgattcttctattgttcggactgttccttcttagtatcttttgctgggcctcctttctctgactgctagaacatgttgacatgttgtagcatattctctgactttatatatatatataatatataaataataattatatataaaatatataaataattatatattgtatataaataataatttgtatataatatattatatataaataataatttatatataatatattatatataaataataatttatatattatatatatatttttttgagacgaagtctcactctgtggccatgctggagtgcagtggcgcaatctcggctcactgcaagctccacgtcccaggttcagaccattctgcctcagtctcccaagtagctgggactacaggcactcgccactatgcccggctaattttttgtatttttagtagagatgggttttcaccatgttagccaggatggtcttgatctcctgaccttgtgatctgcccgcctcagcctcccaaagtgctgggattacaggcgtgagccaacgctcctggcctggctagggaaatattaataaaatggcagaggtggagacagatgttaaagaagtggaggcattgggtgctattttgagaagcattgctctgaaggaaagaagggagaagacagtagtttgtacaggaagcaaggttgttgggagagagttctccacggatatctcacatttcttcatgtttcatgagtaaggcactgactgcctttgttctagactgttttctcaaggatgtttatatagtgagcacccttgaaagacagagatagtatctccctccacagctcaaagatctgtttattgcccagtgtgaaagattccctaagctccaagctcagggttcctctcctataatggacccgactgtgtgtgtaggcgtcatctggtcccctttgcagtgccctgtgaaaattagggcttggggaactgaagcaaatatgttgatgttcatgctgcttgctgtgccgtaagtgacaaagtcttttgtctctgacagaggggtttcctatcttctgccatcacccatgtaattgtggcaggttgagttattagcttgcagaaatggtgagatctcagaccctcttgatacttgacaggaaataaggaggggtttgttttattttgattcgtttaaatatgagacttgattacaggttgaggttgaagatgcagtagtggggaagatgagtttgaaaataattgatatggaaaacaatctctaaagcaagatcaatgaggaactgagggatgagcataattgcaagaaattagccttgcacatgaagaaggatagaagataaaggatgcatgtgggtgtaggcaattttttaggtagaagaatgtgaaaaagatgtttcatgcttttcatataattttctattgagagtagcagattatgttatcagatgaattaagggtgagagggtagagacctggatcagcatggagaaagtgaaattagctgcagggaggaatgagagagagggcaattaagaatagctaaataagttgattaaaggccttagagataggaaacagttaacttgttattccattatacagaattgagtgatttttttcccctaccaccaatgctcaattacctgtgtgtaaattgaataagacagacaattggactgatcctgtttagagtttacaggacatgtgcaaatgaagaggcaacaggtgacaagggttttgaggccactagcaataatgtaattaaagtgtgggcttttgggcttaggctgaagtgggttgggaaggcaagtgagaccaggatgactgatcttaaataagaatttttaaagctggctgggcatggtggatcatacctctaatcccagcactttgggaggcccaggcaggcagatcactggagcccaggagtttgaaaccagcctgggcaacatggagaaattctctgttatttaaaaaaaaaaaaaaaaaaaaaaaagaattcatgaagctacaggtctagatgaagttgaaaagcaagtgtgttagtgtgttgggcatatgaaggttggagagatgaaagtctaaaactacactgcccaacacgacagccactgtccacatgttgctgttgtgctcacgcctgtaatcccagcactttgggaggctgaggcgggcggatcacgaggtcaggagattgagaacatcctggctaacatggtgaaaccctgtctctactaaaaatacaaaaaatgagccaggtgtggtggcggacgcctgtagtcccagctactcaggaggctgaggcaggagaatgttgtgaacccgggaggcggagcttgcagtgagtcgagatccagccactgcactccagcctacgggacagagcgagactccgtctcaaaaaaaaaaaagaaaaaagaaatgtagctagtgcccctgaggaactgagttttgaatttaatttacatttaaatttaaaaactgaggtattatgaaaagttttaggccagctgtgagagttagccaactacagactaagagagcatagtctccaagatcacccctcactctgctgtcacctacaagttcaggaaattcccaaaaccggttcagtttgataaatagctagaaggattcacaaaattcactgaaagctaatatactcccggtttggtttaatacaggtaaaggatacagattaaaatcagccagggaaggaagtgcagagtccaggagaagtacgaaatgcagaacttttgttgtcctttccatgtggatacaagatatgttacactcctggtattgatgtgttacattgtgtacagagcagtacccatcagggaagctcagcccagcctctgtgttcagtgtttttattttacataagcctgattgattgattgattgattgctcacatgattgatctgtgtgtctcggtcaactgatgctcgtgacccaaagcccacacgtcaagtcacgctgttgtgcagccaacaatgtatatccagcctctaccctgagactatatgggtgtggcgaatcccagcctaaatcatgttattagactctctggcatgacccaaggctcccagacagagacactccgagcagacataacattccaagaacccagagactgcttcccagaagccaagggaaggccaggccttctctttgggtaaggccaagttcttcactctgcagagtctaaaatatttttctattaaacgcaactcttattttgataaaactacattacaccttggctatagacaacttagtattttagttgtgatacgcttataaagtataaaatacacagtggattttgaagacttactatgaaaaaagaaggtaccctatctcattgctattatttttattgattacattctgaaatgatcttttgatgtatttggttaaagtaagttactgattttcaaaatgagtgctttttttttttacttttaaatgtgattacaagaaaatctgaaattatataaatggcacacattgtattttatttgatagtgctaatttagaaggttaagataagagagggggaagtttagaatttcagagttaaaataatgtcaagcaaagacaagttcaagatgtggccataggaatagttgctatacattggtagagttctaggtcaccggagagaaagaaggctaaaggaaccatgaagcaaactgtcaaataagttatcctcattgatgttcacattccctaggtgatggcagaatttgagtggagggcgcaatagactacaaactaggtttcggtgagtgtctttgatgaatgtgaaggcaagagaggcagaaagggagtataccagctgcccaaacatatggcgtagtattgttagtggagaccttgaagaggttacattaattcctaatccctggtggaatattgtccctttttacctcaagaggcctgtaaaggaattgctagtcttagaggagttggttggaaaagtgattatcaatgggaggtgttggccccgatgtaaaagccctgctgcccttctttgccctctttgtccctccttaacttttgtgacccatctcaaatgttattccccctgtgaactctgctctgattttgccaaatagctaattacctttttttcttcactttgaacatacctctcctatagcactttttgaagtaattttttttttcatttctaagtttgtcttttactggtaatttagactctggtccatttctttttcctttgactattttccaaggggcttgattgaatccatgaatgtggtgcccacagatagagagggaagactatatatgctgaattcaatcacttatcaccacctccataactaccaatctggtctaagccaccatcatgtcttgctaagatcactgcagtagcctttaaatagtctctctgaatctgccctgacttcccccccgattatagctagaaggattcttttaaaattcaagtgggaccttaccactgagctacttctgttggctttcccatctatttggaataaatttataattcctactatagcctataagattatataatttggtctcctgctgtctctcaccacagctcctagcactctcctcctcacatcggcatctttctttttcattaaacccttcgctgtgctcccgctttaagaccatatattccatttcttcttcctgaattactcttttcctacatatccacatggctgtctctcctgtttcttgccagtctcttatcaaatgttatctcattagagaggtgtttgctcaccatgctgtctaaaatctcattcttcctactggcccattgctctgtagtctctgtcttgctttacttttctttttggtttttatcatgaactgacatatatttatttgtttttttactgtcttgagtcaataaaatttacgtgccattaaagactttgtcatttttgtttcctaccaaatcttcaatactcaaaatagtgcctacagggaatgcatgttccataaatatttattgataagttgaataaaatactaagtgaatgaaagaacatcactggattgctgattatggcgtttaagttttattcatctgtgtcttccttgtttaatgtagtgtctaacatatagtaggcactcagtaaatgtatttcattgtgtcataatgaaatataactaagtcaagcatggaatttgcatgttatttaataacatcttagttaaatgagtttttgacatggggaaagcaccttttttgggtaactgtatagagaaagacatattgaagattatgaattctaagcagtgtaataaatagacttcagtaattggttatttcatgaatatttactactcattcaattgacttatccagtttatttttgcatactattcagccttatattatgaaggagcagtgatgacagtgtgggtttatttaatgttacaaacagaattgagaaactggttagttttgtaaaccactaaatttataatttaaaacttccacactctgatatctttagatatatatccccaaacttcctatttgagaccatgaagtcataaatccagcactttatcaagcaaaatttcctgaataccaggcagaactcatgggcatttaaaacaaattactaatttaagaggagtctgttgaaatgtgtatgatttattatgaacattctcagtgtcttaaaaataatatttcttaatggtgccaacatgtatggaaccctgaacttctcacaaagccattcatttatgccataggtcactcaaaaactattaggacagaggatcagaaagactaacttgcataaccattgtgtacaagatactgtgttaagtgtttcacataggttattttatcttgtgactgcctggaagttcaagaatacaacacatttgtttgaacactactatgtactggtttgttgtggctttttttttttttttacatgtttttatttaatccgcagcatcctttatgtcttcacaactaaactaccattttcccactagtttatttactcctttgattattaaaaaaggtattttcggccaggcgcggtggctcacgcctgtaatcccagcactttgggaggctgaggcgggcggatcacgaggtcaggagattgagaccatcctggctaacatggtgaaagcccgtctctaccgaaaatacaaaaaattagccgagcatggtggtgggcacctgtggtcccaactacttgggaggctgaggcaggaaaatggcctgaacccaggaggcggagcttgcagtgagccgagattgcgccactgcactccagcctgggggacagagcgaggctccgtctcaaaaaaatcaaaacaaaacaaacaaacaaacaaacaaaaacttagctattttctaagggtctcctaacaagcaagtaaccatgctactgaactttagtcactctgaatcaaaataattgacttgtatttatttccctaattaatttcccatttattattattcattttttgttctgttttcttaatatcagatatgactaacatttattttatttatttatccttttttttttttaatgcccccaccaggagtgtgcaagtggagagatgcatggatgaaggaggggagctggcgggggtgggtctgtgaccagcatttatattgtaactggccaagatgtatgaggaagccacctgtgctttgacctcactttacactaaaacattcatttatagtctgatcatccagtcatttctaccatgacataaaaataagagccccagagaacaaatcaaattatttttgctgtattgagtatatataaatcccaaagggccaggcatggtggctcacttctgtaatcccagcactttgggaggctgagatgggcagatcacttgagatcaggagttcaagaccagcctggccaacatgttgaaaccccgtctttactaaaaaatacaaaaattagctgggcgtggtgacacacgcctatagtcccacctactcgggaggctgaggtacaagaatcacttgaatatgggaggcagaggttgcagtgagccaagatcgcaccactgcactccagcctgggtgacagagtgagactctgtctcaaaaaaaaaaaaaaaacaaaaaaaccttaaaggaatatttttgcctggctcctacattaacatttactttctctgaaaatcataaccctgtgtttgttattatccagtgtctacaaacagcccagcttctatagttaggtaaagtaaattcaatatcagttgttctttcataatcaaaacagaagtctacaatgccattcttacatacaacagcattgacagtaattccttactatcatgtaatagccagggcatgtttagctttctgcagatgtttcaaaacatcttcttatagtttgtacaaattacgatgcaagaaatccatacatccattgagttgaaaaatgtctaaattttttataatctaaatttttaaataatctgtgacaacctcatctcttccctacaaacatttactttttttctatgctatctatttatgtaagaaactggattgtcttaaaaaatgtcctacatttggaatttggctgatcatatatttattgtgtcattcaacatgttcctgtagttcagtgtttcttggaaagtggaagttatatttaggaatttgcttagttcagtttttggaggggaagcaggagtgctccatagttttttattgcatcacttcaagagttgtataatatctgattttcccacttttagtgatacttagaataatcttcaggtatagttattgttcaccaaattgatcctttataaagtttcccatcagtcttttacgtaatgttttatctactcctgtcatttagttgcctagctatttcattagaagttgcaaggccgggcttggtggctcacacctgtaatcccagcactttgggaggccgaggcaggtggatcacgaggtcaggattttcagaccagcctgaccaacatggtgaaaccttgtctttattgaaaatacaaaaattaaccagccatggtgatgcacacctgtagtcccagctacttgggaggctgaggcaggagaattgcttgaacccaggaggcggaggttgcagtgagctgagtccgcgccattgcactacagcctgggtgacagagtgagacttgtcttaaaaacaaaacaaaacaaaaaagaagttgcaaaatggtgattatttgaattctctcattcattcaacatttatgagttattcttcttctgtaaagaactttgccttataaactacttagaaattatagtaatgacaagataaatgcttgattctttcttttccttatgtatcagtttttagaataatgaattggttctctgcaatctccagtggagactaaggaagttggttttctattttgtaacataattatgcaattatggattttagtatattttatgtgcttcagtccattaagtcattcttcttttgaaactgaaattattccacttagccagtgggagcctggagcctcttcaggctgactcctgtgtccttttgatgtgagctcaatagtctttgatatttttgttgcttttaggcaagatgtcctatgcttatcttgaacatttcctgtaccagacatggaatcaaacatttctcctaggaattctggtttggtctcctctcctctcctctcctctcctctcctctcctctcctcccctcccctctcctctcctctcctcccctctcctctcctcccctcccctcccctcccctcccctcccctcccctcccctccccttccgtcccgtccccttcttttcattttccttttctttttctctccttctcttctcctctcctctcctctcctctcctcccctcccctcccctcccgtcccgtccccttcttttcattttccttttctttttctctccttctcctctcctctcctctcctcccctcccctcccctcccctcccctcccctcccgtccccttcttttccttttccttttctttttctctccttctcttctcctctcctctcctctcctctcctctcctctcctctcctctcttctcccctcttctcccttcccctcccctcccctcccctcccctcccctcccctctagatagagtctcactctgttgcccaggcgggagtgcagtggtgtgaactcagctcactgcagcctccgcctcccaggttcaagtgattctcctgcctcagcctcccgagtagctgggactacaggcacacgccaccatgcccagctaatttttgtatttttagttgagacggggtttcaccatgttggccaagctggtcttgaactcctggcctcaagtgatccacttgtctcagcctcccagagcactgggattacaggcgtgagccaccgtgcccagccaactctggtttctttaaatggaaaatagcatttaaagaccagaatttgggcctcagggatgctcgttagtgctactgggttattattgcttagaggaggggacagagctatgaaatatatatttttaatggagaggaaaatgaaacaagtttatactaacactccaattaaaatgtaagatttcagcatttttacttcttaaatattatatctttagttctcttttcccttatgttgaaaattgtggttccagatgacgttaacatagtcacttttttgatatgagtgaggggagagactgattgattgaaaacaataccagtagtattacaaataataaggagacttgtggttctttttgttcttaggatatatcccatgaagaattgtcttagtctatttgggctgctctagcagaatacttttaactttatgtatagttaggtattatgtaccgtaatctactgattttttacaggttgctttcaatttttagaaatgttcttctatttgattcaattctgaattgtttcagttatgtaagacattacttgtttccaaagttaaagctacaaaacaaggtgcattcatatgtctggcttccacaccttttccgtaagtaaccatttatttaacattattccttttggcaaatctaaataaatatatgcatatacatacacatgcatatttgtattttcccttccttcctacacaaacagaaacacactctacatatttttctacgtcttgcagtgcttcatggatataaacccatccatggaccaaaaatccatgggctaggagggaagacacacaagataagaaattactgtaatataattgtttgctgatgtcatagaggcagatagattaaatgtcattagacacaaattatggagcagtttttctagggcgggtgagtaggttagggttagcttcagagaaatgacctttaagctggactttaaaggataaccttgaattccaaagttcagctggggatggggatgagaataggagacaggcattccagcaagaagtaaaaccctgagcaaagtgtacagcatgttggtgaaacagcaagtacacatgcaggtgaactatgtttatgaattagaactatatattgtaggctgtgagattttgttgaaaagttctaagttaaatgaatgacacgaccaaagaaatgtgttagaataactggtaacaatgtaaaggatgatgggcagaaagggaaacctgaaggatagagaagaggaggcatactctttaaatgtaagtcgaaaatttagcgtattttgtaagtaattggatgttaagagtgaggaagaaagaggagttgaagatgattccaaagtttctttcatggacatctagatgatggtaatagggattcaggaggagaactaggttacagcaggaagataaagagaacgttagttcaggccaggtgctgtggctcacgcctgtaatcccagaactttgggaggctgaggtaggtgcattacttgaggtaaagagtttgagaccagcctgaccaacatggtgaaactccgtctctattaaaaatacaaaaattagctgggcatggtggcacctgttgtcccagtgacttgggaggctgagataggagaatcacttgaacctgggaggcagaggttgtgatgagccgagatcacaccaccccgcttcagcctggatgacaaagtgagtctctgtctcaaaaatgcaaacaaacaaagagaacgctagttcagtttggtccatgttaaatttagatatctttcaaatttttttaaattataaaaataaagatgggatctcactatgttgcccaggctgatcttgaactcctggactcaagtgatcctcccttcttggcctcccagtgtgctgggatcacaggtgtgagccaccacacctggcctaaatttagatatatttatgatacctagatgaagtttttcagtagacatttgaaaacaggagtttggagctcaggaggttagatgactagaaacagtgaatttggaagccattagccttatgtattggcattagttaccatctcatgctacataaaattccctggagacatgtacttgagctgttccctttggaagactagttagagctaggattgcaacattttgatagtcaatattttaacaaatcgaaaggtacctctgttgacttggagcatgcaggttatactaggatctgattagaacctctgttacaggattagcaaaccaagtattgctaataccttggtgtagcatgagaaacattggtactatatgagaaaacttgaataacatttttgaaaggccttttgtaatatatgagattctatttcaaagcctacctgggtttatgcttagtctagaaatactttttaagaagccataagaaaacaaatccttccttatacattactgtgaatggacttgatatgaaaaggatggcatgttttttatgaagacaacttaaaaagtgtgtagtttacaaaccttgtttaatagcaaaatgaagagtaaaaaaagtgtttttgtaaaagcttatagtctcttctctcattggtattccttgagttaatttataataataaattaataagtattaataatcaatataattaataataatttatcattattaataatagtttaaagatagggtcttgccctgttgcccaggctggagtgcagtggcatgctcatagctcactgcagcctcgaactcctgggttcaagtgatcctcctgcctcagcctctcaacagattaccaggtgcataccaccatgcctggctgattttgtttgtttgttttctgagactgggtctcactctgtcgcccaggctggagtgcagtggcacgatctcggcttactgcaaactctgctttccaggttcaagcgattctcctgcctcagcctcccgaatagctgggactataggcatgcgccaccacacccggctaattttttttttgtattttgagtagaaatgaggtttcaccatgttggccaggctggtcttgaactcctgacctcaggtaatccacctacctctgcctcccaaagtgctgggattatagaggtgagccaccgcgcccggcctatgcctggctgatttttaaattttttgtagcaatggggtcttgctttgctgttcaggctggtctttaagtgcggggattataggtgtgaaccaccatgcctggcctaatctataattattaagtatccatcataggcagagtactattttatgtgtaataaggaggcatagaaaaaaatagttctagttccacattttcaaaactaaagcatatcctgtgataatgtgtttcacgaagaaattgtgttgtctcaaaactctcagggaaaaagtttagtttatttggaagagacagaagaaaatttagtatactttttgcttgtatgccaagtacagacttggatatatgaagacaggtcatatatgttagtgtgcctttttagattagttgggaagactcttgaattcattgaggtgagcaatagcatttagcattcattttgctaataaaatctaaggttcaggaaatagttttaataaacagggataggaatgtattcaatcatcttttgttcttttaataaatacttattaagtgcttaatatgcgtcagataccgttcattgtactagacacagtattgaacaaaatggcaagaatgcctgccctcatggagcttgttttctagtggagaagacagatagtacaccaactaagtagggtagaatgtgtcatttgttagaaaatgataaagtgcgtaggggaagtgaatatgaaattgaaatatcaggaggtaagctgacaatagagataggaaagacctctctgagaaggttatacttttgtaaaagatcatgcagctatttggggaggagcattccaagtagaaagaatagaaagaacaaaggccctgtggcaggagtatttctgctgtgtttgagaaatagcaaggtggcatatgtgattatagtagaacaaaagagccagtgaaagaaggtaaggtcaaaggtcatgagctgggaacccatccggaggttttgacagaaaaaaatgatgtgatcttatttaagatttaagagaattaccctgctacatagaaatgcagacttaattgtttgagtgtaggagtttgaggctacaatgagccatgattgggccactgcactccaacatgggcaacacagcaagaccttgtctcttgagagagagagagagagagaggaaggaagaaaagagaaaatgcaaacttatattcatataaaattctatacacaattgtttaattgttgatagcagctttctttgtaatagctaagaactggaaacaaccaaaatgtccttcagtaggtgaatggataaggaaactcttgtacatctattccatgctgtactactcagcagtaaaaaggagcaaatggggccaggtgcagtggctcacgcctgtaatcccagcactttggggggctgaggcgggtggagcacgaggtcaggagtttgagaccagcctggccaatatggtgaaaccctgtctctactaaaaatgcaaaaattagccgggtgtggtggcgcacgcctgtagtcccagctacttgggaggctgaggcaggagaatcacttgaacccaggaggtggaggttgcagtgagccaagattgcaccactgcactccatcctgggtgacagtgagactctgcctcaaaaaagaaaaaaaaaaaaaaaaggagcaaggttaatagacacatcaacttggatggatcttaaggacattatggtgactaaaaatatcaggccagtcatggtggtttatgcctgtaatcccaacactttggaaggcctaggcaggaatatcacttgagcccatgagtttgagaccagcttggtcaacttggtgaaaccctacctctaaataattagctaggcatggtggcagatgcttgtagtcctagctgcttgggaggctgaggtgggaggaggtcaaggctgcagtgagccgtgatcttgccactgcagtccagcttgaatgactctttctcaaaaaacaaacaaacaaaaacaagaaaataaaaaagccaatctcaaaaggtcgccgactgtatgattctgtttatatagtgttcttaaaatgatgaaattacataaatgggaaacagattagtggtttctaggagttagggatggtggggcatagaggaacaagcatgactgtgtaggggtagtgcaacggagatctttgtggtggtgaaatatttttgtatctttttttgatacaaaaaattgaacaggggaaaggcaagatccgtttacacatgcaggcatatatgtgagagtactcagtaatgactgagtccgaatagttgtaattgctattgtagtaattgcagttgttgttccacaaatctacacatgtgataaagtgacatagaactatacatacgcattgtacccatgtcaaattctgggttttgatatcgttctataattatataagatttaaccattggcggaaactgggcgaagggtacacgggacctctctgcactgtctttgcaacttcctgtgaatctataattatctcaaaataaaaagtttttaaaaaaagattactaccttggctgctcttttgaggagtaatcctaggaggttattgcagaaatctaggagtgaggtagttgctgttaaatgaggctggtggcactagagtggagtgaaggcaggggtgagaaatagttggattctgaatatgatttgaacgtagagttaatagaatttgctgatggataggatgcagggtgtgagagaaagagaagaatgaaagatgccataaaagtttttggcctggtcaatggaggagcaaagaaaagagatagtaacaagaagcagcaacaagtcaagaagcccggtaagaggtagttggattcttggcaagaaagacaaaatgacaaaccctcttcctctagtcagtggcagccacgcctgggagttagaggacaataggatattaaagtgactgcactcttattaacctgcttagggggagctgagttatcttggcctcgccctgcttttttggaaagaagcgtttgtttgataaacaggaagtcgtttccatgggtgtaggaagaagaaatgatagaactgagtggcaaagcaaagaactactagctgtggttagtttggaattggcagaagttttttcaggtagtcacctaagatgaagatgagcacacatactgccttttcccttttctaggctgggttcattcttcactgaaatgtggtatttctgcctattgcttgtcctgctgtcagggtatgttcattttcagctagtgttttgcatcaactatgagttgtagacttagcagacaaatggagacactgtctgtttagagtggaaaagtgacttattttaagaaatgttggctccgcaccactatcccattagtggcatacctctgacactccattgaagctggcctagggaaggtaagactggcttctgtgtatttttgctctttgaaaggtcagaacctaaatgtaccacaagatattttcttcctgagtaagattgggacaaaattacaaacagtgaattctgaagcaaacttacgtgctggtgctctaatactttagaaaattcaaaatcgatttcctgtacttctaacaatattactcttcgtcgggtatgtaaatctcttagtgtcacttacttcttttcattttgcaaggaagggcagaccaaaaagattaaagaagaccaatgccaagtcatggtcatgggaaagtgagaaagagaatttaaaagtactttttacttttttttactttgttttactttttacttttgaaaagcacttgaaacaggagaaccattttttttccttttaaccgagagtcacctcatccctgtctgggtacatgtttggagtgaaattgtggtcaaagaaaactttaaatttgtcccagacctataatggcaactaaatagataagtagttgattgatggtgaaaaaagcttagtgtgatggacttgactttatgcagcaggtgtctacttgaggtttgtttagattggtgggggtggggagggggcaggactctagctaggggcatggctgcagtgtggatgattgggatgaggatatgggtagtatttgtgtctcagtatttaggagaggtagttcactgaattgcctggaagaagcagaacaactctggagttccttgcaattggagtttatcctgacaaggttcaacgtacattttactttgcgtattgagtggattcaggagccatttggtttcatttgccttctgaaagtactgcagtatttgtaaaaatgctgtgactatgtgttaagtccaggctggtctacagctctggatttcttcactgaaagttaaatatcacatttgaacttgaagaatgtttgctgcctgcctctagagcatatacgaatataaagcagctatttgtcagcaggcagctgaaaggcgattttcagcagggagtgaaaaccactgcaggctgctggcttcctggcacacccactagacctcgtaggtttacagtgaaagcaaaccaatgggagtaggggttggggggataagatgggcaaaaatcagggcagaggctgaggtctgaatgcgattgagccactggaaggagcttgcatgtgaagagcacagtgctcccaaagagaagaaaacttgaaccctaaacacaatggctaggagcaaatatctaatgtgaacactttaaaaaaaaaaagtgatttgttccgtaagtgtatttagagtccaggggaaaaaaaaaagtgatttgtttatcttctttgtatctataactataggggtactgaaggtaactttggggaaagtattatagtttaagctgtactacccagtgcgctgttacagctaccttttaaccagaaccattaacagtgacaatcgatgtgtagaaaatcacctttaagctctgcagaatcctgaaggactttgtgctctattgactagatgtttaagtattccctatatagtattcagtggaccttttcaaaaatgtcttttgcaacatctttgaaagtgaaagttttaacgtatgatactcttaatcagagtacacgtttattcccaaatattctgttctttctttgggtatagcatgcaacagagtttacttgtatttagaagatcaagaggtgggggtattggcaggataaatgatttgtccagggacaactgatgtgtcactgtagagataaaacagaactaggctgcattccagcagcttctggcccgtataacagttttgagaactttccaatcactttaggaaaacaaggtacttagaaatttataaagactttcttaataaaagaaatcacttattttggaaattgtgaaattaatcattctgcagcatttaagaagcactttgatgtgttctggtaattagtatttactgccagacaaatgtctcttgggcattttaattaatgggtagcttggccaaatgagcttctgatggtaaaccttcataagggtttatttttatgtttctcaagaatagctgtctcttcaaagctctttaattagacaaggtttagcaactaaaacatattattagaataattaggccttgggttaagagaaatagggggtcagaggagcaggtactgttagaaaatggcctcttaaaacatagcattctacctctgatggatggccagttctttcacagcttctgttaagttactctccctagtttggacttcgtgttgtttaaagttcatagcagacctcaccggaagcctaaacacacccgagtgggagcttacttatccccacctctgacctcccagggaaagcttgattctagtccttttaactgctaagtggaagacttcttattttctcctttttcttctattaaatcgataatcttggctataacaatgacttgtatttttgagggagatgcttcaaaagccttgtgtgtggcgaacaaaaattacaataattcctttgaggatctttcttaatgatttatattatctacatataagatatgttcttaaagtgactacagtatttgcattccagaatgttatatttcttgtggtcagaatgcagtttgaattattttgcaatctgctctgtagatgggctggcatctaactccccttcttcaaccttctcccctaccatttcttgccacaagcgctcagtcttggcagttattgctagtaaatatgtgctaccctgaacttcctctttgtggtgaaggaaagatacacctgactggtcctgtgagggagtgagatgtcaccaaaacaattgtgtattctaccaaaactgttgataaatcacaatatatttatctatattccctcatttttcactttcctactgtctcaggatgcttaggatggcaaatatgtccttttcccagctagatcagttgattaaaggacagtgctcatgagactattagacatttctaacagaacaactgtatcatagctgacatttctaatcccactagctgtcatgacctatatgtgttgttggtttgataaagaactgagtcaaagatatgtatgttgttggtttggtataaacctactgctattattagaaagttcttaaagaacctgctaatccatcaaatcatttttgaatattgaggatagcctgctttatagtattatgattttatcacatgtaaattcttttgatataccttagttaacaacatggccaatgaaatgattttatttgagttggtagaaacttcacttggtttttgattgatgttatctgtaaaaattatcattttgtaagaaccatttggtgagccccataaatgcagatataaagatgtaggtatatcgctatgcactccagagaacagttaccgagtaagtgtgtttttatgtcaaatcgaagaactttgagaaagcagaaagatagtaacctaaacagagtgctctgtcgaggagttttctccccctagcagtgacgaatttctgtccaccctttccttaaatgatttaatattggggccttgcttttttacctcctctttaacacaggaaatatttctgatacttatcttcatgtgtgtgtttgctcatgtctgtgcagtcttctgcagtgaggatatgaaaagaaaggtagtgagttctatgacccttgaaaaacaccagaactctcttttcctaatgaaagtacaagtgtgttcttatgcatacttttgtataacaggatttatacttaaaatagtttggatacttattactaatgaattttgatagatgcaaaccaggactatcaatgtgttgttctctcattgctcattttgcctctttaactcactcgagagggccccttgtagccctccttaagtctaccttttgaaattacacaagtgtccaaaatgaaaactgactgtattcttcttcaacacagaccacctggtggcccatggtagaatggcagaaaaggaggcacgtcggaagttcaaacagatcgtcacagctgtctatttttgtcactgtcggaacattgttcatcgtgatttaaaagctgaaaatttacttctggatgccaatctgaatatcaaaatagcaggtgagaactgtactgaggatgtcagatagggacaaaggagcttttccttggggttctataagcaagggattatctgtttccatctcttcagaaagaactattgtgaaagtaaggacaatttaagatgaaaaaaaaaatagcctgaaaattgataaactttaaaagtacttcccctcccctgccctttttttttttttttcgagactgagtctcattgtcgcccaggctggagtgcagtggtgcagtcttgactcactgcagcctccatctcccaggttcaagcgattctcctgcctcagcctcccaagtagctaggattacaggtgcgcatcaccacgcctggctaatttttatacttttagtagagttggggttttgccatgttgggcaggctggtcttgaactcctgacctcaagtgatctgcctgccttggtctcccaaagtgctgggattacaggcgtgagccaccacacccggcctgtttatttttaatgtagtatcagctggaactaggctggggagaaagaagggaaaggtgatatttaaaatactattactttggttaacgggtccttttttacataagaaataaaatatgtaataaagtggaaaggaaaactactaaaattgtataccctctcaccttcacttgagaaggttgatttatgtcactgctgacacagagcatacttattctaaaggctgtaattgtatgataatttaggaaaaatagatcttagagtggcttataggcagtccagctttttgtcttctcaaattttactagtctgcttatctgacagtgccttgagagcacttttcactgccttgatctgttcatgcttaattttagtaaactatcagcattttgcctaatgaatacagactcaccatttactaataaaattaagtgactgcaatctatagagaaactgtaaatatgaaaataagccatttatgtttgccgacactttccggtatagcatcgtgtatccccggtctcccagataaaaggaaggacatctcatatagaaaactaaaatatagctagaatgtaattgtctagaaaaggcaaggtataaagcagttctaaggattttcttccttagtagaggtgggatttgagagtttggatttttatcataggtcaaagttacctaagggtacctttgcagggtcacaattcttctgagagttgcttttgtgtagataagcctgttcacttttacatcctggagcatcacctagctttttatatatctgaaactgacagctacacttttgtttagaactttcatatcatttataagttctttcactcctgcactagcttattacagagtacacaggaattaaaggctttctttatcttatataaaatcatgtttttcctttgctctcatgtcggttttattttctccaaagctctatagatactggtagttcccacaaaggtgtgtggcatggaaaagcctggcaatttcaaaccttcttttgtaattatttgttgtagcttcaattaaattaatactaataatacctactaaacttcacaacccttaaaactgtaataaaagattgattagtgtcttattattactataacaaattaccacaaacttaatgacttggaaaaacacagatttgttagcctgtagttctggaggtcagaagtccaagctgggtctcacagggtgaaagttaaaacagcagcaagggctgttcctcctggaggctctgaaggaaaaatgtgtccttgccttttttagcttctaaaggtcacctgcattctttagctcagccccttccttccttcactccaacctgtggcttccattgtcacatctcctactcctaattccgaccctcctgcttccctcttgcaaggacctttgtcattacattgggctgtctcagataatccaggatcatctctctcccacccccacctttttttgtttttgttttcgagacagggcctcattctgttgcccaggcaggagggcagtggcgtgatctcagctcactgcaacctcaacttcctgagtatctggaactacaggtgcgcgcttctatgcccagctaacttttgtatttttagtagagatggggttttaccatgttggccgtgctggtctcgaactcctggtctccagcgatccacccaccttggcctcccaaagtgctgggagccaccgtgtctgtcctcatctccccattttaagatctttaatcatgttaatacaagtcctttttaccatgtatggtaacacattcacaagtatgggggattgggatatagatgtatttgggggccattattcaacatgccacagatgtcactgtaaggctctttggattatagattagggtagtgaattaaaagaaggccctctggacacgcaccacccactctgcactgaccagcccacctggatagcagaggacacccccagcccccaccaagcattgaagacatagtttatttcctcatatcctttctccttgggtgtagttggggtggggaaggagggaagactggggtcatctccattccttgggctctgtgcccgagtccatggtgcaccactgtgctgcgagctgtggggcctgctgcagtgggagtgtgtggaacaccttgaccaaaggggagctttgtcttgtgtgttttgaaaaaggcttaatgaagagaatgttgttcattcttagtagtatagtttgcaattcttaatgacaaatagtaagtttcagtagaaaacaaaacaaaacaaaaagaaggccttctttatattctctagttttattttccgtccgctgacccaagattaaaaattttcttaatgctcccttggttcttgattttgaatttaggatgattttgatttagttaaagaaatttcttttttttctttttttttttttgagatggagtctcacactgttgcccaggctggagtgcagtggcatgatctccgctcactgcaacctctgcctcccccaggttcaagcgattctcctacctcagcctcccgtgtagctgggattacaggcatgcgccaccacgttctgctaattttttgtatttttagcagagacgagttttactatgctggccaggctagtcttgaactcctgacctcaggagttcaagatcctgatccacccgcctcagcctcccaaagtgctgggattataggcgtgagccaccacgcccggctgttaaggaaattttatatcctttagtttttacattgagaaactcagagtaaaaacagagattattgataattgaagttggaaactctactgaaatatttggtaaggagatttttaaagacttttctgttgttgttgttgttaatagttaaaacaaattcaaggagtcacaatgagagtgtctacctgctgatatataattacagactccggggtgctggcagccagccttgggctctctctgtgttaacacatatactttggcaagatttttaagttcattaacccaaagcgtacatttttattatttgttttaagagcaaaacagaaaaataaatgagcacctctagttttgcggcctgctacaatacctaacattagctttgctcatgcagtctttctcttatatgccatcgttactcagtttctcagtcattgcctgaacctcctttcttgcacataaattaaatagaattatcattctcacctcccagttcttttttgaacttaatggactagtgggagaaatgcttctagttgaagccaactagaacatgactaattttggagaggtaggttggatgtttttgacaggataaggtcagataggtaacgaaatcaactttaattctaaaagccaaaagtaactttcagattcctgatcttttcaatggcctcccttttggtaaagtatcttaaatgtcagtaagaagaaactactatatatgaaagaaacatgcaagagagaaaaagggttttttggttttattttaagaagttagtcttggctgggcgcagtggctcatgcctgtaatcccagcactttgggaggccaaggtgggtggatcacctgaggtcaggagtttgagaccagcctggccaacgtggtgaaaaccggtctctacaaaagttcacaaattagctgggcatgatggcgggtgcctgtaatcccagctactcacgaggctgaggcagaagaatcacttgaacccaggaggcagaggttgcagtgagctgagatcacgccattgcactccaacctgggtgagagagcgagactccatctcaaaaaaaaaaaaaaaaaaaaaaaaaaagagaaaagaaaaggagaaattagtcgtaagcagctcatctttaaaataatcgtatatgttatagtaccaaaataacttggaactaataaaactcagattaggaagtataaaagattcatgttttctgtatgccattgtttaagtgattttaatgaaaataatcatgcatccagtttcgtgtagaagatgaataaattggtctgtggatatttgtgtttacattaatttatttttacattttgtattaatgtggtgatttacatttgatactgtttgtttgttttgtagagacagaatctcactatgttgcctaggctggtctcaaactcctggcctcaagcgattctcctgccttggcctcataaagtgctgggattataggtgtgagccaccatgcccgccccttcccccttcttttttaagaaactgggttaccttctgttgaccaggctgcagtggcataatcatggctcactgcaacctcagcctcctgggctcaagtgatcctcctgcctcagcctcccaagtagctgggactacaggcatgttccaccacacctcgctaattttaaacattttttgtcactatgttcctcagcctggtctcaaactcttggcctcaaccagtcctccctccttaacctcccaaagtgttagaattatgggcatgagccaccgtgcctggcctacatttgatatttgatactgtaaaaagctagctatcacaactgtccatactagttctcttcgagagaataagtgttccctggatagatagatattagttatagatattataagttataattatagtataagttatatcttcagtcataaatactataagattcagctgagcaaggtggcatgcatctgtagtcccagctagttgagatcaaggctaaggcaggagtcttacttggacttaggagtttgagtctagcctcatagtgataccttgtctactgaaaaaaaaaaaagattgaaccattgttccactgtttatgattttttttgtgcttaattcttatttatgaatttttgttctagttctgtttctagagagaataaagcccaggtgaataactttgttttctttctggttttagaattattagtaacaaatccgtgttcttaatggcagtagcaaacctgtcttctgtagaatttttaaagagatgtttctgtcattagtaatacagaagaagccttgatcattttcagaataaagaattttacgacagggagaggtggctcatgcccgtaatctcagcactttgtgaagccgaagtgggaagatcacttgaggccaggattttgagacctggggcaacatagtgagattccatctcttttttattaagaagaaaaaagaaaaaaaaagaattttatttctaaaggcagttaccaagtctagaactaagaatttgtggaggtaatctagaatcttacttgttaacgaagcctccttgcataatggcacagaagagaaaaaagaagcgtgaaacgtgactccagccctaaagaactgaggctatatgggcagcaaacattagatctttgaaaagttggtaacaccaaaattatgctttgcatatatataatgtacttcacaaagcatttttacatgtatcacctaattttattggcatgcaaatatatcttattaaaaaagtaaaatctcttcatcttctggcacttttaactctccaaaacttctgaatttcttgtaaagagcacccaggcaaggtatagagaaccccaatgctgggaaaagagtaggattcttggcctccgacttttaacttttcttgcctgagatgtgtaaggatccacagaagagcagttgaaggactgacgaggcacaacacagctcactcagcatggagccggcatcgctggatgatagtatccttaacagctaccaaattatagttggatacaatagaagagatgttacaaggcatgtcatgactcattatcacattaattgtacagtctaattagcataggagttcagaggatgatagaagtactgtagtttgtaagattccacaagattgtcagttccacaaggactgtaaccatgtcctgtttattgtcacactcccactggctcatacatgcctgttctgtagcaggtgctccccagctttgtcgaactgaagttcaggcggtactgataaaggacataaatattgtattgaggacatggcatttgaggtgcgtccagtgtcatgtgattggatgatcaggtgtagaggagagaattccagcaagtgttaataaggcacctgtcagttgcagacactgatacaggcacgggggtacagcagtcagtaagataaccccttggaacttatattctaatggggataaatagacagtaaacacaaataagctctcatagggctgtgacaaagataaactcgagtaacatggcagaatgatttgtgcgagaggtactgcttttagccaggatcttcaaaacattccacgcagaaagaagaacaatgcaaaggcctgagagagataaattcaacatagaagaaaggggtagaagaaagtccagcatggctggagataatgaataaaatggggattggaagaagttggggtgagagagatggcaaaggccagttgcacgtggttaggatgtgggatttcatttaggttccagtgggcactgagttggagcagcgtgggcagcagtagaatgcacaaggtctatttgaaaaaaaaaaaaaaagggtgagcagctcagtggaagggaaggctaaaggagaggagtctccccgagaaggcaggagcagtagatgtttatattagattgaaatcatttgaatataagatataaggcttaattaatccaattcagtatggagacggcaaaaagctggaagctgagggaagggaagggcctcctggtaataggaaggccagttaaaggctgtgaatggtaaaatcccgcatgagggtgatggtggcagtaaacatgcaaaggaagaaaacggcaacaaattcaagagagaaagcaagcgagaatttctaggaccagataaccaatcatatgtcttgaccaggaagagggaattttgaaagatatgtttagaaataaagaaatgaaattttcttactgatggattatattaagctatcaaaaaaatggtgttttgaaaatggttaatgtattgctattcgaaagtaattttaatgtccttgtccccaaagattaagtagcaaggtgtctatatttaaaatagattgcctgagaaaaaactgaaatgtagctggcttactccctgaagaaaagttctttcaaatgcttagacgttataagaatgttctgaaaattgtggaaacattttttttaaacctaaggaagttggaaacttttgtctttaaatgtcgactcccagaatggtctccatgagatagtttccactctcgtgttattgttttagttggcaatcagtagacagcaaagatcagaaatgcaactatagaaaggccaatatcctggaaagaattttcagagcatggatttaaggtaccatggaaaattttgaccttaatgcagtgagagctagaccattttattattttttagggagaaattaaaacatttcctaactcaattgacctttcacccttagtatgaatatactgagataccatcatatagaaaagaaaggttggaaaccttggatttttgagtacccttccacagtgtgttgactgacagtgcctctgactggtcacaggaagtagttatgcaatactcattatatcaatctaaattgtatttcatgattctaatgccctctttttaggctatcattcattgcacctcccaggttgacatgtccagtgaattgagaccagagaggcctttgtgtttgtcctgaattcataatagagtctaggaattttaatagctagacctgtgttcttgccctgaaatggcatatgaccattaccaagaagcggctctaaataaccttcctgcacgttgacccttgggaaaagaaaatttgaaatattatctctcttgaatcctattcctgagactagaactttacaaatttgtattctacttaatgtcatatctatattttttaatattaagattattaacttagtttaacacagaaaaaacgttgatgttccaggaaggtgcaccctatttagcctacggtttctcgtatatcttggaacactgaagtgtaacacctgaggctgtgtaaacagaggccagcctgagaagctgagaatcaagaatttgatgctcaaccatagattcctcttactcacacttctagtttgtgcagagtgacttctctattacttttcctcagcctcaaggattttcatgccattatctattaattgcacgtcacttattttggggataattagaaaaagggggaatgagaggttgggaatagaaaaagggagagaagcaaagggcagaaaagaaatggaagcttttgctttgaggtcttgtgggggtgggggtggaaaaaaaagtgtaggagaagcctgagcccaaaagcttgcctcctccctctacagggaaagggagttgagcggagtgtaagagggtggatggcatgcgcttctgacctaccaaagcatctggaaatttcagactgctctttgtctctgagactgtgttgggcacagcattgaataaagtgtggatcaataagtatgtgaagtgctggatatgttaattcactggatttaatcattcctcagtgtatacatgtatcataacatgtacgatgtaccctgtaaatatatacaactattgtaatttgcccattaaaataaaacaaaatataaataaaacatgagcagtgatgattaaaagccaaagtttcatcttaatctgtataatatctagaacaaagaaaaataattttatcggcattttattgaagctgcagaaaatgacagctttgaaaaatctcaagcaacgtatggtttaaggaaattaggtgtacacttaagctatagtttgtttgtttctccctttcctttcctttcctttcctttcctttcctttcctttccttccttcttcttccttctttccttcctctcttgtcctctccttttctttctttcgttctttctctctcgctctctttcctctctctctctctctctttcccttcctcctttccttccttgcctccctccctcccttcctgtcgctcagactggagtgcagtggtgcagtcatagctcactgtaaccttgaactcatgggctcaggggatcctcccacctcagcctcccaagtagctgggactacaggtgttttgccaccatgcctggcgaatttttaaattttttgtggagatgggactcgttttgctgctcaggctggtcctgaacttttgagctcaagagatcttctcaccccacctacctaactgttgggattacaagcatgagctactgtgcccagcctcttacctgtagtttctagtttaagaagttttagaagaacattgatattctatccatttagagtagtgttttacttttattagtggctatagaaactataagaactatagaaaagttatagaaacttacagttcttataggaactctaagaacgtttatataagtctgcccaaggtcatgtgtcctcatgaggatcgtaagctcctcaaatgcaagttgatgttgggaagggactaacgaatcacccagagtgctccttcactctgattctgagggagtctttattgtgttgtgtgaagcgtgttggaagccaggtgtggtcgcacgcacctgtagtcccagctactcaagaggctgagatgggagggtcgcttgagccgcagaggttgaagctgcagtaagctatgattacaccattgctctctagcctaggcgacagagcgagaccctgtctcttaaaaaaaacaataaaattttttactttttgtagagatgaggtctcgctctgtcgcctagtttggtcttgaactcctgagctcaagtgatcttcctgcctcagcctcccaaagtgctaggattataggcatgagacactgtgcctgacctaaaaaaaaaatttttttttttttttggctcacacctgtaatcctagcactttgggaggccgaggcgggcggatcacgaggtcaggagatcgagaccatcctggctaacacggtgaaaccccgtctctactaaaaatacaaaaaattagccgggcgtggtggcaggcacctgtagtcccagctactcaggaggctgaggcaggagaatggcgtgaacccgggaggcaaagcttgcagtgagctgagattgcgccactgcactccagcctgggcgacagagcaagactctgtctcaaaaaaaaaaaaaaaatttgatgtgatattatagaaatttaaaattaaagcaatgtcaaaaagagtgaggctgactttttaggcaagcctttgcaaggtggcagaatattagtaaaggtccccattatatcagaatctggttgtcatttatgagttctgaaatataccttatcagttctcttaaaatcataagagagtgagtataatatttgtatcagttttcttagcatcaaaaagtacagtttgctagtggtaggcatgggtatttcatctagtctttttaaaatatcctgatttgagtggtctttggctcgtctttgcggaggttatacacagaccatccttaatttaccatctcaagtagtatacaggatcttttcccagccagtgacttctgaatcctcagagattttcagtgttccaagagattcatgtcatacaaagtgataatgacttttctattttttagaagttaataaatgaaataattacttaggtctttccgcccttcttaaatggaatagtttgagagcctctgagtataaatcgagtctacctgctggcagggcgctaatgagcatgcttatgacttggtcattccatttattgttcaagtagttggttatcataatagctttgaccagggtacagtttttcattgtattttattaagtttacatctattatggatcactggattatataaagcataaagaacactaatgttgaaattcaaattgatgaggataaaaatgataattctgtaatgcctcaagacaaccttcaccaaattcatgatttgtctttgtttggccatggttcttacacagcacatcaaattgtttctagggcctcaagaaacaaagtttaaaaatgttacattacatacatacacacaaaatatgtatataccacatgtatatacattttttacacacatatccgtatctatatctatctatctatattatatccagtttgatttattgggaataaagactatctacattcatagtatattatttgcaaagaagtgctaataagtaatgacccaatatttgttaatccatttcattatttaaaagcaaggcatgaaaataattcatttaatcaagtctggtttttaggttcaaacatgtaagtgttccaaatcctaggtcatgaaaagtattcatctgttttgtgtattataatctcagtatatttgtggcttccaaagccaggtgccgtggttcatgcttgtaatcccagcactttgggaggccaaggcgggaggatccctgcataccagcctgggcaacataataagaccccatctctatcccaccgcctgcccccccgccccatcaaaaagaaaaaatacacatacacacacacacacacacacacacacacacacacacatatatggcttcctactaaacatgatatatcaattttaaataaatactttttcttgaataattgaaataaatagtgtgggtcacttgtatgatgggataatatgaatttgtcttaaaattcatagtgaacttttaaattaatttttaatgtactaatgtaaaataaaatgtcttttagctaaagtctcttctgtatcataaatcatagaaaaatgacaaaattatttttaaaatttctttcccgggaggtttttaagataatacattcctttgaaaggagtttgtgagtcagaaaagctggaaaataaaaaggtaactgtactgatttctttacattctaatccaagtataccatggttttcttgatcagattgagtgagtctctgaactgttgatagaaccttcttcaggaaagccccatttctctagaatataccaattgcccctctggaacttttccttaaaactcatccagtggttataattatatagttacatgtgtgcttgtttcatgtgtatctcccccactggactaatctgctacatgagggcagggaccatgtctgtcttgttcaccttgtactgagaatacatttgtggtccatcaaaaaattgaggaggcaggccgggcgtggtggctcatgcttgtaatcccagcactttgggacctgggcggattacctgaggtcaggagttcgagaccagcctggccaacatggtgaaaccttgtctctactaaaaatacaaaaatcagccagctgtggtggcacatgcctgtagtcccagctacttgggaggctgaaacaggagaattgcttgaacccaggaggtggaggctgcagtgacccaaaatggtggcattgcactctagcctgggcgacagagtgagactccatctcaaaaaaaaaaaaaaaaaaaattgagaaggggagtactttattcccattatcatattttcacatcacctttcagttgggttacttttcagatgtctgctctcatttgaagtttttttttgtttgtttgtttcctattagctttaatctaagatagtattttgttacctactcttaatttctaggtaacaccttagagcttcttaagtgacaatcctatcttcttttctctaaaagtaggcttctgcttatcagaccatatgtcttagtttttaatttggaaaaaggtttttgttttgtttttttgtttgtggttttttgtttatttgtttgtttttttgagacacagtctcactgtgtcacccaggctggagtgcagtggcccgatctctgcccactgcaacctctgcctcctgggttcaagtgattcaagagaatttaaggggacactgattcatcctgttctataaaaggcacactaaaattttgtataccatgctcacctatcattattagaaacttacctgattaaatgattaggcttttattgttcttgttgatattctttacaatcatgactatgatatactcattaatgtttttaagaattccgatgagtactgtttgcatgtgttgtagaaagtgtctcattataatcctttcctttatacatctagtcagtactgagtttgatgcaaagatcctatattgaggaggtgtttggggatttatatgagaagggttggatgttgctatctaaaataaatagagtggagaagactggtttattacttcatttaaaatagctgagttcagctattgtacctgctaaggtgttttgggataaaaatacataagtcactcattggaaatgccaatataatgctgatccaaatctccccccaaataagatgattacttgattttttttttttccttgaaggaattttctcttgtgtatatatgctaaggctgtgagtcaggagtttttggcattacttctctattagctcctagtgaggaagttcagccaggggttgaagtgattactaaatcctgaggacttcccaatatctgtttttaagagtgaactaatattgtgacttctgagaactttgaaactcatcctttgtcactaccacaattctgagatccacacacttgacttttgttttgttcaatttcaaataaagcccttaggtcatatggtttggccagtgacattatataggaaaagcagatttaattccttattagcgtcatgttccattttaatagtcaggagaacattctaaatcctatttatatactgttcttacaccagtcttgatctttggttctttgcatcatttctagcagcaacatttctaattattagaaatttctaataattggaaattaatcaaggacctaattatttctgtcttcatctttgggtctctaattgcaaatgcagtattgggattgtgaatcctcagaagcttttagctttgaaaacatgaaggatcttgtcacagtgatttttggtgaggttgttcatttagggtaagtaaatatcttcccacttcactttttcccctctgctccctgcttccaagctgtttacttatacagcaaggaagtgaagcacaagttacccttggaaagcagggttgtccgtcgctcaaagctgtactgtattgccttagagacactgagaacactagtactggctggaaagttgtgcctaatctgtttacatctgctttggattgttctttggttagccaaaaaagaagtcaagttcattgctctaaagtggtagaccaaataagaaaattgcctgttgcagttgccctgatttataaattaatgccgcccgttttgctcttttcccttaccacatagacatatccagttgatgatatacttatttttagggatatcagttatcactaccttatatatccccaggctcctgatctcacctccaacaaagaattccaagtctcaaaattgatagtaagctctggtatttaagccttcctagaagacagtcatatggttcaaattaaagtctcctgctctgtattaagagaaagggatttaagttgccatttcagcctgcggacaaatgctaaccaactagggtgttgggggttggaaagcaacttaacaaattatattgagagccacttgcgagtggagaaataaatgaccatggccacatgaagagaccaacttcgctccactcatatggcttctgttgtgtaggtgtgcgtatccatcttaaccagcttcttctgtttctccctgttcttccgtaactctttagaatattcatcattttaatgttgactctgtaggtcatacatctttcccattgccagtaaataagcagtaagggatatcaagtattttatcggcatcagtacctgagaattacataaaactaactgctcagtgtttttgttcttattgttcaagatgatgtcttaaagtctttatacttaaaataaaaattttagttatagaataatgtaagcatactatagaaaatttaaacagcaacaaaaccgttttaaatattcaagctgcaatcccacctctgaaaccattgttaacattttgaatgcattttcttttgtctttttactatgcatgtttttcatacttataatcagtgtatttacaattttatatttcccatgttgctccatatagtcatcattttttttttttgagacagagtctggctctgtcttgcccaggctggagttcagtgccaccatctcgggtcactgcagcctccgcctcccgggttcaagcagttctcctgtctcagcctcccaagtagctgggactacaggcatgtgccaccacacccagctaattttgtatttttagtagagatggtgtttcaccgtgttgaccaggctggtctcgaactcctgacctcaggtgatccacctgcctcggcctcccaaagtgctgggattacaggcatgagccactgcacctggcctcatcatttttaatgagtgcacatcaagtagatgtaccataatttacctgatctaccccatattgtttttgttttgttttgttttgttttaaaagacagggtttcgctctgtcacccaggttggagtgcagtggcatgatcatggttcactgcaccttgaactcctgggctccagggatcctctggcctcagcctcccaagtagctggaactacaggtgtgcgccgcttcaccaggcaccatattgttttatgatctcaccaattcttggtattagcacaatcctcactttttctttggcatttattactgcattctaaaacttcaaagtgtgtttacttaaccttttgaacgtacagggaatcctttctttgccttaagtttctgtgttttttttgttgttgttgttcttgtttttcacttacattgaagttgtcattcttctggattttttttcctttatatttcaccagcatttggcctgctagcactcttcatcttgagccatgtgaactaaacttcagcttatggtagtctagtttactttatgtcttctggaatccagctagtggtaatgatcccaggccttgtccctttctctttcccaggctgacttgagctggagcagtacagcactccggtgttccttagagcgatatgagctctggaatggtgaaagaagattgttaccaaatacaaagtgcctgtggttttggggagatgatgaggctctgtgtgtttactggctgcttacctttgggatttgaataacttaaagattataatcagaaaaaaaatagattcttaaaaaaaaatggggagagttaagattatctgaaagattactaaaactatgtcaactttcagttatacaggtttttaaaaatattatctaggtttttttttcttcttttctggctatgttttttcatttgatagtttacatattgaaggaaaagaaggaaaacctaattttttttagtgttcttcgttaacagctcttgttagaactaaggaagcaagtgatattatagacaaaaatgaatttttaaattatatgtagtgtatactagctttgtctcttactaatatgggttactgagaaatagttattagtgtgggagtaatactaatattttcaatcatgtgactaataagcatatcactcacacctaattgccattttagcattaatgattatacctatcactaaaatatttactcttcctttaaaattatatttaatgataactggaaacttcatcattgtatatattcttcctagattacagtttttcttcatatatgaaaattgctattttcaacaaaaactttagttgagatctctgtcttaccaagtagttcccagttcctacactctgagttctgatacattcatttcctatttcaaactgtatcgctcttttcttccctttctcccaccctctctgttcttagttagtcagtgagttgttttaagatatttattgagtgctttctcttcctgtcagcactgtgctaggccctaggaaatcagtggtgagaaaaacctctgccctcaaaagccctaatgattgtggagcttagatcccagagcagtggttccaagtggcgagaaatagcagtggaggaggaaaaggagctattcttgtctcttttgtctttcatttattatgaaatattatgtttatacataaattttctttaagcatctgtgtatactttagtgaatcactagaagcaaatacctgtgtagtaattggcactcaggtcaaaaaactagaaaatttcatcagccaggctgtacacctcatcacaaccatatccttcccccaagagaaaaaaaattttttttgtacttttgtgttaatcacttatgtgctctactttataggtgtttttttttttcttttagtagttttgccactgatgtaatgcattacttaggagttttgctccaagggatgccatttatactgaatataatgtgtagtgggtccatccttaaacaatatagttttgcttgttttgaatgatacatgaatagaatcatattgattatattattttttgtctgtttcatccaacagtctgtgagatttatccatgttgtttgtatagctgcgatttattcatttttatttctatatagtattccatgatatgaatataccacaagttatttttccattgtacctattaatagctattttaaaagcagaagcccctattgctttcagtttggggcacttactaacagctgcaacgaacattcctaaacatttatcctggtatactcttaaacattagtgtgtattcttaaacatttaagagtgtaaactgagaagtgaaattgctgggtcatatggtgtgtgtttttaggttttatttggtaatgctgaactgtttccagtaggtgtgagagttccacttgctccatgtcctctccagtgcttgttattatctactcttaaatttttgcccatctggcaactgtgtaatgattatcttgttgtggttttaatttttactgtttctctttaataatgagattgagcttctttttgtgtctcttggcctttttttgtcaattgtcaatagtcttttgctcatttttctactggattctctattggtcttattgatttataggagtttgtttctttttgatagtctggatacaagtcctttgttttttttgtttgtttgttttttgttttttgatgattgattggttggttggttgttgagatagggtctcactccatcacccaggctgcagtgcagtggcgtgatcacagcccacagcagtctcggcttcctaggctcaggcaatcctcttgcctcagcctctcgagtagctgggaccacaggcatacaccaccatgcctggctaatttatatttagtttttgtgaagacgaggtctccctgtatttgcccaggctggtcttaaactactgagctcaagcaatcctcctgtcttggcctcccagaatgctgggattacaggagtaagccaccacgtccagccgagtcctttattttataagttacaaatatcctccctcactttgtggtttctcactttctgtttaacgtgtgtataaattttggcataattctaatgtaacgaagtttaccacttttccctttatgattagcactttttgtttcttgtttgagaaattcttccatcccctgaggccgtaaagatacctgctttttttttttttttttaaataaaaacgtgatagttttacctttcacattagggctataatccacctggaattaatttggggatagagtgtgaggatggcagcctctgtaatttttttccatatgaataacgagttgttcctgtgccactttttgagaaatttatccttttcccattgatatacagtgtctaccattcttttctatgcatgtttttaaaagaaacttgacgcagtattcctgaagcattatgtgtctttgggaattaacataagcagagcaaagggtggcagtcaataataaaatgaaaaacagtaaactgtaataactaaggaatttgcaagttttttgtttttttgagacagtgttttgctcttgtcacccaggctagagtgcagggtgcaatttcgactctggtgcaaccctccgcctcctgggttcaagcaattctcctgcctcagcctcccgagtagctgggatttcaggcacctgccaccacacctggctaattttttatttttagtagagacggggttttgccgtgttggccaggctggtcttaaactcctgacctcaagtgatccgccagccttggcctcccaaagttctgggattacaggtgtgagccactgtgcctggcaaatttttaaatttcaataaaaataattatgggatgtacgtgaacttaaatataaacacatacatgatgctgaaagcacaatgtggggctggattttgagggcactgagaactggcgttataggctgcatctgattcatactaatttttctttaacctttatacttgggaatgttacttttgaacctcacgtctcaggcataaaacaaaaataatgctcatctcaatgaggtaataaatacaaggtgctgtagcgcagcactcaacagaaggtcctttgaaaaacaactgtttaatactgcaaagtgcagcacaaataggaaaactgttgcactggagagatgagtcaaggacagtccagttccaagtctttctgggatacatggctccctccagggctcttgccactcacctgcatggccacgacgttcgtttctaagtactctgaatatatttgtatataacttaggattagtatctgttggttgtcatcaatcttggtaagaaatgcctaattttattcacagcttgacattgtagataactctgaatggatctggattatatttgtagtccatttctgtgatgtagcctgtctttacaacaaataaacaaaaattctgaggggaaaatgataccatttctcatcgagaataattatgtcatcatttgttttccctcagatcaaagttacataacacttggatgagattacatggatgctgtaagccacctttttctgcttttctgctctctcggcttccttgttacattttcctgactttcttcctttagccgcgctttctctctcctttttgctgcatcctctttctgttctcgcacctagggaataggaagtacctctgggtgttttcgaagccttaattctcatccttcccttttctctactttttctttcaaaaatattttatccttttactactataattcagtttctcagaatatcttcacttaaatttctgatcaccttctcaaactcaggacataaagaaaaagtaattttttttcttcccaaaccaacttctgctttccttaagtctgtcatctgctcagggccatattctctacttctccttctttttcatcccatatattctgtttgttatcaagtactgtccgctcctttcagaacatcttttgaattgtttttttcattttcaatatctcatctgatcacagccttcaatattcacctcacacctaacctaatcttgctttctagtttattttaccacttcacctgcctgctcagaagtcctagcaactccttattgcctgtaagtgtggctctcaaacctcttcagaaagaactgtgttttactggtacctttatattcacaccaaaagcataagtgacaaaaggaaatacagataagttggacctcatcaacatttaaaacttttgtgcatcaaaggacatcatcaagataatgaaagtccacagaatgggagaaaatatttgcaaatcatatatctaataagagatttgtatccagaatgtataaagaacactcacaactcaataataaaaagataaccaattttaaactgcacaaaagatttgaatagacatttctccaaagcagatatacaaatggctgaaaagcacatgaaaagatgctcaatattattagccatcagggaaatataaatgaaaaccactgtaagatatcatttcacatccactgggacagctgaattgacaataataagtaataataataaagacaataagtgttggcaaagatgtggagaaattggaatccttgtacgttgctggtagggatgtataatggtacggccactttggatagcagtttggatacttcctaaaaagttaagcagagttaccatatgacccagcagttccactcccaggtatatatccaagagaaatgaaaccatatggccacacagaaactcacataaatgttcatagcagcattatttttagtcgctgcaaagtggaaacaacctgaatgttcaacagatgatgaatggataaataaaatgtggaatgtccataccatggatgttattcagcagtaaaatagactcaagtgctgacataggcaacaacatggatgaacctccaaaatattatgctcagtgaaagaagccagacactaaagcttatatattgtatgattccatttatgtgaaatgtccaaaattgacaagtctcatagagacagaaagtagaaagcctagggctgggccattggtgaaagacttgaagggtgttggggagtaactcctaattagcacagggtttctttttggggtgatgaaaatgttctaaaatttcttctttggttttttcactgccttttccttacaaggtgaaaaatgttctaaaactgattgtggtcatcgtcgcacaactctgtgaatgcgctaaaagccgctgggcattacactttcaatgcgtgaattgtatgggatatggaatacaagaaatatgttatggccaggtgcagcggctcatgcctgtaatcccagcgcttcggaaggccgaggtgggaggatcatgtgagctcaggagttcgagaccagcctgggcaacacagcaagaccctgtctctattttattctatgttttaaaatttaaaaattaaaaagaaaaaagaataacattttataagaaaatattttatgagagacttataaaagagacattaagaatatgaagtaatatatttcgtattccttatctcaataatgctgtagggaaaaaacaattgaaataaaagcagtaaatgagtggagcatggagagtgtgtcatgagccaaaggttataataaattcataatcaagtttttttgtatctgaagtctaataaaatttttaaatgtggaggaaaaaaaaaggaaagaaaaaatagtaatggttcacaggatgaagtccaaggtcttcattctgtcatttgaagctgtattttatctggcatgatgctgctgtgcactctttatttcttgccatatgcccctacaaaccctttattgtacccagggcagtgtcttgcttgtcacttgaacttagcgagttaattctaagtgttctgcccttgctcgtgctccctcctgactgccattcagagcaccctttccaccttccttcattgcctctccagatcctggccattcaaccaagttctgcttcctttgagcctttccctagaactatgttttatgcctttggtttgttagaagatctaacacattgctattcccattggaagagttccataaatacatgttacataaagagtgaaggaaatggaggaacttacttagagacttataaaagagacattaagaataggaagctttagtaaataatgaaagatattgtgaattagagtagctccagagccaaaataagatgaaaaagcctattaaatagaaatggttttctaggttcaagttcagatcaaacttaagctctaaagcttttcttggcttggtgcagtggctgttgcttgtaatcccagcacttacgaaggcctagtcaggaggatcgcttgagcctaggagtttgagaccagcctggacaacatagcaagacccccatcactacaaaaaaattttttttaaatagctaggcatggtggtgtttgcctgaagtcccagctacttaggaggctgaggcaggaagatggcttgagcccaggaggtaaaggcttcagtgaactatgattgtgccactgcactcccatctgggaaacagagcaagactccatctccaaaaaaaaagtttttctttacctttttctttggcatttctgacttaagccagtgagaattcttcctcattcttttttactcattgcttgaatttgtgttatgagaatttttttcctccaacttggatgatctttcaattttttccagttgtctatacatgtagataactgaaaacagcaaagctcttagtgattctgttccatgtctatctgttccccacctccatttcctaccacacaccccagcattcccctagtacatcactaaactatcaacagaacctaaaatagactagtttgttttaactgtatttttctttccagtcctcttaaaatgtgcagcaaaatgtccccaaaggcaagcagctaagagaatgaagaggaggtattctcccatcacagttactcagtcccagaagtattgattggaaggcactgaattttcaaaatgacttccagatttagtacatggtaataatttgaggctttcccacacggataatttaaatgttcagaaaataagttatgttatagctgaatgggcagcaaattagacagaattttaacttacaagatgcatagcaatagtgaagattaatgtgaaatactagtaaagagccactggtagggaagagaagacagcgatatgctttcaatgaaaccgtcaatttataataatatgtatattgaaaagggagagtggatcagatcctgttaggtttggtacgttaaagaaagaattaggataccgcaggctcagtaattaaaggaatctgcccataattggggggtaaaaggtgtcttgtaggcagggaatagcaagattttgcttgaatgtacaccttagagttgggagtaacaatacttggaatgattatagaagacctctcgacaggtttctgagactagaggattttgtttggtgcataataggagatgagagcaagccagtagtatttggttgttgttgaatcttacagaaatcttgcatttggttattgggtctagctgttgaagccagctgtttggatgtaacatagtggaagcaggtgcttctgcagatgtggctctctctagttgtctggctgtaatatatcattcattctcatacactcatttctcatataaaatccttataactattagcagtctaagcctgcagacattgctgaagctggttccctttgatattgttttctttgtaacagtttcctgtttggtagataaaataacaagctcacactattaggtttgtgccttcacctccctggcaaagtaacatgctagaaaggttactaaacattagtggttcaaaatgagaagtctgtacattttatctgcttataggcgaatttaaactcaactggtttaaattcattgcttagcctgttgcatgctccattgaaaacacaaacaaaaaactccatgattcttctagccatgattcttctagagtttgttatccagtcattccagtgccagaatccatcaggcagaacagaatcattcgcatttctcctctgcactggagagaagaggaaggctgatcatggaaaaggacctggtgaaggttttttgcaaatctaaggatcttttttctgtcttttatttttgcaaacctaaggatcttccttctggataattcccagagacgtcaactttgctgaatctcagttgttgggatttttagcaacctgttcccactctcctaagaaaaaaatcttaatagtgaccagtgtgtgcagactttaatttgtaagtgaaagttacggtgtttcaaaagttgcaggttagttggtagagcattaaatgcagttttgttcatagtcaacattaagtgcccactgtgttaaacactgttagatactgtgaaagagagaagaataaggtaaggaactagagagagagggtagatctttacaagagaggatgtttttcaggagctagaagaatacattatttatgtattcaaataataaagggaaagaaagtacagacagagtagataggggacatttcttgtaggggatccaggaggacttcacagaagaagtattatttatttccattaatgaatgagagtattcatcttctcatagaagaagctataatgattctatttgtggtcctgactgccacaccccttatgatcattaagttaattttagaaccttgggagggacagctaggaggcagaggctctcgttgctggccagctgccattgtcagtttgagaagtctccagtagtcaggaggtgacaagaggattggcccagttattttattgcagtttaatttcgtgaccctttcttgagtctctgctatgtattagaaccactgtgtagagactaggataaataaaacggtatctcctccatttactaattaatggagggtataaacacacaatacaattaagtataatataaggcagaggctgggcgcagtggcttacgcctgtaatcccagcactttgggaggccgaggtgggctgatcacctgatgtcgggagttcgagaccagcctgaccaacatggagaaaccccgtctctactaaaaatacaaaaattagccaggcatggtgatgcatgcctgtaatcccagctacctgggaggctgaggcaggagaatctcttgaacctgggaggtggaggttgcggtgagccaagatcgcaccactgcactccagcctaggcaacaagagtgaaactctgtctcaaaaaaaaaaaaaaaataaataatatatatgtatatgtatatgacagaacagtaatgggatgtagaggcgtaaacaaaaggctgtggaagcacggaggaggaagccattgacatggtgttttctggtggaaatcagttaagccttcatacaggaagtaatatttgactgggccttgaaaatgagtgatactttaaagatggaaaagaaaggaaaaggcatggtacagagaggaaatagcatgtggaaggcatgtaaacacaggatgtgaatagtctagtgatgctagcatggccagggataaattggaaacataggatggagctgggttgtgaagggccttaaatgacaatgctgagatgaagactcttctgtaagtagaagggaggcagcccatgttttttgagcgaggaggtaacaggatctggtttgtgtaactttgtgctatgaatggatagcttaggggaaaatgaaataggaagtaagcaatagcatcagtcaagctagggatgataagagtatgaactgcagtggtagaaatggaaatagaaaagaggaggtggagtcaagacacatggagttgaagcagtaagagttttattaccaggttgaaatgggaaacgagggagaaaggacttgaagatgactccagtgtttctagtaacacaggtggtgatgtcactaatgagggtaaaagcactgaaagcgcaggtatgactttggaaaatggtgggtttgaggtgtttcttcccaagcaagtattggggattcatgccaagaacttaagagtggtaccagggccagacatataaatttggggtatttatatcaaatgctggtagaagtagcgagattaaaagagttagccctgagaaaacatagagcaaggagaggcagttaaaatcagcagagcctgctgaaaaacaccttctgtagaaggtagaaagaaggaaagcaaatagcaaaaggagagttgtcaacaagagtaaaactggaaaagagagggacgggtttcagagagtaggtgggtgcttaacattttcagatgctgtgatttcagggagcatggtgtccctggggcatgagggatttctagcctgtcacatgggtacacatacataaataaaagcatttctacaccagagactcaatcctttggccagccatccttgctcattgtcttagtgtagctcctgaagactcatccctgctacctcccatctgctgcgtcttgtagcagtaggagagggagagaagaagggaggaaaattgaagcacaaggagagttaaaattaaaatgtaagcattcttgcttcagtttgtaaataagttgcatattcttccttttgaataaactacttaattataataatgtcactttgtctaatttttaaatggtcatagatgtgtttgtcataagaagtaaatataacataaaaattctgggtccaagccaaaagaacaaagctggaggcatcacactacctgacttcgaactatactacaaggctacagtaaccaaaacagcatggtactggtaccaaaacagagatatagatcaatggaacagaacagagccctcagaaataacgctgcatatctacaactatctgatctttgacaaacctgagaaaaacaagcaatggggaaaggattccctatttaataaatggtgctgggaaaactggctagccatatgtagaaagctgaaactggatcccttccttacaccttacacaaaaatcaattcacgatggattaaagacctaaaccttagacctaaaaccataaaaaccctagaagaaaacctaggcattaccattcaggacataggcatgggcaaggacttcatgtctaaaacaccaaaagcaatggcaacaaaagccaaaattgacaagtgggatctaattaaactaaagagcttctgcacagcaaaagaaactaccatgagagtgaacaggcaacctacaaaatgggagaaaattttcgcaacctactcatctgacaaagggctaatatccagaatctacaatgaactcaaacaaatttacaagaaaaaaacaacaccatcaaaaagtgggcaaaggacatgaacagacacttctcaaaagaagacatttatgcagccaaaaaacacatgaaaaaatgctcaccatcactggccatcagagaaatgcaaatcaaaaccacaatgagataccatctcacaccagttagaatggcaatcattaaaaagtcaggaaacaacaggtgctggagaggatgtggagaaataggaacacttttacactgttggtgggactgtaaactagttccaccattgtggaagtcagtgtggtgattcctcagggatctagaactagaaataccatttgacccagccatcccattactgggtatatacccaaaggactataaatcatgttgctataaagacacatgcacacgtatgtttattgcggcactattcacaatagcaaagacttggaaccaacccaaatgtccaacaatgatagactggattaagaaaatgtgtcacatatacaccatggaatactatgcagccatagaaaatgatgagttcatgtcctttgtagggacatggatgaaattggaaatcatcattctcagtaaactatcgcaagaacaaaaaaccaaacatcgcatgttctcactcataggtgggaattgaacaatgagaacacatggacacaggaaggggaacatcacactctggggactgttgtggggtggggggacgggggagggatagcattgggagatatacctaatgctagatgacgagttagtgggtgcagcgcaccagcatggcacatgtatacatatgtaactaacctgcacattgtgcacatgtaccctaaaacttaaagtataataaaaaaaaaaattctgggtccagctgagtaggcttacatgtgtttcctgattctaatgtggtcttaacatcatccagtttcatttgcattcttttttttttttggagacggagtcttgctctgtcgcccaggctggagtgcagtggcgccatcttggctccctgtaatctctgcctcccaggttcaagcaattcccctgcctcagcctcccgagtacctgggactacaggcgcacgccaccacgcccggctaattttttgtatgttggtggagaggaggtttcaacatgttggtcagaatgatctcctgacctcgtgatccgcccacctcggcctcacaaagtgatgggattacaggcatgagccactgcccccaggcccatttgcattcttaaaggaacaagtaccactcgctttattctgcctaggtttatgaagggagcagtactatttttgctgacataaactgatcatgtttatatttcagctcatctatatctctgtttcactattattgttttaagtgtctggctatgtggtttctaaatgttctctttttgcatttaatattcagacaatgatttggaatctttagtgactagagactagtgtttgctcagttataataaaaggttacaataatacgaattatgtccatttgcctttctagattttggtttcagtaacctcttcactcctgggcagctgctgaagacctggtgtggcagccctccctatgctgcacctgaactctttgaaggaaaagaatatgatgggcccaaagtggacatctgggtaagtaactgccttctcttataccccacagcattagctacccttggttgatgacagctattcgcatcctgaaggatacataatgatgcaacatgaattgagatcctggtcacctgttctttcaagtcccaattcctgtgcaaagcctttttttttttttttttttgaaacagagtctcactctgtcgcccaggctggagagcagcaggatgatcttggcacactgcaacctccacctcccaggttcaagtgattctcctgcctcagcctcacaagtagttgggattacaggcacaagccaccacacttggctaattttttgtatttttaatagagacagggtttcaccatgttggccaggctggtctcaaactcctgacctcaggtgatcctcccgccttggcctcccaaaatgctgggattataggcatgagccactgcacccggcctactcgtgcaaaatctttcctccaatacttaccttgtggactgagccacatatttcaaatttcccctttgcatttgcaaaagaagcccaagggccagcttggatgggggccgttgccaagaagagagattatttctactgtggccacttaccttatccccagagaatgagtactgagaaaaattcaggatgttaccctaaattaatgcctagaagcaaagaagattgttaactgttctaagatggaagaaaaagtttgttccataatcgtatgcatgactcaccatcatctgcatacacacactacagtagtcttttttgtttcccctgatgtgattaattgtacatcctctctgtttgggatgcagagccttggagttgtcctctacgtgcttgtgtgcggtgccctgccatttgatggaagcacactgcagaatctgcgggcccgcgtgctgagtggaaagttccgcatcccattttttatgtccacaggtaagggagtcgctagcacacagctatgaatgggttcatgaaagttagacccactcagttatcccaggaatttagtgatggagtataaatggcccacttacaaccttttttaactccagcttgctgacctgatgcctccaggaggcaaggttctgtagaaacagtatataggttttggcatcagagagccctacttgggtttgaatctgggccctaagtctgtctcagctttagtgtcctcatctataaattggctgagagttttgtgagggctgctattactgtaaggattaaatgagataatgtatgtgaagactcagtaggcccatggcatagcagtaatgcaataaatgcttttgtttcacttctgtcttcctaccctttttcaggatatttccacttattgggttctcattgcaatgtggttttaaatgccaaggataaagtaggctttgcatcttagtcttgctactgcttcatttcctatttctgtgctctttgtcctccagaatcaaatttaaaaaattttatttaacgagtgggcagtaaggtaggcaggtcttggaaaaatttaacaccgaaaatagatacaagatactcagaattaacagtattttatcaccatttatttgcacataagaagggaacattttagagaacgcaaaaagtcatatagttttgcttaatcatctgttttcattttaaggaagaacatgtgtccactgggttgacaacaaggtagaagcccatggtaattgcattttagaacaaagaggtgaaccttggagtagatttaacttggctcctttgaactgataacgtcatagtgtagaagatagtgctaaatgctgtgggacaaataaaatagagaaggagttaggatagtggttggtaagttacatgaaaaccccttcatggagaaagggacctttcagcaaagcctgaaagaaggtgagggtgaatgctgtgcagtccggggaagagcaccccctggctgttgaggggtcagcgcagaggccgcggggatggagcatggctgcatgtgaaggaacgggaaggaggcctgcgtgcctggaaggaaggagcggtgagagatgaggaagagagatgaggtcagagaggtaagagggagcttaattttagggcctagttaatgtaaagactttagattttactgtgactgaagtatacaggattggagggttttgacaggagtgatgtaatctgagttttattttttccaaattttatgatgaaaaatttcaaacatacaaaaaaattgaaaaattttgcagtgacttttgtttaaaaaagatcactttggctgctatgttgccggtaggctaaaaggtacaaaggctgaaggagggacaccagttaggaggagacttttacaatagtccagataagagatgttggtggctggttcccagtctggggtgtcgagatggagatggtaagaagtgatcagattcaagagatgctacctaccatgtgtggcaggcactgttcaaagcacttcacaaacattaactcacttcattattttaacaaccctatgagatacacaagattattgtctccattttactggtgataaaactgaagccaggagagattaggcaattttcccaagataacactgctaccaagtggctgaagtagaatttgaacccaggtattttggctccaataacatttagtgttggatttgatatgaaagaaagactccagagtttctatcctgagcaaatggaaggatggttttactgccaactgagatggggatgactggggaagaatacttacattttggagagatgttttagacatgtcatgtttgaggtgcacattagacatcagagttaagatatgaattggcagtcgcatttaggagagaattctgggttggggatgtatgtttggaatccccagtgtatagataatagttaaagccatgaggtgagctcactttttaggcagtggttacagagaagagaagaggtccatgaattaaactctggaacataccgctatttagagaacaagcaggtgaagaggtatcataagagttgctggtgaggtaagccagagggcctgctgtcctaggagacaagtgaagagactgttcccaggaggagggaggagggagtgaggagctgtggggagtgaatgctgctgccaagtcaggtaagaggactgagaactgaatgttgcatttagaaatgtggagatcgttaatgattttgtttcttttttatccccccacaccctcaccttcctagatcattaatgattctgaagtacacttttggcagaggaacaggagcaaaagcttaatcatgtggttgcaacaaaaaaggaatagaaggaaaatagacgacacgctctttccagtttactataaaaggaagcagagaagtggtccagtattgctctggccagggtcaccagtgatctcgttattgatcaactgcatatccttagtctttttcttaatcactgcccagcagtgattaacacttcacccttgccctccctccctctctcctttcctcccttcctccctaactcccttttttgggactgggtcttgctctgttgctcaggttggaatgcagtggtgtgatcgtggctcactgcagctggacctcccaggctcaagtgatcctcccttagcctcccaaatagctggagctgcaggcacacaccactatgcctgactaatttttttttttggtagagatggggttttgccatgttgtccaggctgatctcaaactcttgagttcaggcgatctgcctgccttggcctcccaaagtgctgggactattggtgtgagctactgtgccctgtctctttagagttatatgttagagcagctttagattcacagcagtattgagtggaaggtacacagtttgcatgtaccctctgtgctgtcctgcctccctcccctgctgacccctgtcataatcaatgtgccccaccagagtggtatgtttgttacaatcaatgaacatgcattgacacattatcacccaaagtccatagcttacatttgggttttctctcagtgttacacattctgtgggttttggtaaatgtatagtgacatgtattcaccactataatacatataaaattgtttcactgcccccaaatcctctgtgctctgcctgtttatccatttctccctaaccccctgcaactactgatcctttcactgtctccacaagtttttccttttccagaatgtcatatgggtagaaacatacaggatgcagccttttcagattggtgtttttcaaatagtaatatgcaataaggttcctccatgtctcttcatggcttgagagcccgtttctttttagcactgaataatatttccttgcctggatgtaccaccctttatcctttcacctacggatgacttggttgcttccaaattttgacaattatgaataaagctactgtaacatctttgtgcaggtttttgtgtggacataaatttttaattcatttggttaaacactaaggagcacaattcctggatcatatggtaagagcatggatagttttgtaggaaactgccaaactgtcttccaaagtggctatgctattttgcattcctgccagcaatgagtgagagcttctgctgcgccacatccttgtcagcatttggtggtgtcagcattttggattttggccactctaataggtatatagtgatatttcattgttgttttaatttttaattctctaatgatgtatgaggatgagcatcttttcttatgcttatttgccatctatatatctttgttgaggtgtctcttcaggtctattggtcgtttttaacttcaggttgttttattttcttattgttgagtcactcattacattttaaaacactttttctcattgcttctgagacgccatattctccagttttcctcctgtcctctggaagcaccttctccatcttctctaccagacttatttttctctgctcatcctttagatcttttcatctttacaacatctttctggagccatgttatttactgctgtagcttcactgatcactgtggtgatcagtcctcagttaactttttgtcccagacctctcgatctagggcgacatatccaagtatttgctaaccattatcttcactttcatgtattgaagtcagatcaatggagacatattcagaaatgaacttgacttccccctccctagatttgctctattctgtatttgctgccttagtgaatagcatcaccatctgaccaaggccagcacaagccttgatgtttcctctctcaccagtgccacagctgatcagttaccaaatcctgtcaattcaaccctccattcatgtaggcacttctaagaccatactatcatcttcccttgcctcaattaaacaatagccaattatatggattcctggctccagtcttgtccccctctaatctattgtcaactttgctacatgactaatctttccagaacacaaacatataaataaataaaacataccacacacacacatacacgtacattttctctctctttctctctctcttacttaaacacacaaatctgattatatcattttctagcctgaaacttttcagtggtttaccattgcctctaaggtaaagtttactccataaggtggcaaagcattggcttacaaacatttttggctatgataagaaaaaagtacattttatactgtgacccagaacacgcatatatagatacaaatgaacaaaagctttgtttgcttgatttagagatggggtcttgctattttgtccagactgaactcgaactcctgggttcaagtgaccctcctgcctcagtctcccaagtagctgagactagaggcgtataccaccatgactgaaaacaaaagacttttttttgagacggagtctcgctctgtcacccaggctggagtgcagtgatgtgatcatagcttcctgcaatctccagttcctgggctcaggcagtcctcccacctcagcctcccaagtagctgggactacaggcaagcaccaagcaccatcatgcccgtctaatttttaaacatttttttatagagatggactctctctctgttgaccaagctggtcttgaattcctaaccttaagcgatcctccctccttgacctccatgagccactgcgcccagccagcaaacaatttttttaaaaaagcaaaacttaccttactatgtacagtgcatttcaatatattttattctattccattttaaaaaatgctgatttcgacttactaaattgatctcctatctgctatttcagaaacaatgacatagaaatacctttataacctgactcctgcctagctcttcagccccagctcccactctcccaccagtcaccctaattttcttctcgttccctgaacaagttctgttttctggagcatttcccactgccgagaatacatcttccctatcccaccccactccacccactcctgtattctagaattcagaataaaaaaaattagattggatagaaataagaatctagataatttctattcactcttcatgtctctaaactttctcttatcgtggtgcttaccaagctttatattgtaactacttctttcattgtatgtcttccacaccagactgaacttagtgaaagtacagacgaaacatgtctttttcacaactgtcaataacctaccacaggatctggtgtgtagtaggacttagtaaatatgaaatctgaatcagaaccaccccatccccagtggcatttgtttacattcagaataaaattcaaggagtcattattactatggcctacaaggcacagctgtcattgccccttctttggtctcatttcctgttactgttcacctccggttctgagctccagtcacagggccttccttgctgtttctcagacttgccaaacacatacattcccctcagagaggagtcataggtcccctcagagaggcctgtcctggctacccccatcattctctttctgtaattctgctttttcttcatagcacttactttattgtctcctcacctcctatcaccacttgaccataataagcatttggtttttgtttactgttatgttcccagggctttggacggtgcctgagttctagtaggcactcagtaaatatttgttgaatgaattaatgcatagggttgttcgaacactgactccaaaagcccctctggagagtagtcttatccaaatcataatatcagtagtaatatcaaataattacatttgtttagggcttttgagtttataaaataatttcttttttaataggtttattttttgagacaggatctctgtcgcccaggctggagtgcagtggcgtgatcttggctcactgcagcctccgcctcctgggcccaagccatcctcccacctcagcctcctgagtagcttggtctacaggcgcacgccaccacgcccacctaatttttgtatttttttgtagagatgggatcttattatgttgcccaggctggtcttgaactcctggactcaagcagtccgcccaccacggcctcccaaagttttgggattacaggtgtgagccactgcacccagccaatatattttttaaaaatatttcaatttttcagtttttatatttttggcgacagggtcttgctctgtcacctaagctagagcctagtggtatgaccatagctcactgtagcctcaaactcctgggttcaaacaaccctcctacctcaggctccaaagtagctaggactataggcctgtgccaccattccaagctaattttttaaaagattttttgtagagatgagtctcactacattgcccagtctggtcttgaactcttggcctcaagcaatcctcccaccttggcctcccagagtgctgggattatgggcagaagccagcatacgcaacctaaattattttcttttacttaatctaatttgagctacataactatattttagaataggtaatagcacatattttatcatcttgctgatgaagttttggaagctgaagtttagagaaatgagttaacttgccaaagccacacaggtaataagtaactaggtcagtattcaaatttagtgtttgttttactacaccatactgttgcaaaaagagcaagataaaccacttcctttacttttccaatgtccacagtgtttcctgtgagcaacttggatcttttctatcctccacccccatcacctcacaccatggcaagagattcttactgaacccttcccggagccggcttcagatagggggtcctagaaaacagctaagcatgctgtcagccacactgtctattagtgcttagaaataaactaacagtctaactgcttagaactattatttgtaatatgatgttagttaacctgaaagcttcaagactcagagaaagccaacaggattatcctaaacgtagtcgctctttaatcccagttaaataattccctaagtagcaatacaagtttttgtatgattagtacagagaatgagaaacaaccagggtaggaagtcagtagatacttgctatattaccaatatgatctctctggcccttggtaatatacatgtgcttggcattgctgaatgtcataggcctaaatcccaaggcccattagagaatacttcaaaaggataaggcatagcagaaaatgaattcatcggttatttaggcttttcttagcttagacaaccttcaagtaccagaaagtgtcaggtgaaggaagtttagagtctgtcccagagtcctttttctgcttacgcctcgtgtttctgggcacagttgtatctcagtagacctggagcatagtcttctgatggaggcgagtgctggctgcttttcagcctgtgaggccagctgctattgctgtattacgggagatagcgtgattgagagaattccttatgcacaagatccttccttttctcagctgttgtcataggcttgagctgagtttatctgtttttcttcctgaagggtctagaaactccagcagagctggtatagtgttctaaatgatcacttggaagaccagagggcaaagcctctaccatgtagctgcttctagccaagttgaattccagagtagctacatacagctgtgtgggaggccatgctctgcaaatggatatagttagctcaagaattctaagctgctctctattgtcagtaatgtgtggaatgaagtatcctcacaattcatgtatatttctatgcctggtgttgtttgtttgacacaagtttcctttcataggcatcctgagatgtactaaagacatatattttcaagttggaatgacagtggcatacatttaaaagaggatttatttgaggctaggttgattgtataccacctagtttttataattatgtatgtgtcttcctcctctccccactagaatgtaagcctcttgattatcagagctgtgttttacactcaataccttccataaaacctgacagcccctggtaagacataagcattcagtaagtgtttttgaatgaaaaactgagtcatcactacttaactatggaatcttatatcagactcttgtttttttttttttttgggagacagattttgccgcccaggctggagtgcagtggtgcgacctcagctcacggcaacttccgcctcctgggttcaagtgattctcttgcctcagcctcctgggtggctgggactacaggtgcgtgccaccacacccagctaatttttgtatttttagtggagacggggtctcgtcatgttggccaggctggtcttgaactcctggcctcaagtgatctgcccgcctcggcttcccaaagtgctgggattacagacgtgagccaccgtgccctgccagactcttgtattatattattaacatgatctaaattatttattcatcaaaccacttggttttatatactttttttttttttttttttttagtgtagagacaagattttcatcatgttgcccaggctggtcttgaactcctaggttcaagcaatccgcctggctctgcctcccaaaatgctgggatcataggcgtgagccatcacgcccagccatggttttatgtagttttgttatatgagttattgtgaaggtgaccaagtcaaatgacttttaggtgtaaaagggtgttttgatctactgtagagtttgcttcctattccttaagtaaaataagtttgatccaggccagtgtttttggattaaacttctcagagcatcccaaagagcagtttgataaaaccctgagtctaaattatagaaggattaaaagttgaaacttgctgttttcttgagctgttgtggaaggtgaaacctggcctggcttcatgtgttggcaaatatttcctctgatctgcccttccaccgatggatgcaaataacttaaattttttgagcaccagattcattcaatatatttttttaacaacatacttaaagcctagtttaccctattcccctgttgtaccacctgctagcagacatactaagatcgtttatttaactgaaggaaaattaatttacagtgaaaaaactgcagcgttagtgaaggcatagagatctcttgtggacaatatttttgagtctttattgattagacttcattgtgacttaattaattgtaatactgcatgagcattttattactgggaacgcaaaacccaggcttacataatgcttctgatggagaatgtaacctgcagctactgccaaaaagcttctacttagaggcaaacaactctgccctgataggcttactcatcaagaaccacacagcatcttgcttggctaaaagcactttgtttagaaccaatggggcaagggattaaattggctcacccaccaagtctccatataccgaggggctcagagtcctcaaagcagttttctcataccttttgagacacactgcaccgccagagagaaaaatctatgtagtgctttcatgtcagtgaatgtagaaatcacagctgatgtcagaaaagaggttaagaactacttcagagtgaaacaggccagccgtgttcattcccatgacctaacataactaaaaaccagtagataaatagtggtactgccctatttattattagccttttcaaaccagctgtctcctggcttatggcaaccctaaatagaaaaataaaagaaggacattccaagtggaaggacttcagagatatggataatagtcaacatttattgaccactttctatgtaccaggcactgttgcattaccttatttaatgttcagaacaactgtctgaggtaagctgttttatgaggtaaactgtatgagaggttatttgataaataagaaaactgaggcatgataaggttaagtaacatgcccaagatgcacatctagtaagtggcaaagctgagatttgaacccaggcagtctggcttcagagaccatctaaccatatgtgtttgtattttcattctcaataaatacatagtaagttagtccaagaatcaagagagtcatagaatggatatatttgtctgcatcgggattacttactgaaaaacgagtagcaggaactctgtattggacctggaggcagaattttcttaaactgtaatgactgatactaggagtcaaaagatactagaatgtaaaccacaagatggacagcctcctgtaaaacagtatagcaagccaggatcttttcagggttgggctagagctaaatcttggcatccctaccctttaggccaggatttcctgatttctgaattttaattctggcagcatcatgcccacctagaaaaactgatcgaaagtaaggaagttcaagaaataggtgtcatttttctaataaatggatatacatgggtcaaaaccttttctttgtggtctgtctcgggttgataaacttggtaaaactgaagagaaaagcctctcagtgcatgtttattgattcctaaagaaacttttcttatgggctccatctctttgcgaaagtgttccaggccatctccctatggcctctatgttcagtcactgaaagtgtctcacagaatttagagatataaagaactttatttctattccaggatattctgattacaataatttgcagaaaccactagggttggaatttatagttaaatggataattctccaccttcttttctgatatcttactgttggaatatcatttttgaaattttactgaagtgtgggacttccatttttcttcccccgagcaactgaaaataaatgtttcaaaacatgacagttttttcttagtgccattgtgtcaagagaagctaatctcaatgcttattttttatgagtcggatcttactgcagtcagtgctgtcataggttaagttccaaggttgtgtattttctttgtttgtgtaaaactgtggcattgactacatccttgtcaggcttggtggcatgcacctgtaatcccaacaactcaggaggctgagatgggaagattgtttgaggccgggagatcaaggtggccagcctgggcaacatagcaagaccctgtctctaaaaaataaaaataaaaaaaatagccagatgtcactttgggaggccgagatgggcagatcacgaggtcaggagatcaagaccatcctggctaacacggtgaaaccccacctctactaaaaatacaaaaaattagctgggcgtggtggcatgcacctgtagtcccagcaactcaggaggcatattatcgtttatgaggcaggataatcatttgaacccgggaggcgaggttgcagtgagccgagatcgcactgctacactccagcctgggcgacagagcgagactccatcaaaaaaaaaaaaaaaaagccagatgtggtggtgtgtgcctgtagtctcagctactggagaagctgaggcaggaggatcacttgagcccaggggttcgaggctacagtgagctatgattgcacccagcctggccaacagaatgagactccatttcaaaataaaaataaataactagtcctttaacttggtatttagaaatgtttatttctattatagcagtaatatgtcaaaatttaatgtatagaataaaagcattccaatccttataacaccattgttctagcagtacccaaaataacaaaatttcagtgcaacaacaaaatccctgtattttgtattattatagttaacatttatacaatctctgaatgtatctataggttagcacatttactgtatgttatttatatatacaaatgtcattttttttttttaagacagagtctcactctgtcacccaggctggaatgcagtggcacaatctcggctcactgcaacctctgcctcccgggttcaagtgattctcctgcctcagcctcctgagtagctggaattacaggcacacgccaccatgcctggctaatttttgtatttttagtagagactgtgtttcaccatgttggccaggctggtcttgaactcctggcctcaagtgatctgcctgtctcgggctcccagagtgctgggattataggcgtgagccaccatgccgggcccaaatgtcttattttgaggaccatttgtctatttgtttacatttttaaatagtgactatgttaaataaataggtttgatcttagctggcagttgacattgacagtgtttcttgagcgtattaataaaacatcatttttagggcttagtccacaagcagagtgaagattcctaactctggctggcttcttagcaaaagaaggtatcttggcagaaaacacccctggtttcttattgatttactttttaattatttctgcagggatcatagcactgcaagatagtcacactgttctgtccatgttataacaagatcaggacattataacagactttattttcttttcatgaggaaaaacagcatgttttgtgtgcagtttgtcttttaggaaaaggcaggcagcattaaagaggtgctctgagacaaacattttttaaatccagaacatctaaaatacagggatagactcttatcaaagccatgtggctccatcctgagattgctgttgcaggccatccattggtcttgttctgtttgctataatagcatcacttctcccccagggctggtacccgagctggacaaagtgagtggataacagcatcaagcagtgtattgcatagcatccttgttctgaaaactttaagactttaatgtcatttaacttttaaaaggtttttgtcaagtaattcattttccatagaaacatgtttcagagatttaatcgccaatttatttttgtttcctttttagattttgaaatttagaaaaaatagaaccctctttgaagtgagaattgtgccagaagcaattcattactaagaagtaaacatttttaagaagtttgtttaaattattgaaaatatagaactcttgggctgggtgctttagaattacctttgaacacacctaccattgactggaccaagtacataagaaactagatcatccccttcttctgagcacctgtaagcagcatgcactttcttgcctgcaagaaagcctttctgtgccttctggtacacagatgtcttctgtttccaccagctcaaagcagctttatgtggtcagaaagaatccatgactcagtttcttctatgccattgctcaccacagagctggaaaggattgttttgccatgttctgttctttggtgtcacatgcagggtttcagggacaaatggctttccctccttcataggatcagcctgaagagtctgatgatctggttccttaaatttttacctatctcctcttatctttgatccttgattcgggaagccttctgtttcaagccttccatcatagtcttcatcaccttgcaacaactagagtatataaataagtttgctctaccacagtgtatttaatcctcaccagcaaaattatgaataagacaacgctccccatttagtgttctcatgtccctgcctcattaatccatccaacttgccgtctccccttaaagctagttcttggtctttgcaccatctatttgcctggcccattttgtactaacctagcttgtgggtgattctgtcatgatggaacctgtgaagatgacatggcatctgatctgccagaggagagaattgttttggtttgttttcataacccagaataccaataatgtgtttattttaggtaccatgtaggttaagagctccctggagtaagactgaccagaatttgtattctgctttggcctcttattatctgatcaagtttctcaacttctctgattttaaattctctttgtctataaaattgagataatagtattgggttggtttgtgaagtagatgcttaaattaacttaaagggtttagcactttgcctatcatgtaaatggtcaataaatgttagtaatgattaaataatattgttgaatgaattgctctattagtctttcattctcttcttccctattttttttactcttttctatgtatctttctctcatttttgctctcttggtatgccaaagggacattactattttcagtcaaatccacacggcttatggagaagacttatctcccaagaattgttttggtttgttgtaaccacttagagaaatttgttttattatcaaggacaaaaaaaaagaaaaaaaatgttgctttcacagatacggactcacactggctatgtcaacttaattctcattttaggaccctgcccatacagcagctctctccccacaaagtcatccaaatgcctggcagcgcagcagggcaaggcctgtgctgaacatcctctagttaacgttctgttggcagatcaggtttcctgggcccacagtgactctcactgcggagaccgcttggcgtcttgcatggagcagatgaaagcagctctgaagggaagctgcttctctggcacacacaagcagaggagcatattcttgcattgcccaaagtggttcagtttcatttagcatcagaggccctgccttttgggtgggagcaaataatggggcccttttattttttatttatttatttattttatttatttatttttttagagacggagtctcgctctgtcgcccaggctggagtgcagtggtgcgatctcggctcactgcaagctccgcctcccaggttcacgccattctcctacctcagcctcccgggtagctgggattacaggtgtgtaccaccacacccagctaatttttgtatttttagtagaaacagggttttaccatgttggccaggctggtctcgaactcctagcctcaagcaatctgcccacctcagcttcccaaagtgctgggattacagacgtgagccaccatgcctggccaacagggaccttttagacaataaaatagagtagttcttggtatctggaaaagttgatgttttgtttaatgtgagggctccatctttccatgcttgtaaattgaatgtcctgtgggtgattgtgttcttaggtttgagagcatctattcccctcgttttcaccctgtttccatgttttatgtagaatggtgtcttcaaatctcatctgaatttaatttcatgaactacatgacacttaggaaatatgaattgatgatgatactctagctttctgcattttgtcatattttccatctgcaccacatatgaaaaatgttaaatttctgttccttggcacgttcgatattatgtaggatagtcaagattaaaaagctcttgcccttgacactgtaaccaagaattgttttggttcttaatctggggcctgtagacaccagggtctgggggatctatgcaggcttcataggacatcgttgagtagtctaaagttacatgcaaggtcttgtgtataaattcttgtgcagatttttttttttttttggagaattttcaaggcatctgaggccaaataatggttaaggatgactgaatagaggtttcaagatcctgaaattgaactagatatatcttctaattaggaattattatggtactgtttttggtttggttgtgtgtgtggtggtgttgttgttattgttgtttgcttttaaggaaattgccttggaaaaaatctgttttaaagcaagcctgtaactgaacaccattcagctttggtcatcttatgcactaaattgtgtgtggagaccaaaggaaaacaggagagtgccatctagaggccttaacaacagtttggtcctagccttctccctacacaggagtctttaacaacttcctaaattaagaacacttttgtcctcttaagtaactgcaaacgataaacatatgtgtcaatgacatttataatctatacaggtgctgctacagttgtggctctagccttactactctggaaatgtaattttaataaagcgtactgttgtagatggcatttactttattctataggaatgtagaagtctttgagatgtacactgcatttgaatatagttttaattgtaaagcaacaacaaattgatgcctgatgtaagaaatcattttgatataggaactttgttgtattatcttttgaagttagagtaaattaaaataagagtaatttatcttagttacttgtagtattcttttcacaacagtaatatagaatggtgtttgccaaatggtatagaaattgaagagttgaattcaccctagaaaagtagatcaatttatatccatgtggagatgtataatagggtagtcaagagcacagcttagaagtcccaactttaccatttctttgccatgttgaatatgttaactttcaaaatcttgtttcttcttcatttataagtggagctaattatagtctctaagttaaggttgttgtgaaggttaaatgtaataaagttggtaagcacagtgcttggtatatcaaaagtagttttttgtaataatgtcttactgttgttgttattttcactggccagttttgttttcaggacggttgtgattaaatagaagcagaaaatttaaaaacctatagaaaattttattttaaaaaaattttcacaattacaatctcatttgattaaatactcaacaaatatttatttacatattcagtagatatttatgcagctcctaagtgtctagatataataaccattttaggtactggagagttgatactgggtacaacagaaagaaagacatgggccttgcattgcagtggaggagtcagacaataagtaaatacataaacaagatggtttcccaaagaaatcatttgcgtgaagacaatgaatgtgatgtaatagagagtgactggaggcccatcttagagtagatggttaaagaagagctttctgaggaagtgacgtttaaactcttacctgaatgacaaggagccaatcatatgaagatctgaggaatggccatttccactaaaggaaaaaacaaacaaaaaaacacatgtaaaggccattggatgagagtgtgttaaacatgtgcaaaaactagaaatgtgcatagtggcaggaaaccaggtcagagagggaagtagggggccaagcgcggtggctcacgcctgtaatcccagcactttgggaggctgaggcaggcggatcacttgaggtcagttgttcgagaccagcctggccaacatggtgaaacctcgcctctattaaagatgcaaaaattagctgggcgtggtggcacaggcctgtaatcccagctgctggagaagctgaggcaggagaatcacgtgaacccaggaggcggaggttgcagtgagccgagatcgcacactgcactccacagcctgggtgacagagcgagactctatgtaaaaaaaaaaaaaaaagggagagagagaagtaggagccttggaggcccaggactttagatttcattctgagggttatgggaagagattggagagttacaggcaaagtggtgatatgcccaaatttatgctttggaaaaattccttttgcctctctatagaaaacagattgtaatggagaaagaatggaagcagaaagaccgggtaggagacttttgcagcgtgtaagtcagaaatggtggcttggataaagatgttgaattaatggttcagtgctgaattagtgttgggggatttggatcccccaacaactctgcaccacaggggcagggtagcattgtggttaagagaaccaggtgaagagtcaggctatctggtttgacttaatagccatgtgaccttgacaagtttctttacctccctgtgcctggtttttgctattcctaaaatgggaacaatgatagtacattcctcctaggattgctgtgtagattaaatgaggaaataataattgtaaaatgctcagaagatgcatcaatagtgctgttttggtatcatcatcactgccttcatcacaactattactctcatcaccctcagtagccacattttatagatgagaaaacttagagggtggttttgaaatcagaatatacgtttcttgattttgaatccattgttctttctgcaatgtaatctgtaatacgagctcccagagaaaaatttctatagatctgaatatctgtagctcacagcccagttttaaatacctatgactatttaaataacattgagaagaaaatgataaataaggctagctgaatcccagggcataggagagaagtagcctgtggctctctccccacacaccttgtgccatcagaaattcaagttccctgagttttgaagaagggtattgcacacctaagccaaaagcattagtatgcgcgtggtggtacatttaggaggatagaactgaatattttgagaaccttgtaagatactgaatctctttagaggccattctactcttcattacttgtgttaaatagggccatatacataatataaataaatgaaatccatggattatccccagaccttttctggtcagccttttggtgaaggcaacaaccagactaccacacttgagtttctttttctccacctctctctgcctttgcttagccccttctggtggcataagcaacagaataggtaaggatcaaagagcaagagagacaaaattagaagcagggagttggatagcctccctgctggctttgcccctggttcctctactcccctggtgcctcccctcaccagagactgaaggcaggctgtttgtccattgcagaatgtgagcatttgatccgccatatgttggtgttagatcccaataagcgcctctccatggagcagatctgcaagcacaagtggatgaagctaggggacgccgatcccaactttgacagggtgagctgggaaccgctgctgcaggggactcctctgaaagctgctgcagcctcctttgcatgtgattgtaatcaggccataacctgaaaggcggacactgggaacaaactattatgtaacactaaagcagcacgtgaagcaagcaagaaggaatgtaaaaccagttaaactgctggagaatagtgatcatggttccctaccatgtgtccccaaattatcgtctgtttttggcttttgagatagcacagcctgcagttctgcagcttacctaccatggggatgtcgccttcctcttgtcttagtgtgctcaattcagtggcttctgtagcatgcttttatttaaaccactatggccatgccaggtatgccagggagctcaggaaacagtgagttgttgtctgtttacagctgatcactcagggctctcttccttagactttgtctgaggccaaaaatatcccaagccagagggcatggaacaggttggtcattatatatgctgtgccacatttgatgtggttaattggggggttgacagcttcctcctttttatgttacagttaatagctgaatgccaacaactaaaggaagaaagacaggtggaccccctgaatgaggatgtcctcttggccatggaggacatgggactggacaaagaacagacactgcaggtatctccgaaggagtggagaacaaagtgggatgtagcagttcctctaacctgctttttccatttttcgccttctcgggaacttgggccttttttttcctcctgtttttcttcctctgccccttcctgggccttggaaagaaggaaagaaggtgctttggctaatgttattactgaaagggttctggtcatcaacatgccatttcaccagggttttgtactcttttcccttctctcttggtagtcattaagatcagatgcctatgatcactatagtgcaatctacagcctgctgtgtgatcgacataagagacataaaaccctgcgtctcggagcacttcctagcatgccccgagccctggcctttcaagcaccagtcaatatccaggtgggcaataactccagtgacctagttcaggacaagtaacaccaggggggtaaaggttagctgttgctcactaaccctaagtcgagagtttcttgctcttccttacctctgtctcctcccatttgtcatctcttcctttgtcagaggccaatcaaagatctgaaccttttttgatggagaggagggatgagcaacaatagttgtgccttttgtttttttgaagaaatagcaaatcatgaggcgatgctatcctcttcacaggatgcttccttgttgtgacttctaagggccgatgaaccaaaaactttagtaatcagggaaacatagactttagcaatcaagactacttggaaagactcattatttctctctagtgttaaaggtatgcgtgtatatgtatgtactgctttccaggcggagcaggcaggtactgctatgaacatcagcgttccccaggtgcagctgatcaacccagagaaccaaattgtggaggcaagtagcaacctgtgggagctgtcagctgaaaccactttctttgccatatccttgcttcccttccttctgatttctaactcgatggtgtttccctccacctcagccggatgggacactgaatttggacagtgatgagggtgaagagccttcccctgaagcattggtgcgctatttgtcaatgaggaggcacacagtgggtgtggctgacccacggtgagtatccggccaacagccctcactaacactggggcaaagaattgtcacctgactttcagtgtctaccatggcacatttcctactacattgtatccccagaggagatctaatccagtggccaagtggacaaatgatatgatgtaacttatgtatgtagacaattaaaatttaaatgaataaggatccaaaatccaataacaacagtttcccaaagtgttttcccaaaatagtctttcatgatgttccctgctgcctgcacactggaaaaaatggactgaaggccagctcgccccatttttgttccacggttgaagactctcaacattaaaatagccttacctcttttctggattttttctttgctgagtaggaagagaaggttgtgggaagaattctcctgagaggtcaaatcagggcaaagctggttttcttataaatatctcttttcttccagtgaatttccaaaaaagactcccatgcctgctgatgtgcttgctttatgtctcttgttctcagcctatgatcaaataggcaataggggaacattctggctccacagactgagatagctttaaaggggtggagccctgagtcgctctgttagtggaaagatgtcttactttaaagtatgctgtaaaacctatcattgtagcaagatagccctgtacatctagtacttatctgtcctatcagcactgacaagagtaattgcattctttccctggtgaatcagttgctacttcaggcagccattatcttagtggatggcccatgttctccagaaacttggtgttcacctccaggatttgaaaacctgaactggactggtgccactatttcctcttggctcagagctgttggttttacatgaatggccaataaagaatagcaatccttcgtcccaaatagtaaaggagcagagagttaaattccacactttaggcttttgctttgctttaggatcttaaagagaaacataaattcaggaagaaaataaaataagttgtactgaacatagcaatgccatcagttttgggatataagcacttttgagtaagaatgttaactaaacttctctgtcattctgttttgtatcagcacggaagttatggaagatctgcagaagctcctacctggctttcctggagtcaacccccaggctccattcctgcaggtggcccctaatgtgaacttcatgcacaacctgttgcctatgcaaaacttgcaaccaaccgggcaacttgagtacaaggtacctagacatggaagagggctggctccagaagaaacaaacttgagcttcctttgagaggctatgaggcaccttccctaggacttaagggtttacttatagagaaagatgatttatcttgcaaagtagctcgggtgagcgggaagcgtcctctagtctctgtcatgacccatggctcccttaatttccatagatgagtggcttgcccctttctccccgccttcccctcatctcatggtccgtcctccccactctgttcctggcaggagcagtctctcctacagccgcccacgctacagctgttgaatggaatgggcccccttggccggagggcatcagatggaggagccaacatccaactgcatgcccagcagctgctgaagcgcccacggggaccctctccgcttgtcaccatgacaccagtgagtagcagcacagagcccaattcactgtctcagaggcttttgataaaaaggttgtgagcctggggttgggaacccagggccaacctacatgtctgaatttcctttttctccaaacttaggatgctccagcccattttcttcaggccagtagagttttccacactttatttttggcgaacttacttacttagccaagttatttctacattgaactccactcctggagagctttttcctcaatgggcgctcacaggtaccctggttaagtccagctgcactcctgccagcttggggcaggtagcagcctaactcagagccttctcccaggcaacctttccctgccagaaggccaaagtgcccttaaattaattggtttctagactggcttccaaaattgccttttcactaatgctttctccattgataaacacacctcacatgtttggcataacctggatcacttgatgatttgctcccacagctttagccgagtcagttatcttagtcacatgtccttcatatgatagtcacattcagagattttttttctcccttgggttctgtttattttcctgtcataggtcattcattcattcatttattcattcaatctcatagtaccataagattgggtagtaaatatatccatcacccttggagatgttgtaagggcagtgctgctttgaggacccttttccctcctttaatccatcatgggttaatcccttgtaaaatatagtaaaagtgaaacattagaacagtgaaaatttaaacacatataaaatacaaggcattttttattgagttcaacagacaaaattactctgttaaattgctaaaagtgtctctttatttatttttttaaattgctaaaagtttctgaaagccttttgttgatttctgtacttaccttatcatgaattggtaacaaaacagtttgtgggcatgggtccatgggccacactttcagtaatgaaagaattatatatcatagcccttgccatcactgacaagatcaacatatgtgaagtatttgactaatagtacaagatcatatgtgattaagtaccacagtaataacatggaaaattaggtggcagaggcattcagagatgggcaagacaggtttggaaggatcatggtcagctttatgggacgtggggtgacttactgtgtctactgtaactgtttttgccaaggtcgctaacaagttcttgttgataaattcagtggacatttttaaccttttatctttttggacgtcccaactgtattaatcactgttgacttcttttttccttgaaatattttctgttcttggtgtctgtggcaccacattccctgtgttttcccccacctctccttttcacatttcctttctgcttgttccttgaggttggcaaaacccagagttttatcctaggccctattcccatgtcctttgatgtactctctctggatgagtttgtccactcctgtaatttcagttactctctgattctccagcccagaatgctcctctgagttctacacatacgtgtacatgactgcctatgggatagatttagttggttattccacaagtattcacaactttaattcagcatgtcccaaatgaacttaccatgactctgtaaaacctgctcctcctcttgggtgacagtgaatggcactgtcattctccgggttacacaagctagggatgtgaattttatctttaactcttgtctttcttatttgccatatcaagtcagttgtccagtgcctgtgaatgaaacatcctctccactttcctttccttaactcaggtcactgtcatccattgtgtagatgaacaccacggcatcctaactgacttctttgcttccagtcatgtcccctgatccctgccaccagcccttttcacactgcagctagagtaagctggcttttgcaaatataaatctttataacatcatgcccctgcttaaaatcctttagtgattcaccactgttcttcctcaaacttcttagtgtgttattcaagaccatttgtcactggccacagcgttcctctcctgcctcatctacagccacttcctgcctcaccctgttcactccacccttgtagaactgtgggaagggatccaggaaccctgggagctttccgacaaaattattccaggagtgttttgttttgttttgttttgtaattagccattttgtaaaatactcttttataataattgaagtgtgatttttgttctagtgactggggcatggtgatgatgtgggcacccaggctatgggtagctagcaaggatgcagatgggaaagtcacagtgatacaagcattgtggtggttctcatttcactcacatgttttggcgagtaacaactattttaaagcagtgaattgatactacacaattgtatcttatgtaccaaaatgtaatttcagtaattcactatgctttcctggagttaagacatttaaactccggaaatcacattaatatgaaacaacaggtcaagtcctagacatttcaggtaaacaatcttctactgtattttcgggtcctcaaacacctacaggccttctcttttcttctgcctggaaacctgtaactcctgtccctctttgcctgaccagctcctgtgcatccttcaggttcctgctaggtgctacctcctccaggatgccttccttaattcccaaacacccccattagaagacttgatcatgctattttgtaattgtttacttgtctctatcctctactagactgtaaaatgagggcaaggtctatgtctgtaaattcacattttatcctgtaacagtaagcatttggctatttgttagattaataaatgaatgaatgaagataaataagaggaagaaattctaattagtattacctaagcaaggtaaaaatggaaaaataggtatatgaaaatcctgtataacccaggagtctagaaaagttctgtaaataagaaagttaacagaaagtcctgccccaagcccagttactagagtaagaggcatgacagaataagctgccaccttgagcttttccttcctgtctctcttcaggcagtgccagcagttacccctgtggacgaggagagctcagacggggagccagaccaggaagctgtgcagaggtaatgtgacatctggcagtgcttgcagaagcccctgggcaggctcccctgcaaccagcgaaaggtcacctctgcccaaggaggtggtagagtgcagcttcaacatttgtgtggtctctttgctcaagccagatggcatgttccaccccacatggaagtaacagaagactacccagaaaatgtcatttctgtaagcaccattggaagtcccctaagtgacagcaataaccataagaactttttctttcctccctccttcttccttgtcccctgccttcatattgcaactctgatagtattcacaaggcacaaagcctgctcgtacctgccaagaactgtttactgaaaaggaattggagatgtgggatgacagtgatcctagctagtctggccatggacctctggcatggacttttcctttccaggagaatgaatacctcttgtactgtttgctgtgtgcttcttccacccccttgtaccaacaaagagatattgaaaaagagaatatgggattcgggccagggacagatgcaaatatccattgtttacagaaccttgttgagagatgcctaactcacagagaacggcagtgaccatcaggcatgctgtactgttcatttggcctcagttccgttagccctggtccttagctccatgcatgcccccttgtgggagttgattttcttattatccggggagggggtttcaccagaatccagcatgtattttcccagaaatacaggtgttcttcaagattatatgttttttcctttgagggaagttgaaataaaatggttttcatgggcttttggggaactttgggtgtctttatccaatggttattaaaacattaatggcttactctttggcaagttcacataacactgattactctacagtctgttaactgattttagctgaaaggggcaagatagttaagaatgaaatgagaccattttttaagaacctgccagttgctggctaggactctcatcctatccccagtagctctgtgtgagagctgctattcagaaagcagctggtcctatgtggaaagaaaaccatggcaaacaggggtgttggcaggtgggccagctccttctacagcttggccaatagaaggaaaattctggtaacttttttttttccttgatgctgttgtttctatagtttgctgataagagggtatataaggttacaaatgggccctactgggtcatgaagaaatgagaaatcaggaaatttactgcctttctaccttaaaagagacagcaatattttatcttctttgtcttagactttccttcctccaggtctaccttctttcttctttagaccaacatttcaagggtataatgcccatcagttttgatgtaataaaaaaggtgtagtgcctcttttattcatgcctccagaagagcagcagcggtggaggaagtcatccaccagacaaagagggacaatatcttattgatggtattaactaagtgctgggtctgaaagatcttccgaataaaagccatcagtttgggaactctt

SEQ ID NO: 15804 - DNA, 252679 bp, Homo sapiens
cgtcccccagccccggcctcccgcggacccatgcccgcccgtatcggctactacgagatcgaccgcaccatcggcaagggcaacttcgcggtggtcaagcgggccacgcacctcgtcaccaaggccaaggtaccggcgcaggggccaggcggcagtcggagcgtggcggggccgggagaggtccgcgccccccagccggggggtcggggcggcgagcgcggcgcgtggtgggagcgttgggggccgggaggcgggagggagccagccgcggcggggcgggcgcggagctagggacacctgggactcgagacggcggaactccaagcagggggccgagggcacagagcaccggcgcccaggagccgggcgcggggaggggtcctcggggctgagggcaggcgggtaaaggggatgattggaaagaaggggtcggaactccccgagggccgggagactgtaagcccagaagactctggaaccagcagctagggaatcataagggaatgagggcaggggcatatgaaatgtggacccggaggatggggaaaaacaagggtgaagtggcagacccgggcttgtaaggggacccaggacggctggggcacggactgggaatgtgcacgtctgcagggcgctgggaggtcccaggatcctggtgccttaagacagagacaggaatccgcatttgatcatctaagactgatagatggtgcgaaggggatcccgaggagacacgattagtggaggaggcaatgaggaaaatggggaaataagggggaaattgctttgcttgtccacaggaaggggcccagggaatgggggagtgaggtgggggtgggggctgtcccaggtttatgatggcactaggtagtcaggggttaaacaatttgggagagctgattgctggttatttttagttgttggagggtcgggaattgtgggctttgtagaacccagggtgggcttttactggttggggggaagcttgtgattgaagaacccagacaccgggagattacactcatcgagcccttagttctcaaagggatttgaggcgctataggagtgaaattggccaaggtcaattaggaagctatatatgtatgcatgtaaaattctttgaggaaatatggtagcactttcatgtagccttcgttgggaggactggaatctaagacatcaggaggaatcttttggttttggtggaacccgcaaagcccatttttactctaaaattttctttgctcaatatcttacttgaatgaatacttttaatgtagtcattcattatgtttagaactgcagcttgtgttttccctcagcctgaggaatgaagaacccttacagctgctgccgcctcctaccaaagccacatcaattcccctcacctcctcagcctagcctctggttgtcatgacctaccttgtttttgcttttttggcagtggcttgttttctgaagccagtgacttatctaggccttctctcctgatcacttgcaacctgaagttccttccccaccatctttctgcctgaggctacaaggggcccttcttaccagggtgtcagggtgggtggctgtggcgaattgattggtcagtttcacttcctctggagggccctcttcagcctttttgtccgtttttatcacagggcctccagtctgcaggtcagagctgaatgagataccaaagtccagggctccctcagaccctgaggggaagtcaggggaagtcgattgagccaagactttggtgtgctcctcacttgccaccccagcccctcaccgtgtttccagtctagttgactattagccaaggcaaacttacatttacaaacaatatgccttgttccttgttttgctatttctttcctttttttctgcctattttctgtgtaatcactttgtgctcctgtggttattttgctctgacctctgggggatagtctccatgaacttaattggttgcctggtttatggtttcatgatttaaagaattttgaatcttccagcccttggatacaccaaaatattgataaaatctgttacagacagggttgaatgttttcgtaaatgtaattgcaaacagttgattcttggctttaatataaaagagacatttctatcttcagtagtcagcaaagccagtgcctaattatggctggtctgcccgctttctaattttcatgtgtgtgtatatgtgcgtgcgtgtgtttttcatagtttttctctgagaccttggtatcctttaggactgcagcattttaaacactggcttgtttacaaacgggtgtcactgtttatgttggtttttatctttgatcatttgtggtatgcagttgtgcaattcctatgtatggaaatattcaaagtcttgaatgagactgaaatggcttggacaatgagttgcatgtgtgaaggagccacaccagcattcatttgtgtttctgtagcagtgtgcaatttcctagttacagttacaagtgctatatcttttgctgcttaaattactctgactacatgagtgaagcttaattcacaaggagttgtcacgtgctctgggtgaactaggagcatattttggcctgctccatgcttctctgaatccactttggaaggggttctcaaatgcggacagcttagatgtgcctaacagctgtcgacatacagtacgatggcctattaaggttatggtttggttatataacaatggtgaaggtgcataggtactagaagttgccgaagctgctgcttcagttaactcaggttgattttttttctccccatgcactgcagcctttatcttacttctgcagaggggtcatttggaaacagagagttatttttttcccccatctgtctccagaatgtgtcatttgttgttttgtcttttagaggtgtgtgatttttttttccccttgtaggaaatggtctgggttttcttataaccatatataacagtcagacagaggtaattcagatgatacttgtgttggctgaaggaggttaggtaataggtattttctgaacattagaaataattatgatccccctcctttttttttttttttttttttttaaacacacatgacccattccaagaactaagagactaaagtaaacctcatttattgagtaggatactgcactccatccaatactgcgtggttaagctggccctttcccaaattctgttaactctcaaaccgtctagagtgggatcctgggatgaataaaatcagtagagaaaagtgaagcttttcctatttggttgttggttacttttgcagcacggcattcatgagctcagacttcatattggcagcactgcagtgcttagagcggcactgcagaacagttaccaggagagaatgttcagctgtgacatactttggttagtagctcaccctggctgtctttgtcctacctgctttgatttccttttctttggaagagccttacttagcctgaggttctctggctctgtttttttttttggtaggaaactataaagtattacagatatttttaaaaaagaatgttttctgctctcaaattgcaggtagtctgttgcctgtgcctaattataccttcactagttggatgattgggaacaaagagtagatagattttgtatgcattttttttccttttttaaaatattggggcagggtcttactctgtcacccaggctagagtgcagtgacactgccagagttcactgtaacctccaactcccaggctcaagagatcctcctgcctcagcttcctaagtagctgggactacaggcttataccaccacaccaggttaatttttaaattttttttgtagagatgggggtctcattatgttgcccaggctggtcttgaacttctggactcaagtgatcctcctgcttcagcctcccaaagtgctgggattacaggcatgagtctgtaacccaaatgcttggcccatatgcattttttaaagtatgcatgactataaaagcctttggccaaatacgtttaaactatatttcaacaaatatatatcacttgcctgttattggtttgtggtaagagttccagctttggataaagcaacctgagtttgaatcttttgctgcttaatagttggatatttttaggctgtgagaagttatttaacttctgtgtgcttgggtttcctcatctgtaaagtgggatgacagtagtacttacctcacaagtttaggtgttatgaagattaaagaagatagtgtatgtaaagctcttagagcagcatggtgccctaatagcatgacgtaaatattaccatcatcatcatcgttatcagatgttttagtaacataataatattatggacataataatagtcctcctttttttgcttctcaccccttgggcacgattcatgaatgtatatgccattagttttgtgtaggtagatgccatcctgacgatagactttcctggtaaaaaaaaagtttgctactattgcaggtgccactttgagatagttggatttaatttgtatagggtacaggctggctaatctcatgaaatcagcattttaaaacataaattttcattagttaaacttttttttttttttttaaatagcaatgtgacttatctaatgaaaactgtgaccaacactggcttttgctttgggctgccttgaattttcagtgtgttttgtgtaactaatttttgttatgttgatgatggaacagagttgagtgcagtcttttctccagaggtccacttaaattaggtttaagtgaaatatttaagaaatgtttctgcaagcttaaggacacatttgcccttgcgtgcacaagcaaaggccttagacggccaaggtcagaattcttaactttaaatattacacagagaagacattttgccctatgacccctttccaaatattgactagccagacacatcggtgtggtttagtgcaaactcatttccatgaggagaacaagtcaaagtgggctaaaagcattattttcacctctaaagaagagtttaacgaagcacatgagatgatgctttcacccattagaaaactgaaaacaagattcatttggtaagtaggagagaattatgtcaaaaagaaattgaaagcagaatttacattagatacatttgaggaagatagccccatccctagacaatctagaagtgactattgaaagatgattatgttcagtttgatacagtggtgatggggttgctaaacgtttttgaaattttgtaaagagctaagactgattgagactagtctctccagagtcaaaataccagtattccattttctacatcaaagatgtttattttaacattttgactttggtgccagctccctagaaagtcatagatctcgctcaagccagaggtgcccagactagttatttctgtgccagaagtgctgttttcatttttcaggcttcagtctggctaatgttttctagttcatcgcgtaaaagagaacaaaatggatgctttgaaaagaaaaagaaatgctttctactcaccagagccactgtaactgtaaaacaacacctaagacatctgcatagagatggaacctttcccttaatcatttattcattcaacacatttattgaatgaaaattttttgtcaggttccattctagggtctggagtgcaccaatgaacaagggagacaaaaagcatctgcctttctggagctttctagtagaaggagacagacaagggacatgtaaaaaaattaaaaatttcatataggaatgaataccaggaagaaaataaacggactagagaatccctggggggggctgctgcctcagatagagtggtcagggaagacctttctttccaagatgatgatatttgagctgagacctgagtgatgagaaaaagccaacctgggaagatttggaagacagaagattccttacagaaggaatggcatgtgcaaaggccatggggcagaagtgagtttggtttggtcaaagattagacacaaggtcatgatgccatggtaccttagcaaacaagtggaaggatgggaaaagatgaggccagacatgtaggaggggccagatcatctgggtcttatggccattttatggaattgggtgtgacacgggggtgacatcagagagtatcaagcagaacactaatatcacctaatttatgtttttaaaacgtggctggatgtggtggctcatgcctgtaattccagtgctttgggggggcatgaggcaggaggatcacttgaggccaggagttcaagaccagcctgggcaacatagtgagatcccatctctacaaacaatttaaaaattagctgggtgtggtggtgcgcacctgtagcctcagctacttgggaggtggaggcgggaggatcacttgatcctgggagtctgaggctgtggtgaactatggacacaccattgtatcccagcctgggtgacagagtgaaaccctgtctcaggaaaacaaaccaaaagaaaaacagcaactcatgctggttattttatggttaagagcaagaatccttttctgatgcatttcttggcacaagggaggagttcagttttaacaacttatattctttctcactgtagaggaatattgacataaattgcacataaattaagcatgatcaactaacaagtatttgttgatttattgggcatgaaaaagaccttagagaggttctattctagttctgtcttctccacagtctggaaagacagacttaacagaatttataatctcaggttttgcctggcatggtggctcacgcctgtaattccagcactttgggaggctgaggcaggtggatcacctgaggtcaggagttcgagaccagcctggctaacatggcgaaaccctgtttttactaaaaatacaaaaaattagccaggcgtggtggtacatgcctgtaatcccagctacttgggaggctgaggcaggagaattgcttgaacccaggaggcagaggttgcagtgagccgagatcgtgccgtcgcactccagcctgggcaacaagagtgaaactccgtctcaaaaaaaaaaaaaaaaaaaaagaaaaaaaaaacctcaggattttacggacttttaaagtcatttagaccaattatccattagattcatggctcatctctctcctcactcccattttcccggagtcttataggtagttagtgggggagctggagttagaatccagttatcactactcctacttaattctaccctgacttctctaatcacagaaaacagtgcccttgccttctgagcacttgcttttttactggggaagcgagatacacctataccaattaaagtctaagatatttatcctttctataagacaaaccaaaagcgagatgtcatgatgagaggaaacatttccgagtagagaggaagagtaaatattccaaccctgtatttcacctgtcctttggcattataccactctgtcacctttgccactaacttttagtaccctatgggtccactgctttgcctttaaatctgctagtcagatgccccttggcatgactgagatatgaagaaaatgaaaagggaaagaagtaaacacagcatgcaatgaccgtaaaagtagtctgccttacgtagttttctcatgtcattatatctagctaactcctagggaatattggtaattatacatttgttctgctgggctggtctgatctacctttgagggtatgtttcttagatgggctcctcacttactaaatgactaacactttccagggatggtgacatcttataactcattaagagaactggtcatctagatatataccttgatgacacaggtgagggtcaagagaaccatttatatcaagggttcctcttttttttttttttcattatcctaagtaaacacaagaaggaattcttcttaatatagttctagtttctggtctgtgggctatggctgttctccagatgaatgatctcacctatcaggtaggtgagtccctggttcctcctaatagcgagtagcttggtccctttctgggataataatgtagtcatacagtcccgtggatgactgataacatcaagagggtgaaaattatatacattcaaatgggcttttatcctaatctaataaaatattgctaaataaatggcgtaggcaatgtccttgagaagtctcaacagtcttgaatgaattagcttgaaagacttcttttggatctgttcagaatagaattgcggaagcgagtacggaactgttggatgagccatcagtaagttatgttaggaacatatttgtgtttagcaggtgtgtgatccgtggtagacaaggagcctctggacactgatggtattttatctcagacttaggcttttcaaagaggtaggaatcagattgtgaatacttagccacatttcccagaagttgaaacggaaagagaagcagactcattgcctgttgaagcttgtctgtgtgggctgagctcactcagttggatactttcggccagttattttaaactaaatttaggttttgatgaagttctgaaaaattatcaaatttctgtctagtttcagctccagcgcatgtttaccagcagtatactttacttttcatagctccccccagaattgaatgtgaaaatgtaggttagttgcccacatttcttgagacggaattttttggagaagaaattttttattccatccatccatccaataaacgtgcaaaattatcagaaatagaaatggatgatatatggcccaaaattcaaaaggtacaaaggagcattcagtgaaatgaagtcttcttgccaccccaatacctgagtcacacagtttcttagtcttttttttttttttttgagacggagtctcactctgttgcccaggctggagtgcagtggcgcgatcttggctcactgcaagctccacctctcgggttcacgccgttctcctgtctcagcctccagagtagttgggactacaggcgcctgccgccacgcccagctaattttttgtatttttagtagagacggcgtttcaccatgtgttagccaggctggtctcgatttcctgacctcgtgatctgcccgcctcagcctcccaaagtgctgggattacaggcgtgagccaccgcgcccggccagcttcttactcttataaacatttattaagggcatctctggattagtccaagtgctagatgccgtttattttctgacagtgctttgacatacttgaaatttccaagcataattttacttaaaagtaaaaaaagaaaatacctggccagatgcagtggttcacgcctgtaatcccagcactttgggaggctgaggcaggaggatcacttgagccccagagttggagaccagcctgggcaacatagtgagaccttatctctgcaaataataataataaaaataaccaggggtgtggtggtgcatgcctgtggtcccagctactcaggaggctgaggtgggaggatcgcttgagcccaggaggtcaaggtttctgtgagctatgatcgcaccactgaactccagcctgggcaacagagccagagcacttctcaaataaaaaaggaccaaagaaaaatacctaacctaacttatactgctcattaggatggcacagtgtgataatctaatgtaagccctgtgggggccggaattttaatctgttattcactgctgtattccttatgtttcgtgcaatgtctgcagatattcattgagtacatgaatataaggattaaaaataagagctgagtttgtttttatacccttaatacatcttttgacttttactattggaatttcctatctatagttaagatgttaaagaaaagtaattttctacctttttctcacaaatctccgagtaaggagatttcacagcttttctgggctagtaattgatttttggcatatctcaaacttttactattaggaagatcagtgtatctaaagtaagtcttgcaatttgaattcaaatcccttagttttttgttttttgtttttatatttttgagatagggtttcgctttgtcacctaaggctggagtgcagtgatgtgatcatggctctctgcagcctccacctcctaggttcaagtcatccttctacttcagcctcctgagtacctgggactacaggtgcatgccaccatgcccagctaattttaaaaaattttatttttagtagagatgggggtcttgctatgttgctaggctggtcttgaactcctgggctcaaatgatcctccctctttggcttcccgaagtgttgggattacgggtgtgagccatcacgcctggccaacatcagttttactttaccataacattgctgttattttttgaatcttttttataattttatttctagtttttcactttacaaattttctgtgataaccattgttgtgcacaagtctttgatgtacttctgattttttgctccggatatattgttgaaagggaaattaccgtgccaaagggaacacatgcttgtacggcacctaatatgtatattgccacattgctttccagaaaggctgcactagaattaacctcctgagcagtgtatgagcaggcttggctcactgcaagccacactggctctctttatcttatctgtctccccatctgcctttgttggcttgggggtgtagggcttttaagtctctactacacctctaaacctagtcccatagatatagtacaagtcaggagaaggttatagcagctgtgtaatccatctttccctgtaccaaacctggaagaggaatgacaagaattcaagtgtaaatctaacctttttttgaggcagagtcttgctctgtcacccaggctggagtgcaatggtgcgatctcggctcactgcaacctccgcctcctgggttcaagcgattctcttgcctcagcttccctagtagctgggattacaggtgcccatagccacgcctggctaatttttgtatttttagtagagatgggtttcaccatgttggccaggctggtcttgaactcctgacctcaagtaatccaccccccgcccccagcctctcagagtggtggtattacaggcatgagccaccgcacccggccaagtctcaccttttacttgctttttataaatcatcattctctcctgatctttgataaagggacaaaaacccaaactggagaaattgctgaagggaagaagaaaggttaatgagaaacagactcttgatcacccaaaccattgattttttttttttttttttttgagatggagtctcgctctgttgtccaggctggagtacaatggcgtgatcttggctcactgcaacctctgcctctccggttcaagtgattcccctgcctcagcctcctcagtagctaggattacaggcacgtgccaccacacctggctaatttttgtatttttagtagagacggggtttcaccgtgttagtcaggctgctctccaactcctgactttgtgatccacctgcctcgacctcccaaagtgctgggattacaggagtgagccattgcaccttgcctctccactgactttttttttttttgagacggagtctcactctgtcacccaggctggagtgcagtggcgcagtctctgctcactgcaacctctgcctcctgggttcaagagattctcctgcctcagcctcccaggtagctgggactacgggcgcccaccaccacacccggctaatttttttgtatttttagtagagacggggtttcaccatgctggccagggtggtcttgaactcctacctcgtgatccactcgcctcggcctcccagagtgctgggattataggcgtgagccactgcacccagcctaccattgatttttaaataactattttttggtaaaccagcgtgagaatttcagagattaataaaagttgtaaattgctcctccctcgttttaatggtgaaaagatagtcaaggagattgtgaaggagaaagttatatgaataaatatggtaatgcagcagtcctatcatgtttaaatttgctgtgtgcattgtactttatgggttaagagattttcaagggtaattgggccatataggatattgtgcttagtatgttgtggggttatgactgtggaattatctgtgttttggacatttggtggtaactgcttttcttttatctccaatagaagccctcctatacagtaagttttggttatgatgtgcttagttaattgaggggaaaaactgataaagcaggaaaatcagaaatatatattcatgcattaatctttttttggtttttcttttttatgtagacggagtcttgctctgtcgcccaggctggaagtgcagtggcatgatctcggctcactgcaacctctgcctcctgagtagctgggactataggcacatgccaccatgcccggccaatttttgtattttttgtagagatggggtttcgccatgttggccaggatggtctcgaattcctgagctcaggcagttcgcctgcttcggtctcctaaagtgctaggcttacaggcatgagccaccatgcctggctcatgcattactcttttaaaaagtatgtattgtggaaaatttcaaacataaatgaaagtagagggaataatataatgaacccctatgtgcctgtcgcctagtttaaacagttgtcatcttgtgaccaatcttgcatttatacctttcccacttccccgcttttttcctggattttgaagcatatcccagaatcctttcatttcatcggtagatattttggcatgtatctctaaatagatgaagattctttaaacaaacaaacaaaaccaaaccccagggctgggtatggtggttcatgcctgccatcccagcactttgggaggtctaggtaggtggatcgcttgaggctagctagttcaaaaccagcctgagcagcacggtagtagtgaggccccatctctaccaaaaaataaaaataagtgagcggtggatggtggtaagtggctgtagttctagctacttgggaggttgagctgggaggattgcttgagcccaggagttccagattacagtgcagtaaactatggttgcgccactgcattccagcctgtgtgacagagaccctgtctctaaaaaggaaagaaagaaaagagagagaaaagaaagaaagaaagattgattagcacataggttaatatcaaaatatcttaacctatgttaacaaacattaatgttttttgttaatattaaatattaatgtttgttaacataggttaatattttgttaacctgttgatgcagggccaaggctttttctttgtgtgccctagttggagttccttaattttgtttccattaaatacacccataattcattatctataatttccagttttgtttgctttttaaagcagaacatgaatttaatggcatttgtgaagcaatattagtacagcatccctcttgatttttatgactccttcccagtcttttatactcatctcattcacgtctaatttactatgtctttttaagcatttgatgaagttttcatagaaacgtatctccttaatttttcatcagtttacattctatttaattaaattacataactgtaataatgagcaactggtataaataggtttgggaaaaaaacagttaattattggtaagaatataacttaataacgggaggctgggcccggcgcggtggctcatgcctgtaattgcagcactttgggaggcccaggcaggcggatcacctgaggtcaggagttccagaccagcctggccaacctggtgaaaccctgtctctactaaaaatacaaaaattagctgggtgtgttggtgcatgcctgtaatcctagctactcgagaggtctgaggcaggagaattgcttgaacctgggaggcagaggttgcagtgagccaagatcctgccactgtactgcagcctgggccacagagcgagactccatctcaaacaaaccaaccacaaaaaaaccaaaaaacttaataatgggagcagcagaagcttataagagtaagagacagctgttattagttggggccagtttgcatgttgggggcattggttgctttactgagacaaggagaagcattgattattttggcaggttggttgagtgaaggtgggctaagagagcttctgcgttaatttaaaatgataaagaagtcaaagctgttagaaatttgaggacaagttattttatagaatcttttattatttatagtgtgtacttcgaggtggtatttttgtccacttatgttagaatttgtgtgaactgagctgaatttggtaatgagtcagtggtattaaaaacttggtgaagaaactggccaaactctttagtttaagaggtttatatctgttcactgctagtgtagtgttctgtggaacaagttgacattttcttgtagtaagttgttttctgtttctggcggaagcaatcttggttcatatgctgcaagaaacagaactgtttttattgtggaagacaggagcagagctgtgtgtttcttattaggatgagttggacacctgcaggatttcttctctctttctgcttcttgcctcctgttgtcttttccttctgttagaatgttctaatattgcataagcagcattccgacaatagttgaatttttttggtacttcatttttttaaactctcaaaataatgtttttagtgattgtatgttcttggcttactttccatttctacatcaacagggatattgttattctagtcaaatggggtagttgtattctggcaatgatctttgggtccaagtcagctgcagaaacaacactttcatatattatacctaaatatcttacatgtgtatggtaattctgggaggtaattaaatgttgggatggtactttaggatctctttaaaggatttcacagttctcaggaataaaataacttgtttgaagcatgttactcattggcctttgaccatgcaaaagggtagccagtgattttagcctactgcctcttccgatctcattttcctcctttcttttgaggcagcagctgcatccagtgccctgctctaattgagctcttagtaaaaggggtattgttataccaagtcacaacctcgtatagcagtgaggttacatcaatggttgttagatttttaggccacgcatccattttggagtcacattaaattttgaaaaccaaaatttagttgcattacctaaatttctcttccttttcttatcctgataccaggataagaataggttttctgtttttccagctctttgtggaacctttttggcccatcagagttgcttgcgacaatctgtagttaaagaactgagactggtgcgggaatcgggatgtttctggttccagtttttactagccagcagtttgactttgggcaaattacttaacctcagggggcttccagtttctctttaatttataattttttcaactgctttattgaggtacatttcacagaccatacagttcacccaattttttttaagtgtattcatggagctgtgcgaccatcactataatacattttagaacattttcattatccttaaaagaagcatggtacccattagcagtcactgcttatttcttcaacctctcttctcagccctaagcaaccacaaattaatttttatcgatttacgtcatctggacacttcatataaatagaattatgcagtgggtgtcctgttgtattttacttctttcacttggtgtaatgccttcaaggttcatgcatgttcttacatatgttggaatctcattatttttttatggctgaataatattatgttgtatggatacgccacatttttaaaatcaattcatgaattggtgggcattgtttctacttattggcgattatgaataatatggtcttgaacatttgtgtacaaatttctgtgtgatcatgttttcatttttttcttgggcatatacctaggagtggaatcgcttggtcatgtggtgactccttgtttaaggttttgagcaacttccaaactgttttccacagtagctgccccattttatattcttacctgcaatgtatgagggtttctgttctgtctacatccaaaacttattttcttttttttgattttagccatcctagtggatgtgaagaagtattgcattgtggttttgatctacatttccctaatgaacaatggtagtgagcatcatttcatgtgccagttgatcatttgtatatttcctttggagaaatgtctattaacatcctttgcccatttttgaattggattatttgtctttttattgctgagttgtaagagttctttatgtttgggatacaagtcccttatcggatacatgatttacaaatattttctgccattctgtgggttgtcttttcagtttcttggtagtgttgtttgcagcacaagtgtctttaattttgattctctagtttcttaatttatatagttgtttaaactctgaaactatatgttttattgagattattttcctctgtgctcattctgtactttctcccatgttcatatagctctctctttcccgggacgttttctagcctcaaagactttatttttttgattaatttatttattttgagacggagtctcgctctgtcgcccacgctggagtgcagtggcgccatctcggctcactgcaagctccgcctcccaggttcatgccattctcctgcctcagcctcctgagtagctgggactacaggtacctgccatcacgcccggctaatcttttgtaatttttagtagagacggggtttcaccgtgttagccaggatggtcttgatctcctgaccttgtgatccgcctgcctcggccttccaaagtgctgtgattacaggtgtgagccactgcgcccggcctctagcctcaaagactttaaaaacatctgtctatgtatttgcctctctaatacatgtgtcttacaaaataatcaaaccttacaaaatgtataacaaagaaagtgaaagttcctcatctctccagagaaaacattaactatttataaccagattttttccccattcacatggtaaaaattttttttaattaaaaaagggaacataccacaatctagtttgccacttgttttttcatttaatagtatatctccaacattattccatgtcagtacactttgtccttgtctcaatcattttaatggctgcagagtattctattttatggatatactatactttacatagtagcctattgatagattttagggttgtttctagatattgttttatttttttgagacagagtttctctgtcacccatgctggagtgcaatggcatgatcttggctcactgcaacttctgcctcccagattcgagtgattctcccacctcagcctcccaagtagctgggattacaggtgcgcgccaccacacccagctaatttttgtatttttagtagagacggggtttcaccatgttggcttggctggtcacgaactcctggccttgagtgatccccctgcctcagcctcccaaagtgctgggattacaggtgtgagtcagcgtgcccagcccagattttattgttttaattacaaattttacgtaagttgtttctgcacatttatatttgcacacttgtgctagtggtttttttttctattccatttatttgctattgcagtatttactattcaaaacacgtagacttattttaaaaaataaaagaattttatttagtgtgacctagagtcaacgtctcaaaagttatgtattcttttccatcatgatatatacaatgttctgatcttcttttaaagccagagtcttcattttcttggtaattgtatagaataatttactagaagtggaatgcttggatcaaagtatgagtgcttaaaatcatgtaagatgttgccacatcaccctccaagtaaggccatgccaattcactcagcttgagagtgtatgacagtgatttttctgttctttttaaccctggcaaatagcctttttagggaattaatctgacaggtgaaaaaatgtcattttattatttgtagttacttattagtacattcgagcatcatttaatttgtctgttggttgtctttctgctttgtctacttttctgttgggcttttggctttttcttattcatcagttgtcatagctttattattattattaatgttttaaaaaaattgagttggagtctcactctgtcacccaggctggagtacagtggtgcaatcttggctctctgaaacctctgcctcccaaattcaaatggttctcatgtctcagcctcccaaaatgctgggattacaggcatgagctgctgtgcctggcctgtaatagctttttaatattagggaaattagttaccttataaaatatattactgatatttttctttgtcttttgactttgtgtgtgtgtctaatataaaatgaaaatgcttttatttttatagtcagatttttctgtttttttttctctttatggcttgctttttaaaattctaattatataaaaatatttacccatttttttcaactacttttatggttttgtttttaaatgtaaatctttgcttcatgtgaaatgcattttgatataaaccaaatgagataggggatgagttgtagaatttattagagttgtaaatttacatttatttttgtgattattaatggcttattcctacttgactgtaagtctcatgagggcaatgtattgtgttgttttgtttttcccttgctcttattttcagtgtctagcacaatgcttgccttgtaatacaccctccatttattgaataaatgagtctaggtttttctccaggtctctagcttctcctgacacaattaattgcataattgctcttttccttcttgatttaaaaagcaacactatcatttacaaaactccaatagatacttaggtacatttctgaattctaatccattgagtgtgctgtcttttcttgctttgatactgtacagctttaattatgatagctttatacaacttaaagtatatttgggaggccagctttaagcactcttaaatatattataccacagtttgggaagctctataatctcctttattaaactttttgctatacctttggaaacattcatttaacttaacaattaaacacttaatccattctgaaagtcagcctgcaaagcagaaatgatttttggggtgttatttggtgtaaagagtttttttttttttaggatatcatacttaattctggcatgacctctttagtgtcttttaaaaaactctcattttataactttgggcatttctagaaaagcaacatttttctcacagttttctaatgcaaaatacacagaggggtaggtggcagaaaaggtatcgagatgattgtgttggcaccccactgatgtcgaagcagatagtggaaaagacattacttaaaagtgttttgcagatttcgggttaaattaaaaatatgacaattttaatttaatttaattaaaaatatgacaattctcaggccgggtgtggtggctcacgcctataatcccagcactttgggaggccaaggcgggcggattgcctgaggtcaggagtttgagaccagtctggccaacatggtgaaaccccatctctactaaaaatacaaaaaaattagctgggcctgtaatcccagctacttgggaggctgaggcaggagacttgcttaaccagggaggtggaggttgcagtgagccaagatcatgccactgcactacagctgggtgacaaagcaagactccgtctcaaaaaaaaaaaaaaaaaaaaggtgttatgcagatttcagtttagccaccttgatcctcccaccttgtgcatgacacgttaccttcctgtggcatgcagtatttgactgattcattggatgtgacttgcattaagttcagataacattgctgaataatcactttcttattctttagtgtagcctcctttctctgtagaacatcagaaattcttaaactctgaaatacagcattctcttgggattttctgtaatgtctttctcatgtaggaaccaacttcagggtcttgtgagcatcagagaagtttaaggtctagggaactgagctaatggaacaaggcatgcctaatgtgataaaatccttgctttctttgcaattgaaattgtttattctaaataactgctaatttacaaatgtattttcacatgattacccattctgttctcaaagagcataataggggttttgtgactttcagactttcctgaaaaagcctaaccgtggattttagaattattaagctagaaaaatacacacatacacacacaggtttgtttgggacccttagtctccaccctggaattaagtgacactgaaaataactctggaataaaaggtttttatgtagcagaatagttgacttacaggggttcttccctttgcacattttctctgggtagaaaatgagcttgtttttcttttagttgtattacaattttttttttcctcaatgctagtcttaactgagagatttttaggcagttaactctcccagcacagcaataagcagcttattagtagatattatctcttgttgatttgttacccttgagatttactgtgcttgcaaaacacctgtctgtatttgagctttgctaggtagttggcttttgtgtttgactgaagattttttccaaagaaagcaaatagctattaggaaaagaaagagtcagcaaatttctgtatgctttcatggaagagatttcccaattagaaagcttttgtaggcttaaccttttgccctaaagtaacccaacatttcattatgtattccattgaggttttggagctcggcaccagaaagcgaggaccaaggttgaatgtgaaaggaatattcagaggatgaagctcatagtcaacaaagtgctgcttcataggctaggtccaaaaataacctgcttgccatagggagcaagaatggaggtagcattagctgctgttttgagcagtgtttcatgtcctgtcatgtcattccagaatggttttttggttttgtttagagacagggtcttgctctgttgaccaggccagagtgcagtgtggtgtgattgtagctcacagtcacctcaaactcctgggctcaagtgatcctcccatctcagtttcctgaatagctaggactacagacacacaccattgcacttggctagtggttttatttttagtatagacagtgtctcggtttgttgcctaggctggtctcaaactcctggcctgaagcagttatcctaccttggccttccaaagcactggaattataggcatgagcagccacacctggtctcattccagaataattaaaattatgtttaaggcagccgggtgcagtggctcatgcctgtaatctcagtactttgggaggccgaggcgggtggatcatgaggtcaggagttcaagaccagcctggccaatatggtgaaaccccgtctctactaaaaatacaaaataaaaatacaaaaattagccgggtatggtaattagcgggtgcctgtaatcccagctacttgggagtctgaggcagagaattgcttgaacccgggaggtggaggttgcagtgagccaagatcgcgccactgcactgcagcctgggtgacagagtgagactccatctcgaaaaaaaaaaaattgtgtttaaggcaatatcatttaaaattttattttgggagaatgttgccttggtaaattggtaaataacagttgttctgaaaggtttcggaagaatgcctttctgctaaattgaagaaattaacataatttactcttctgtaaatagggggatggtctgcattgtgctcatttaatcattggagttcaaattaatgatttgctggggtcctgtggtgaatcttgagtgattaagagggagaactcagtccttggttcagaaaagttagcattggaatggatcctcaacaggccctgaaggtaggaagtgttctgatttagagagctcttccaaggcttgtgatggaaccctgcaacggtaagttttacgagtatcagtaactggccgggtgcagtggctcacacctgtaatcccagcactttgggaggctgtggtgggtggatcacctaagatcaggagttggagaccagcctggccaacatggtgaaaccccgtctctactaaatatgcaaaaattagccagccatggtggcaggcgcctgtaatcccagctactagagaggctgaggcaggagaattgcttgaacccaggaggtggaggttgcagtgagccgagatcgtgcattgcactccagcctgggcaacaagagcaaaaaactgtctcaaaaaaaaaaaaaaaaaaaaaaaaaagccaggcttggtggctcacgcctataatcccagcactttgggagccaatgtgggcagatcataaggtcaggagatcgagaccatcttggctaacactgtgaaaccccatctctactaaaaataaaaaaaaaattagccaggtgtggtggcgggcacctgtagtcccagctccttgggaggctgaagcaggagaatggcgtgaacctgggaggcggagcttgcagtgagccgagatcgtgccactgcactccagcctgggcagcagagctgagattcctcaaaaaaaaaaaaaaagaaaaaaaaataatcaataacatagaatgtggatatacatagcacatagatacgtatagcaagtcaggaagtttgcctagaaggaataaattaactcttgttacttggtgagatcatggaagggaatgtaatttgttttaggtggtggtaattgtgagtttgaggctggcccaggaaatgagttgtcagatatgctgtcatcctcattaatggttcagcttatttctcaggtttatagttgtatgaggagatgctatgcctaccccatttagggaactattaggttcaaaatcataaaagctaaagaagagtgaaatacagtgaaaagtatcctgttcacacataccccatgatcatccagatttcccttcccaggggcagttgatattatctgtgtcttatatgtcttgagatagtttatgtgtatagaagtaaatgtaaatatctactacttatttcctcttttaacacaaattatagtaaataatatacaatagtctgcatcttacttttttcactctcgtatctaatgttaaaaaagctacgtggtattccaatgaaaggatgtattatatatattttttagatatttcatttgagttgttttttttttttgttttgagacggagtctctctctgtcacccaggctggagtgcaatggcgcgatcttgactcactgcaacctccacctccctggttcaagcaatttccctgcctcagtcccctcagtagctgggattacaggctcatgccaccacacctggctaatttttttttgtatttttagtagagacagggtttcaccatgttggctagactggtcccaaactcctgacctcagggaatcctcctgcctgggcctcccaaagtgctgggattacaggcgtgagccaccacgcctggccttgagttgtttctaagctgttgctaataaaacaatgctagaggatttaaaaaaatatgttagggttttatattgacaagtaaatattgtcataatagaaacttgctatacttataataataatacatctatagaacatgttcataaatgtctatttgagccttcctgtaaggtaagtacaacattttatcacttcataactagtaaagtggcagaagtagaggtagaaccaaggtcttctgactcctatttgagtatctgtctactttacccaaaatacatatactgttgtggggctgtagggaagtgggggtgggaaaataagaggaagtagacctaggtggggcaagcttgagatagggatgtatctgtcattctagaaattgggatcctgtttgctaggagtaagtggaactggacatcagcctgttacagggacataaaggcacttaggcactggcagagcactatggtttgattgccatcttggagtacagtagtatggtaagccaaagagtggtagttctggagaagctggggactgtcagagctccctagaatagactgagagtgaaacagcattcacgatttgctaaggaggctgggctactaggaaggataaggtaggagcccaggagttcagggctgcagtgaattatgattgtgccactgcattctagccttggcaacagagcaagaccctgtctcttaaaaatattggtcaagaccataaaacaagaacataggccatagtgaaaacataaaattttcttagcagctgtggtagcaaacatgttaatggtaaggagataactgtaatgttagtcaattttggcttaagactgaggactgagaaacagccttcttcctccggaggagcagttaagtcatcttacaactgggagtagagagacaaggacgtgtgaagctgattcatgctttcattatatagttaatactatttggaaacctgtgtgtaggtctggtcaatagacttccatcttaattgctgtatgctaagtgcctcctatgttctgtatacttcatataattcttgctagccttcaacagctttttacaaagtaactattgttttacctaatttctattgagaaaaatgagcttcacttaggtaacttgtccaaagttctttaccttgtaagtggtagagctgagatttataagtaggtctatatgactccagggctcttgttctttccacgataccaggtattaggcatcaaaattggacagtagaattctaatcacagctgtacataaccagaaagtatgagtatggatgagtgttagcatgtaaccagacaacttgtctgttatggatgatttgggctgaaagagtagaaggaatgctaaggaaaatgagcattggagatgttgagagctcgcaaactcatgatgaatgtgtatataatttaagtaatgcacttgctgtgcatatgtagagccttaagataaaatttccaatgctcccttccctcattaggtttttctttctaaagtccttctatattgagattatatagctgccactaaagactgtagctggtagtagccaggacctggaactttttggcaagagggtgttatctggaggatccaagtatactgagatcaacataatcatgaattcttctcccactgtaaagtttgaggaggtaagaatctccttgacttagcaaatttgggcttataaatgctaggtccaactagactttactggcctcaatcccttagcattatcctgcaaaatactgatgtatactttttggataatacctttgatctactttcagccaccattgtagggaattgttagtatgagaggttgacattttggttaaataatcacttggaaactgtgactcagcattagtcactggctttctgctgggttacattctcttgtctcttgccttaattgtggtaagcctcagccatttgattacacaactaccaaagaggatgaccttagtgataacccattcacattttcagatagtaaaaatattagggacaaaatctttcatatgtattagcgagtggtatgggttcgcctctggagaaatgttagcacattttccaggtttgcccgatgatattaaaagatgaatagctatcttagtgaaaatagctgtttacacttttagttagtagtttttaaaagtggaaatgtaacaatatgctttttggacacagtcatgttattttatttttatttttatttttattttttttgagacggagttttgctcttgtgcaggctggagtgccgtggcatgatctgggctcactgcaatttctgcctccctggttcaagcgattctcctacctcagcctcgctggtagctgggattacaggcacatgccaccaggcctggctaatttttgtattttttgtggagatggggttttgccatgttggccaggctggtctcgaactcctgacctctggtgatctgcccaccttggcctcccaaagtgctgggattacaggtgtgagccaccacgcctggctgtggatatagtcattttagtatttgagattaaatattaaacctcatttggcgaactttaaaaccatcagtgatttgagttaattctacctgttttaccttatttttcaccagtgtgtgtttcctcactgcctcattatattgccacatttaatctttcattaaaacaaacaaacaaacacaactcttggctgggtgtggtggctcacacctgtaatcccggtactttggaaggctgaggtgggaggattccttgagttctagaccagcctggtcaacatagggagattctctctctcctgaaaaaaaaaaaaaaaaaaaaaaattaaccaagcatggtggcacacatctgtagtcccagctactcaataggcaaagtgagaggattgcttgagcctgggaggttgaggctgcagtgaacatgatcaaaccactgcattccagcctggaggacagagcgagaccctgtcttacaaaacaaaacaacaactcttggaatttctcttttcccctcccttcttcttccccttcttccttctatttatccttctgtttcatctacaaatatttgagtgtcactgtgttctaggcactgtgccagacattgggattcgttggtaagcaagagagagaggcatggcctctgtccttatgagcttgcagtttatcctagtgttacttatctagtctgccctgccttcaaggttcagtggaagcccgatcttcatgtagtcctttgacttctttggcccttgcaaacctatccctttgacctatgctactttaaatctgattcatacaatttagcatttattgatataatttcttatactgtgggctaattgtttaaatatcttgttttactggctagagtatagttccttaaggacagagactgtcatgttattttttttttttttgcaatactgagcccaaaggttttgatttcagtctgccctgctgaatgttgaagttactagtagctcttgggacttagaagtagtgatgagataatgccttgctttttagtttattttctattttgttttattttatgtttcttttttgaaatggtattgggctggccgcagtggctcacgcttgtaatctcagcactttgggaggccgacgtgggtggatcacctggccaacatggtgaaaccccgtctctactaaaaagacaaaaagttagccaggtgtggtggcgggggcctgtaatcccagctactagggaggctgagacaggagaattgctcgaacccgggaggcggaggttgtggtgagctgagatcgcaccattgtactccagtgtgggcaacacgagtgaaacttcgtcacaaaaaaaaaaaaaaaaagaaaaagggccgggcgcagtggctcacacctgtaaccccagcactttggaaggcagaggcgggtggatcacctgaggtcaggagttcgagaccagcctggccaacatggcgaaaccctgtctctactaaaaatacaaaaattagctcgtgtgatggcgggcgcctgtcatcccaactactgaggaggctgaggcaggagaatctcttgaacccaggagatggaggttgcagtgagccgagatcgtgccattgcactccagcctgggcgacaagagtgaaactctgtctcaaaaaagaaaaaaaaaaaaaggtattgttcagtcatccaggctggagtaaagtggcacaatcatggctcactgcagccttgaattactgggctcaagtgatcttcttatcttagcttcctgagtagctgggattacaggcagtagcgaccatgcctggtagattatccctttaaaaaaattccttctagttgtttgcctaatatttgttatctgcttctgttaatctgtgctaaaaatgagtggaaatgaccttactgattcactatttgcatttatattgttttctagtgaaggggttgtatttgaggttaccattgcatagcttctcatctagttctccttgtgacattataatgagggatgcatttcatgactaaggaatagagctaagctaatgttgatctcttagtagcatgttgtaatcttttgggcttaaatgccctatcactatgccttagttcatgaagtgttaaaagtaactcacctaaaatgggaagcggagaatgtaataacttaaagatcaaaatcgaatttctcataaagatttttagaaatagaaaataatcttttaatgggccaacattatttacattttatgatgttagagatcaaaactcttcctgagtagtaaatgaatgtggcgacttaaatgtgaaggagggaggctgtgtgattgacttaaatgtttttctgaatgtgctaaaagctctgaggtaatggcaaacttcaatattggaaatagaagggatatattctttattaagaaggagaatagagggtactgggggaaggaaatgctcttttgcctacacttaaaaattaagaaggtaagtatatgaaattgaaggggtaaaagaccacagagcaggagacaaggaaaccgttatttccctctgaaataattctagatggtgatttgaacaaaccagttgctaaaaaacttatatgataattggggcagtttgaacattgactgggtatctgatgttaaggaattattctcttcagatggggcagtagtatggtggtcatattgcagacaaaaagtacttaccttttagaaatatatactgaaatacatatggatgacggaatgtgtctgagatttgctgggggaaaggaagaagtggtcagcagtatagataaaatggccatgtatttatttataactgtctaagctggctgatgggtacaagaggcacattgtattatttctttctacttatatatatgtttgaaaatttccataaaataacaacaacaaacccccccccccccaaaaaaaaatcttaacaactaccagaactggcagaattgtcaagcctacccctttatcttctttctctctaattttagatgggcaagtaaagccatagattcatgctgatgtttccaaatgggaatgcagtttagatttccatccccttaagtttcaatctatctgtagtgcagcatcactgagagaacaagccctgctattttcccagcagtgtggtaagttacaacagggtaggagtcatactacccatctttaaggctcttcctccttataggtgaagaaataagatttaaaaagcaaaacataattagagaataggaaaatgtggtttaaaattatatgtcatattttatagttctggccaaacataagaaattctagagaaaggaaagaacattttgggttaggaataaccaaaggcttttcttttgaaacagggtctcactctgtcacccagtttggagtgcagtggtgcatttatggctcactgtggcctcaaccgcttgggctcgctgcagcctcagcctcctgggctcagctgcctgagtagctgggactacaggcatgcgccacctgtccagctaatttttgtattactttagagatagggtctcgctatattgcccaggctggtttcaaactcctgggctcaagtgaccctcctactttggcctcgcaaagtgctaggtttacaggcatgagccatcatgccagaccacaaagacattttttattaggccagtggatgttcggatcatctttaaacaacattgaaagttgaattgctgacagtaatatggggatagcattccagggagagaaaatactatgtttggtggagaatagatgaatttggattggggaacagaagatatttttgatgggtaggatggggtcatttcataaaggacatgaatttttagttgagacatttgggcttgatcttatagaccttaaggagccatttttggggtgtggggaaccatttttgacccttaagctacctaagtatttattaatttggtttgatgataatattgtgtattcttagttgcaggcttttgcatagagagtataacttgactttgtagcctttacattctttttaacataaatttgttatttccacagtgttccaaaagttattcagggaccagaattaatatttattttttacaaattatttatttatttatttttgagacagggtcttgttctgttgcccaggctggagtgcagtggcgcgatctcggctcactgcagcctccgcctcccgggttgaagcgattctgcctcaacctccccagtagcttggactacaggtgcctgtcaccatgcccagctaatttttgtatttttagtagagatggggtttcaccatgttggcctggctggtttcgaactcctgacctcaagtgatcctcccgccttggcctctcaaagtgctgggattacaggcatgagccaccgtgcctggccacattttgatatttttaatcaactttattgaggcataatttacattcaataagattgaaccattttaagtttacaatttgaattttgacaaatatacacacccatttaataaccatacaatcaagatacagaacaattcagtctcgcagaaagttacagtagcactgtttgcattcattctcatcctcctccacttccagaaaaccactgatttgctgtcaccataggttagttttgctttttctggaatttcatataaatggcctcatctaggatgtactcttctttcatcagcattctttaagattcatttattgttgtttgtatcagagtttgttgttttttattgctgagtggtaatctgagtagtgttacattgtatggatgtaacaagatttgtttattcattcacctattgatgaacatttggattgtgtctggttttcttgcttttatgaataaggctgttatgaacttcatgtacagctttgcgtagatgtatgttttcatttctcttaggtaaataccttacagtggaatggctgggtcatatggttggtaggtttatgtttaacttttaaagaaactgccaaattgtcttccaaagttgccgtaccattttatattctctttagcaatatatgagataggagagttctagttgctttaaatccttaccattgctaaaatgatatatcttaaattttagttgttccaatagttgtgtcatggtatcttgtggttttaatttacatttccctaatgactaatgatattgagtatctttttatgtacttattttcatgctgtgtatcttctttggtgaagcatttgttcagatcttttgctcattaaaagaaatgggctgaccgggcacagtggctcatgcatgcctgtaatcccagcactttgggaggccaaagtgggaggaccacttgaagccaggagttcgagaccaccctgggcaacaagcgacactctgtctctacaaaaaacttaagaattagctgggtgcttggcatgtgcctttagtcccagctattcaggagtttaaggtggggggatcacttgagcctagctgtttaaggctgcagtgagctgtgatggtgccattgcactccaacttgagtgacagagcaagaccctgtctttccaaaaaaaaaaaaaaaaggattgtttctttatagttgaatattgagaattctttatatatcctggatacaagtcctgtgttatataaatgctttacgctttgcaaagattttttttttttccgattccatggcttattttttcattctttcagcagtgtcttttgaagagcaagagtttttagaggccaggtgcggtggctcacgcctgtaatcccagtactttgggaggccgagttgggtggatcacttaaggtcaggagtttgagaccagcctgaccaacatggtgaaacctcatctctatgaaaatacaaaaattagccagacatggtggcgtgtgcctgtaatcccagctactcaggaggctgaggcaggagaatcacttgaatccggaggcggaggttgcagtgagctgaggtcacaccactgcactccagcctgggtgacagagcaaaactccatctcaaaaaaaaaaaaaagaagaaaagaaaagaaaaataaagtattctagtgaagaccggattccttggcataagacaccaggaattttagattgataggagtaaaaataaataaagaaatattggctcagggaataaacttcattaaaatcaatttatgggccaggtttggcggctcacacctgtaattgtgcagcactttgggagactgaggtgggcagatcacttggggccaggagttcgagaccagcctggccaacagagtgaagccctgtctctactgaaaatacaaaaattagccaggtgtggtggtgcatgcctgtaataccagctactagggtggctgaggcagatgaattgcttgaatcctggaggtagtggttgcagtgagctgagatcgtgccactacactccaacagtgtgagactctgtgtcaaaaaaaaaaaaaaatcaatttatgaaagttatttttaaatttgaagatattgaagatactaaatttgtgtttaaaaagcatttattttgatcaactccgctgtatagaatattttgtcttaagtcactgtaaagtttccatgccctcaaatgaaatacagtgccaggtttaacattcgttttcatggattgttttcaaaagttattgagttgtctgatttgctgtaaaaaaaatgaaaaattcatttcttttattaacatgatgtatttactgtgattattctaatagactaatggacttttaattttactgtttaaaatagtttataattaaaatttaatatccagtcttcacttgttctttcattttttaaaataataaagtagtttggggtttatcagaacaagggaagaaaccaagctacgtctcattttatgttgggtaagaatcactagagacgaaattattattattattattgttattattattattattattatttttgagatggagtctccctgtgtcacccaggctggagtgcagtggtgcaatctcagctcgctgcaacctctgcctgctgggttcaagcagttcttctgcctcagcctcccgagtagctgggactacaggcgtgtgccaccttgcccagctaattttttgtatttttagtggagatggggtttcaccatgctgaccgggctggttttgaactcctgacctcgtgatctgcccacctcggcttcccaaagtgctgggattacaggcgtgagccaccgcctggccgacaaagttactttctatgggatcaattcctgagttttatctaacacgagaattttagcaattaaaagtcaagtgcagttcagatatattagtttaggtaatatttttagtgtttgaagagagctcaatttgtaagccatttagctactaattaccctgcctttgctgtagaaagaacttaaatgaaagacctgttttaagatgcctttttaaaaagcagccgttgtaggtataagagttgaaaaatcaagatctaggcagcagtggagaattatgaagtctgataagataatatgctaaaattgtattgttaattctgatttgtgacagtgcttatcagtagaaaagaaatgtgatctgtggttaaagactgaactgccactaaatgtaaaatgttttttagatgagttggaagaatgctgaaccagtctttattgcccaagatggctttgagtcagcaatctcaaagaataaagaaaaaggagttaagagtgagaggcaataagtaatatgctgttttcatttaagatgtcttgaagagataattaaaaagttgtaggggtataggaattgtgatgtttctctggtgttaatgaagtctactataaattagataatacaggcactctaaattattgtttttccttttttaaattcttggcagttactgacaaattatactcaggatcaagtttaagtctcagtacatgaatgaccctgacattgaaaaccctgaaggatgttgaccttagttttgacctggctttatcctgagcagcctctgtgaattcttaatgctgtgctctttaacaggggtactttttccagatgtttttgatactgtattcattaacatataataaagttatcagtgtccctgaaggctaattttttttttctgactgaatatgagatatggagcgtgcaatttgtacttattggtattaacattaccaacaaggtttgtctttttcttataagatggggaatcttaagaaacttcaggccaggcgtggtggctcatgcctgtaatcctagctttgggaagctgaagtggggcgaatcacttgagatcaggagttcgagaacagcctggccaaggtgaaaccccgtctctactaaaaatacaaaaaattagccaggcgtagtggtggatgcctgtaattccagctacttgggaggctgaggcccgggagacagaggttgcagtgagccgagatcatgccattacactccagcctgggcaacagggtgagattccatctaaaaaaaaaaaaaaaaaagaaacttcattaagaagttaaagcctgggtatgctctccttgataatttctttttactcacatctttattggtaaatcaggccagaaggattatttaccttttcagaaagggaaactaggttctacggtttggttacagatagcctggcagctgactttacattgggcagaggagactgccgtacttagtggttctgagaaaccaagagagtattgcctgctacagctatgagaaaaggtattgaatcttccccctcctttgtgggggaattccaatctcactaatttatggtttcagtgtagttatggtcatagcttctgagacgtgggtactcattgaagctaacagttttagagaaaggggagggtgtttaattccaataactggtagtttatatcactttaataatttagacccaatgatatgaagattagttagtataaggcagatatacatgtaatacattcttttaaatattgtacaaggagtaagaaacccctttaagtagtcatgtaattcattatagcagctgaacatttctaagtgcaacattataggaaaccagtaaagctgatttctgatttatctgcagcaaaagaatttaatattccaacttcagcaaaaggcaattaaaaacaaacttaaatcacattgtgtgcttttaatacgtatgtttttttccatgctgtctgatgtattttagttcttagtcatttacttccattagtttccaaattggttgagggaattaaattggtagccaagttacctatacaagattttcctactgtgtatgtgaaccactctttctgggaaaatcctcccgttggcacttttcttgaaggcatgcactttttccacacttagtgatttggggactgaagcctgcatttagcctgtatttagtcagaggtgacaaatggctaaattttttttttccagtttagagattgagaaatgattcagaattgaaactaaagtgaatttggacttactgtatttctttgcaattacttttaaacaattgctgtctgttactattaggcatattttggacctatgggttccattttgggccgatatttggtgttatgttgttaaatttcttgcctggcttagatggttcattgttgaaactaaactggaactaggtttgatcagagggccaatggaaatgcacgttgtggcccatttggggaggacaaaatttgacatatttttactttaagaattcttaggaaaatttggataacgtgagaatatatttccaaagggttaagtaattttcgagggaaaatcagaaagcttgtaattcctactgaaaatattagcctgctgaaatattagcctatttcctactgaaaatataacattagcaggccgggcacagtggagttcacgcctggctaatttttgtatttttagtagagatggggtttcaccatgttggccaggctggtcttgaactcctgacctcaaatgatctgcctacctacgcctcccaaagtgctgggattacaggcgtgaaccactgtgcctggcttgacttttttatttaaaaaaaaaaaatctatacccaattgccctatcagtttatcatttactcacttatttgaaacggtcatattaacatacactctttatttatttatgtgcctatactttgttttaattactgtatctttagaatatgtttcaaaatttcattaactattataattgattctctttttttgtaacgtatcatcagcaaataataatttggactcttctaatatttctgcttatttattgacattttcaaagaatagcttatgattgataataatcataccagcgaatacagtgcttttcaacttaaatatgcacagcaattacctgaggatcttattaaaatgaagactcagtagggctggagtggcctgagagtctgcattttgacaagctcccaggtaatgttgacttatgggttcatagaccttatgttgagttacagggaactaagatttattgagtacttaatttgttctggtcagtgcttttacatctgtgaactcgtttaatctttaaaactccatgatgattattatccccaatttgccagtgaagaaactgacacttagagaagtttataacttacccaaagtgacgcaaccattaagtggaagagccagactgagcccaagcagagtttgcactctgaacctctcgaatatattgctttaccacatgcgtgttcgctcacacacacacacaacagacattatcttctcttgtgtgactcaaatggtaataccttaaaattttttttttaatgaataggctttattttatctattttttgagatggggtcttgctctgttgcccaggagtgcagtggtatgatcgcagcttaccacagccctgaacttctgggctcaagccatcttcctgcctcagcctcctgagtagctgggactaccggtgtgtgccaccatgcccaactaatttttaatttttgatagagacgaggtcttactgtgttagccctgcctggtctcaaactcctggcctcaagcgatcccttcacctcagcctccaaaagttctgatattacaggtgtgagccacagcatctggccaggctttatgttgagaagtttagagtttacagaaaagttgagcagaaagtacggagaaatcccacatatcccattatctctgcctgtcctcacgattttccctgatattaacatcttgcattagtgtggtacatttgctacaattgatgagcaatattggtacattaactaaaattcatagtttacattagaatccatagtttgtgttgcacatttgtaagagttttcacaaatttgtaatgttgcatatccattattacagtatcatacagaataatttcactaccctaagaattccctgtgctgtacctattcatcccttcctctcctcagtccctggcaatcactgatttttttttttttttttgagatggagttttgctcttgtcatccaggctggagtgcaatggcatgctctcggctcactgcaaactctgcctctcgggttcaagcgattctcctccctcagcctcccgagtagctgggattacaggcatgcgccaccacgcctggctaatttttatatttttagtagagatggggtttcaccatgttggccaggttggtctcgaactcctgatctcaggtgatccgcctgcctcggcctctcaaagtgctgggattacaggcatgagccacctcgcctggccaatcactgatctttttactgtctccatagttttgatgttaccagaatggcattattgcatgtagccttttcagattgactttttttcacttagtaaagtgcatttaggtttcctccaagttttttcatggtttgatagctcattgtttttagcactaatattccattgtctggatttccactgtttatttacccattcacctattaaggaacttgttggttgctttcaacttttttcaactatgaataaagctgctataaacatctgtctgcaggttttgtgtggatatatgttttcagctcatttggctaaataccaaagacagaactgcgtgatcatatagtaagagaatgtttagttttctagaaactgccaaactgtcttacaaagtggctgtactattttgctttcccaccagcagtaaatgagagttcctgttgttctatatccttaccagcatttgatgttgtcactgctttgaattttagccattctaataggtatgtggtgtctcgttgttgttttaatttgcagtagcctagtaacatatgatgtttagcatcttttcatacactatttgccatctgtatatatcggtgaggtatctgatcatatcttttgcccattttaaaattgggatgtttgttttcttattgttgagttttaagagttctttgtatattttggataccagtgcttcaccagataggtattttgcaaagattttcttctagcctgtggcttgtttatgcctttagttttttaccattaaatatgttgcttgctgtctggttgtgacaaataatcatcaagttaagaaagcttctttctttgtctctctaagagcttttgtcaggaatggctattcagggaagtccttgaaaattatttggctaaacaaatagattaagctttgtttttagcaagacatcctgttttattccatataattaaaaacacattctttatagtgtgatattaagactgtaactgagactttaattcctattccttctaaatcattttctcttactctgtgattttgtatgcctttaatgtccatgttgattacttgtccagcatcttaatctcatctgacttggtctttcttctcccagctatctgttcttccacttctctgtagcaatttatttctgtggccaaacgtccacttctggaattacaaatctgtaaatttttctctttgaacacaatttcctgtcttttcagttcttccatttgctgagtttattttctcatttcactgaggccgccagccccttaaatctccattgtctcccaatttgtgacattcttcctggcatcactttatcccatatggatgccataattggtcactttcaatgagtcatcagtatccgcagttctcctgcatctttgttcttctttcccacatgccatgcagatctccagctgtggattaacagtactgccctttttctgtgttcccgctctagggcctgaagaaatgatttcatcatattaatttgttcttttgctaatccatgggttttagcctcatctgtgcttattattctctttagtagttttctcacttgtttggagttgatttcatttctccttcaccagaatgacagttctttctaaatctttccacattttcctttggttcgtgtcaccttcctccattgcagctgattctacacttcagcagagtgacctttaaaaagagagaaaacaacaaatctattatgttatttcctgtacaatactgttcattataaagatggaggtaatttttttttttttttttgagatggagtctcgctctgttgcccgggctggagtgcagtggtgtgatctcggctcactgcagcttccgcctcctgggttcaagcgattctcctgcctcagcctcctgagtagctgggattacaggtgcatgccaccatgcctcgctactttctgtatttttagcagagatggggtttcaccatgttggtcaggctggtcttgaactcctgacctcatgatctgcctgcctcagcctgccaaagtgctgggattacaggtgtgagccactgcacctggccagaggtaaaattcttaagtttaacaggatctttctggttttctagcctcatctctgtcctcttagcgccttagcttcactggccctttttcagatccttcacatgccaagctcattcttagcacagggctttgtatatgctcttttctctgctggacaccttttttcttggcatgtttaatttgtatttatcttaaggacttagcttatgtgttcctttctcaagaaagttttccctgaccttccatttgcctaaaggtagattagattccctctgaaattattaatagtaatgatggtaacaacaataatagcagcaacctttgagtgtttatgagttgcagagactgttcttagcacttacacataggaagttttttggttttcatagcaaccctatgagttgtataggtgggtaaataagtaggacctagaattatctgcatcttatagatgaggaaactgaagtgaggaatgttaagtcacttgtccaaagtcacacagccatttggtagcagagttggaatttgaacccgggcagaccccagtgcccacgttctaaactgctgtgctctactgtaatggtgagtataactgtgtaatgttttttgttaatgcctacctttgttggtaggctctaagctcctcgaggtcagaaatcatacctgtctggttaatttccatggcctaggacggagcctggcatggagtagtctgtgaccgagtacttgttcctattgaatgaatcacagcttgccagtctactaaattgaggaaatagagggtttcagtgtgatccttttcacttttcctccccactgcttccaaatattaaactcccttggttaaaagaataggtgcctgtacttatttcaaaatctaacccctctacctgtttgccttgtatattctaggagtaatttatgtacttcgtaagaaaaattagtgcagatgtacataaagtaaaggtatacgtcttccattttttcctcctttaacgttttatacttccaggtgtcaactgctagtagttaaatcttcttctgtacatgtacacattttgtggacacttaaaatacacaagggtaatgtatgtagtattatctaagttttttaaaaatttaattttgatattgaacgatagtttcacaagatgtctccattgagggaaacaaggtaaagggtacaggagatctctgttgtttcttacaactgcctgtgactctacaattatctctaaagaaatggttaattaaaaaataaactatagaaatattttcatgtcagcgtattgacctgtttcttttaaatggctatgtaaaatgttattatatagatgtgtattactttatttcacgtttcccctattgatggacttttaagttccttccatttttcattttcaccaatattgccaaaggtggaccatccttgaatttgtaggtatatccttggttggtatatatgcacagccaagttttagaagaggagatcaaaagatgggcatatttgaaatgttggtaagagttggccagaccatcctccagacaagtttatactttcgttagcaggtgagatagaagctctgtgtgttcacctgcactgtcctgatcccattctgccacttcttcttggggactttatatctatatctatatctatatctatatctatatctatatctatatctatatctatatctatctatatatttttattatactttaagttctagggcacatgtgcacaatgtgcaggtttgttacatatgtatacatgtgccatgttggtgtgctgcactcattaactcatcatttacataaggtatatctcctaatgctatccctccccactccctccacctcacaacaggccccagtgtgtgatgttccccttcctgtgtccgagtgttctcattgttcagttcccacctatgagtgagaacatgcggtgtttgattttttgtccctgcgatagtttgctgagaatgatggtttccagtttcatccatgtccctacaaaggacatgaactcatccttttttatggctaaatagtattccatggtgtatatgtgccacattttcttaatccagggactttgttttattaactaatccttttccatttaatatatctacttccctgttggttctcttctgtctcctcatcctgtagcacatcctccaaactgatagagctttggttgctgtcagttcttttgtgctgctataggagaatacctgacactgggtaatttataaataacagaattttattttctcatagttctggaggctgggagggcactggcaggttcattgatggggatttggtctctgcttcttagacgatgccttgaatgctgtgtcctcacatggcagaaggcagaagggcaaaaagggagtaactccctccatcaagcccatttttaagggcacctaattgcattcatgaacggaggaaccctcatgacttaatgatgtcttaaaggcccgacttcttaataccatcacgttggcaacatctgacttttagaggcggagacattcaaactgtggccctagccaagtcctttgtgtgcttttacttatctttacaaccatcctatgagatagtgcctgtttctctgcctacttgttaagcgattatattcttctggattttgtccttggctcctctatccaacccacctgtagccccaccttctcttctgttccctcatccaaaccagagagaccaggatttgaatctggctccattattttctccctaagagacacggaatgatttactttgtctctatgtttctgtttctttctctgtaagtaagagtggggagactagagctacctatctcaggattgtgtggagtaaatgaataatgtgtgtaaaacatttaaaatagtgtctcatgtacactaagtgcttaataaatgctaataataggaatagtaacaacagtatagttacattgttattataaatctgtatctgtggtactcttagcttaagttcgtacaaaaatattgagctgcctgttagaaatctacatttggatgcctccccagatatcttaaactcagtttatctaaagtcagagtctttctgtggcttcagtgcttagtgactgtgtccgtgaataaactacttattttctttaagcctccatttctccatttatgaaagggtgataatgaacttattttatcaatattaaatgagataattcttgtaaaagtatttagcatagtgctggtatatactaatatcttaataaatattagttgctattattattattccttttaaatgctgatcccctttttgtcctgttctgcccagaaaaagagcctcaggatagctttgcctgtctgcctgtcttccttatccttcatatgcaaccagtcagcaagtactgttattttgtattttcattttaaacatcttaatttttatttattttaaaattatttatagagatggggtctcactatgttgtctaagctggtcttgaattcttgggctccagtgatcctcccacctctgccaaagtgctgggattacaggtgtgaaccaccacacctggcctatcaagtactgttgattgtgcttccgaaacatgtgcttgcatccaaccactccttatcatttcttgacacaattattgtggtaatctcctaattgctctcctggcctcttggccatcttgtacctttcatcctgagttatctttatagtaggtagatctgctcatatcactcagcagaaaggcctctgatgggtctctcttacctgaaatataaagcctccaaggcccactacaccacagtcatctttagagcctcccctcttgttctgggacccatgggtcctacagtatatgcagactactgactgttctgtgactgcaccctgtactctaaatctcatacctttgtccctgacctgctgttgctgtacctgccttctttttgcttagagggttgtcccctcaagcactccctgctaataagcactcagccttccaccccaaacatctagtctgtctggtgaattcctggtgattcttcagtggtctgtctcaaatatatcttctacgctcttttctctttagtcttaactgccatccaaggcaacattagttagtccctcattataagaggcaatataagctggtgagaggtatatacccacagtcctagctacttgggagtctgaagcaggaggattgcttgaggccagcctgggcagcatagcaagaccttgtctctttgaaaaaaatagaaagaaaatgctgggtgtggtggctcacatctgtaatcccagcactttggaaggccaagtagggaggattgcttgagctcaggagttcgagaccagcctgggcaatacagcaagaccccatctctacaaaaactaaaaaaattagctgggcatggtggcacatgcctgtggtttcagctactctggatgctgagggagaaggatcacttgagcccaggagtttgaggctgcagtgagccatgattgtgctccagcctgggtgacagagtaagaccttgtctcagtggagggggtagggtgggaggggggaaagaggcaatatagtggtaagttaaaatccctgagtttggagccagactgcctttgttattaaggtagttgtatataactgggatgaaactgtttaacttttttgtgtctcagttttctcatttataacaaatgagtaatattagtcttgctgtgagggttaagtgaattaatgtagggaaaatgcattgaaagggcttgcatattactaagtacttcataaatatagctattattattattctcaaagcatttcttacatacttacctataatagcatttgccactttactttttttttttttttccaagacagagtcttgctctgttgcccaggctggagtgtagtggcatgatctaggctcactgtgacctccgcctcctgggttcaagcaattctcctgcttcagcctcctgagtagctgggattataggtgtatgccactatgcccagctaatttttgtatttttagtagagacagggttttaccgtgttggccaggctggtcttgaactcctgaccttgtgatccacccacctcggcctcccaaagtgctggggttacaggcatgagccaccgcgcccggcctgcagttacttttttgtgtatatttcccaatagactgtggcttttttgaaggtgggctattttaatcatctttgtgtcatcagtatgtagtacacagtgggacccagtaaacaatcagatgtgctgtttgtgtagcccagaataaagtgccaggtcctcctgcattgcagcagtcagcagcatgcatctggaaagtattgctttctgaaactacggcattagagccacaaagctgtttgggattggaccttagcaagctcttcaaccagaaatttgctattacaatgaagcttcctatctgcaataggtagattgtaactgacagcatgtagtcattggaaggaggttaatcccagagcataagaggacttctgatttatttttgcttaaagggatacaatccaaggccacaaaggctgctataagacttttgttttgttggggataataaagagagctgtttctgccttttccactttcttcttataaacctgctgaagattgaaatgttaaaatgtgattcagagaagagatttctttattgtaaacatgatagagagctcagaatgaatgccggagatagactctttatagaggatttcagggtattaaactcttaagccccttatggtcaggttttactgccaacccttaacaccccaccatgcctgggctactgcaatagtaactggtctttctacctttaggttcgctgcagtctctcctgcctactgctatgatattaatatttataaagccttactttgacttttctcatgcattataaaaaatcctcgcaaaataccccatcatatacaaggaaagttccaagttttagcttgtcattctggacttgtattaggattctccagagagagagagagagatttctttcctttctttttttctctttttttttcccagggtttcactcttgttgcccagtcgagtccagtggcactatcttgcaaactgcaacttccgccttccggtttcaagcaattctcctgcctcagcctcctgagtagctgggattacaggcgcctgccaccacgaccggctaatttttgcatttttattagagacgggatttcaccatgttggccaggctgatctcaaactcctgacctcgtgatccacctgcctcagccttccaaagtgctgggattacaggcatgagccaccacgcccggcctggatagatggatttctgtaataaacctctataggccaggcgttgtagctcatgcctgtaatcccagcgttttgggaggctgaggcgggcagatcacctgaggtcaggagtttgagaccaggtcggccaacatgttgaaaccccatctctattaaaaatacaaaaattagccgggcatggtggtgtgcacttgtaaatcccagctatttggaaggctgaggcagacaatcacttgaacccaggaggtggaggttgcagtgagctgagattgcgccattgcactccagcctgggtgactgagggagactcggtctcaaaaaacaaaaaacaaggaaaaaaaccccaaaaccttcataataagtttccatatctatatctatagatatagaagaggtttattttatatatataatagatacatagataggtataagaggaggtttattatggaagttggctcatgtgattcatgtgatcatggaggccgagaaatcctatgataggccatgtgcaacctggagaaccaggaaagctggtggtgtaattaagttggagtctgaggtcctgagaaccaggggaatcaaggctgaaggcctgggaattgggaaggggtggtgtgctggtgtaagtcctggagtccaaagacccaagaaccaggagctttgatgtccaagagtgggagaagatggatatcccagctcaagaagaaagagtgaatttgctcttcctctgccgtttgctctctctgggtggaaaagggtaaacagattatgacgcccaccctcattggtgagtgtgggtcttctttatttagtttactgattcaaatgctaatctcttgcagaaataccctcagagacccacctagaaatgttttatcagctgtctgggccattccttagcttagtcaacttggcacataaaattaaccatcacaggactcttctgcagtctgactctggttaccttttctaccttatcttccactatatcctagaatgagctgtgtagcttacctggcctagttgtgagtcctataatgtgaattgcattttatgtttgtatctacccagaacattttaccttttgaaattttgcctctcctttaagatccattaaaaaaaaactatttatttatttatctgtttatttatttatttaatttattttttttgagatgaagtctcactcttgttgcccaggctggagtgcagtggtgtgatctcggctcactgcaacctctgcctcccaggttcaagcgattctcctgcctcaagcctcctgagtagctgggattacaggcgtgtgccaccacgcctggctaatttttgtatttttagtggaaatggggtttcaccctgttggccaggctggtctcgaactcctgacctcaagtgatctgcccgcctctgcctcccaaagtactgggattacaggcatgagccaccacacccagcttattttgaaataattatagaatcataggaaattacaaaattagtacatcgagtcctgtatacccttcccccaactttcaccaatggtgatatctttttgtgtgtgtgtgtgtgtgtgatggagtcttgatcttgtcgcccaggctgttgtgcaatggcgcgatctcagctcactgcaacttccgtctcccaggttcaagcgattctcctgcctcagcctcttaagtagctgggattataggtgcctgctaccatgcccggcttatttttgtacttttgaagagacaaggttttgccatgttggccaggctggtctcaaaccctgacctcaggtgatccgcctgccttggcctcccagagcattgggattacaggcgtgagccactgtgcccggctgctatcttatataattatactataatataagatcctattttttttttaagagacaggttttcgctcagacgcccaggctggagtgcagtgctgtgatgctagctcactataaacttgaactctgggctcaagtgatcctcaggaggaggatcctagctcctgggtagctaggactacagtcacgtgccactatgcctggctaattttaaaatttgtatagagatgatatctcggtttgttgcccaggctggtctcaaactcctggcttcaagtgattcctccacttcagcttccaaaaatgttgggactaggtgtgagccattgcacctagactgatccattttaaaactctattttgaataaaattttcaggggtaaaaaaggtttttttcttttccttttcttccttgcttctttctttctttttttttgagatggagccttgctgtgtcacctaggctggtatgcagtggcgcgatctcggcttactgcaatctctgccttccaggttcaagccattctcatgcctcagcctcccaagtagctgggattataggcatgcaccatgatgcttgggtaatttttgtatttttagtagagatggtgtttcactgtgttggccaggctggtctcgaactcctgaccttaagtgatctcccggccttggcctcctaaagtgctgggattacagtcatgagccactgcgtccagatggaaagtatctttttaaactttatatccctccctagaatttatcccctaatatatggtgtttatggaggtggttggaatcaactactttttataaatatattattaaagagttgacaacccctaaaaatcttttagatgctagacaaaaaaactgagagaaatcatgaagtatttttttaaaaaattttttgagatggagtctcactccagtgacaacccaggttggagtgcagtggcacgatctcagctcactgcaacctctgcctcccaggttcaagcaattctcctgcctcagcctcctgagtagccgggattacaagcgtgcgccaccacgcccagctaatttttgtatttttagcagagacggggtttcaccatgttggtcagggtggtctcgaactcctgacctcatgatccacatgcctcagcttccctaagtgctgggattacaggtgtgagccaccatgcctggctagtcatgaagtattttaaaggacgtgggttctgacactcttaaattcaataggccaaagttcctggcatttttttcttggatatgtaccgcatagacctttcttagtagatactgggagaaagaagttggtttaataatgaattaatgggaaagttttttttttgagacggagtttcgctcttattgcccaggctggagtgcaatggcccgatctctgcttactgcaacctccgcctctagggttcaggtgattctcctgcctcggcctcccgagtagctgggattacaggcatgcaccgccaagcccggctaattttgtatttttagcagagatggggtttctccatgttggtcaggctggtctcgaactcccaaccgcaggtgatcggcccacctcggcttcccaaagtgctgggattacaggcgtgagccaccgcgtccagcctggaaagttttaattgaccttatgtctgtataattaaatgtatttcattaactttttaaaggtaaataaatctggggtttcatctaagtgtcaaaaatatgattttcaccaatggcctacttatttttgccattatttgcataaatagctttctggtttttctcaagttaacctgtatgcttgtgatgtgaaagtcatagtatgtataaaaaatagtaccaagatgaagtatagatggtcattctgaaccattattccttagcagagtgaactatatttaaggttttagaaataaatcgtatttccatgtctgaataagaccttagtcttatttaaataaatgtaggggagatggagagaaagaataagatttgcctaagaatactaatattaagatgaatggcaggtaggacacactgaggctgtcaggcattgttctcagtgttttacattcaccatcttgcttcatcctcacaacagactttatcatttgattagaaaaaaatcagtacgatctagatgttctcattgaataacattttttcataaacaatttaatttcatttaatttatattgttactattttttatataagtaaatatgaggtctcactatgttgcccaggctggtctcaaactcctgggctcaagcagtcctctcacctcggcctccgaagtgctgggattacaggcatgagccaccacatctggccctgaactattttaatgcaacaagtatttactgagttccgataaatgaaccaagtctggtgctttagaaccatgatctcaaactggaggacatgtctaagaatatctaggcttggactgttttaagagaataaatttccagattctctatattttatttatactctttcctgaaattgacttgtttgaaggcaacactgatataatgctagtccaccttccctaccctccctttagccctgtgccttcttatgattaacagaagacagccatacctttcacccatcttgaatctcaccattgtacctttctatgaggtataaaatcctccaggattctaacaaagggatagtcaaaacactagtgtcacgtgtgaaacttccttttatcaaggtatcttcctccatacatcttattaagagatgcatctccaaaaaaggaaattactttttatgtttagttctcaaaatttgtaacatttgcattgtcttcatcgattgtgttttactataatagtaaccataccacaatccaacataaataaacaataatatacatgttttcattaaggaaagtatgataaaagttatattaaatactgtggaagaagcagaatagaaatacagtttcagggagaccgataaatggcatagcattttatataggaaaaaaagattctgttacagttttaaaatataggatgggggatatcagattgcccaggtgtttagattttattggaattagtgatacagtagggttttttgtttgtttgtttgtttttaagacagggtcttgctctgttgcccaggctggagtgcagtggtgcgattttggctcactgcagcctctgcctcccaggctaaagcaatcctcccacctcagcctcctgagcagctgggactacaggcgagtaccaccgtgtgtgactaatttttgtatttttttgtagagacggggttttgccatgtggctcaggctggtcttgaactccttggcccaagtgatccacctccttccacctcccaaagtgctgggattatgggcgtgagccactttgcctcaccaatatagtaggtttaatagctttaaaattagcaatataatagtgtttttaggtgtcagttctaaatagacatagattgatatataaatgaaaatataacctttgcagtgattaaaacttgtaatgaaaattttagatgtcaacctaagaatattcaaggagacacctttttccccccattaaatttgttttagcaggtatgtgagcaaaacttttgaatagtgccgcaaaggatatagagatcaagaagaaataatttttgccctcaagatgcttgttagttaaatggtgaagcaggggcatagatacatggtttggcttaaataaagccttaattgtgtcatggtattttgctgtttgcttaacatgggcattgtgcctcagtgttgtgtcatgcttgttaaaatgacccttgagtggtagtttagctcatatgtgctgtgttaccacataggctattgtgcagaacagtgaggaattgtatattgtgaaagacagatggataggaacagtgcccactgcacttaccaccaatgaatggtagggctttctctcattgtctagttgatgtgatcataaaaaacattagactggaagtcaggacaccctaattctcatcctgagtctgccacagaacgtatgaccttggctaaatcatttaacgcatttgaactctagtttcctcatataaaaaaagtttaaactggatgattttctacctgtgaagtttagagttcatacatttttacacagtatatgcgttttagaagggataggtgcagcagattttaagaaacagatgccaaaataatggagtagattacttactgtaatatgcggagaagagtagcttactaattatttatctaagtgtgattaggacagtctgttatatggcttgtcgtaagtgttgtgggtctcaccactgccctttttatttaaaaagagaatttcctctacttttgagaattagaacaaatactacacaggattagtaagcgagaataccaatttcagcttcatgccagtgcctctagtgaaaaccacatttttgcagtgttctagcagaatattaaaatggcttatggattacagacagctcaggctttggtctttataggtcagaggtggaaaccaacggagcaattaccgttcactcttatgggcggggcttcttaggttccttatggagctaaagtgaaactctggaacagttccactagaatggctttcctgggagcttatgaggcttacattctgaaactgatactcttgtagtacaagaataactacaaactgatgtggaattaggaggccagagaggggagaagccacatgtagctctcattctcacaagtcctttggctggcgaacagaggtttttcccgtcactaagcagatatttggttatatattgacaaatcctctctaaacaattcttagaatagaagactgattctgtcttgtgctttggaggtgaaggggaagagcaatgttgaaatgagtgaaattagcttgtgatggtttaacatctgcaaatatcatctatctaaccagtctttatctcctatgtgtgttcttaaatatggtccccattgtttgaagccaagaaagataactgaggaaattctatggctgatttgccgatgttattaccaattatttattagccttagtatcggatagtttgactgatttgccatgttgttttttagaaatgggggtcttgctctgttgcccaggctggagtgcagtgacgcaatcctagctcactgcagcctcgaactcctgtgctcaagtgatcctcctgcctcacctgtgagtagctgggacaacaagcgtataccaccacttctggctaatttctttttttactttttataaagacggggtctccctatgttgcccaaaggctgatgatttgccttttttaggtagaaaacctggactgggccctcaagtttttaactttttttttttttcttggtgatacaaaatgtggggtgaagaggtctgttaaagtgaccaggcttggtgctatttaaagccgaggagggaaatactgtttcctggcaggctttattgtgtttttgtattattaaatctcttaagtcagcagtttactttttgtctagttgtatgtcttggcttgtctaaatgaatcataattaaaatttagtcactgggactcttaatcttgtctaagcaggaattatagtttagagatactataccttgctgtgtatagaataagaaaagtataagtctgctatgatcactgagatgggtttttataagtactaaacttttttagaagcatagttttctttatcacctgtcccccagaaagtttagaaagtgaaaattaaaaagtaagtaaaaataatggtattggagttataatttggaaatttgtttcattcacttgcattttaatatttattatgtaaacatgaaatgataaatttgtttcctttgaaaagattcaagaaatagaatagttttaaaagtagtcttttacattcctttgcttattgacaaaatcatcatcaggaacatcgattcagggaatgaggcttctgatccatctcaaaacgaacattactaatatttgctatggtcatttgacataagtttttattgagtcagaactatactggggcagtagccttcaagccagttaaacatgaattaagaacttgtgtgccaggtactgcactaaatgttaatggcataaaggtgaataaaacatcgtttatactgtgttttgtttcacacaggatttgagatggctgacagaaagtaactaaagtgagattgtaaaatgtaactgaggttcagaaccagggaaaagataaattagatttggaggcctagatatggttaaataattaattagacatgaaaccctatggctgaacagttcagttgaatgttgattttagtagtgatatgatacagaagctaagctttgttatagtcacgcaatgttgaggcatggttaatatatttagcaggattatgaagagttcaggcattttttggaaactcctatgaatatgtcatctagaattggttttgtaaaatggtagtgcttgtactgtttagttacatgtgttgaatatcagatggatttcagtatttttttaaaactttgcttaagcctcttaagcctcattgagtggggagactgcagtgtaagtatccaggctgaagactgaacttccaccttatttttatgtggtaatgagtttttgtttagatgatatatatgttttaatgttgagatggaaaaagtagaagtgaattgcagtgtagaaactactctgtttccttttttatctatttttatttcagtcattaagctttccccatctttagtctattgagttgtttcatggcacgttcggagggatggtgggaatgccctttgctgaatcaaaaactactgtttctccaacttcacaggttagagaagctcatcaagtcaataatttataattttaatatggaagctgttttgggaactcttgtgggcatatcttggttttaaaagaagaaaaaagatttactgatttaagaggtatataaacgcagcttgctgacagtagcttttgattttattggttcaacagatatcattgttgcacaatacataatctttcactgtggcagctaatgagatacaaaactgcataattgcaccaacagttattttccttatagaatttggcggctactaagtaaacaacttttaaaatttatcttaattggtttagttatgtgccatcattgaatgagtcttaacattttccttcacgctgttgcactccacattcttagttgaacagagaaagatattattttaagggagggcttgatcttttagcattttagccagttggcttttcttaattaggatgattactcatatttagatgaaatctaactgagaaaccacagcaaaatgcttactgaaaacattcgggtagtcagtgtggaggaaagactcctggaaaataaaatgtctcaaggttgttttgaagtttatcctcattgtttttatttatccttatgtgtgttaagtatacgaggattcctggttgtactggtattttggcaaagtcctgtactgttcctcaaatgcttctaatgcagacactgacttttaagaaccagacacatgtagatgtgcagcgagacaacactctggcctttaaccattgtgcctcctttcttacctgcgaattgcgtttactagcgtatttcacatttcagccaatagatctaaagaatacaaatgagaacatataggacctgtctgcaaataggttttaacttccagagattagaagtagctgttgagagcactgtgggtttagtgagaaagagtgctttggcagaatgggcagtgtctactgtaggctaaaaatgggggaactatagcatatcatgagccttctgtaaccctcgaagtcagttattagcagttgaacatgctctttggtcataatggcagtccccaggctccagataataatttgagcagggagctgggagaaataaggaggacatgagtacatgggacaaaagtgggccagtaaagggaaaattacatatgaatggaagaatagagaatggaaaatggtaaactggagagaaaaagatgaaaaagacatgaaaaaaaagagtagggataaacgggctctacctgtttccttttctgatcagtaaaggaaaatacttcttgaaatccttagggcatctttggacaaggaaatcagaagtaattcaaattgtattgttgtcagagtttagtcttaaaagttgtgttgccaggtagaaaacaaagcatgataatcatttatagaactcctttagttggtttacttgcctcttagggtaaaaacaaaattagacttccagagtagtctgtgatcttggaaaagtctttctgaaaaatgattatagaactgttaagacatctcccatctcatctcatatggcatcatacttttcccaattattttcagatattttagcatcaaagttttctagaatgagttttgtagaacactagtatccctcattgcttaaatatattaggaggaaaaggattttttttattaaataagtttgggaatatatagagtggacaaaattagttttaaaattacaggtcatttgagaggtcttgaagtaccagtgtcttgtggatccctgaagggctagatgagggtggggcatgtagcctttctcaaatttatgtgactaccatacagtttgaggaaagctggtctatataaatgcattacctgtgaaacctggctttcttccacatctcctctgacttgctttgctatttttttccccatctcttacagtacttcctgctatcccccaaattgggggaattctttcttttttcattttaaaatatgatattctggagatctgaattctctctttttacatttttatatgtgtattccactttgagcaatattaatactagcttacattttaaaatacgatattctggagatccaatgtataacatgagggctatagttaataatattgtattgcactgggattttttttgagagtagattttagttgcccttgctaaaaaaaaaaaaaaaaaaaggaggcaggtaactgtgaggtgatggataaattaatttgcttgactatagtaaccatttcactatatataagtatataaaaacattgtgttgtataccttaaatatatacaatgaaaaagaaaagaaaagaaaatatgatgatagtatttatatgtgaactctttatttggatctttaagtttctggataatctggtccctaatcttatctacattcccaggtttattcatcaccagtcttccatggtaagtcttcacttgagctcaatttactattccatgattatattctgtatgtggaatgttctcctctactttttgtattatggtctggctcaagtgcaccttttccatgagaccttccctgatatctttagctagaagtaatctcttccttggcacatctgtagcatttatgtactaatacctatagtgttatttacagatttatttgtggttatttatgcacatgtcttagatttcgagcttcagaagagagggaatagcatgccatatcacccagaagcttgtagcttagctattgcctagtaacattattaacagagtaataatgtcagctaacatttgttgtttactataataaatgacgagcacagttctaaatgctttagataattaatgtagtgaagaagtagagtaacttactcagtcacatgctcagttagtgatggcgccaggatttgaacctaagcattcttctgctctttatcactatacagtactgcttgctatgataggtgctcagtgagatttgaatgaacaaatgagcagacaaggctttgaaaaagagggcccatcatctgtggctcaagctcataaggcactttcttttccccttttcaaagctgacatttatcatttatctagccatgtaatgttttcagtgactaagaacaattagctagagttcaggtgggctgtgggagtggtagagatgagtgtgtggggaaatgtgtttagtcactgtgtttattttatttatacactagaacctgctgctatccttgttgaagaaatagtggtgagtccaggctttggagtcaggaaaacctggatgggagtttcagcttcttcatttattagcagtttgggcaagtttcttaacagttgtaaaccgtagttttcttctttgtaaaataatagtaactacttctttagtgtctatgtgaggattaaatcagatgatcatgtaaagcacttagctatagtacctactacatattaagtgcccaacaaatgttacttatgatacaataggttttacttaacataaaattaactcctaatttcttaaaaaaatatgtcttttgaatgtggacctttcgattttagtcagctaaagcattaagtctgttttcttccactccctcaacttcatagtaacatgtctgtttataatatgcagtgagaattgtagtgtacattgcaccatttatacactgcaaacatcatacattagtaacaagtctgtcatgaactgagttaattgtagggtttgttctgaacattttcttgccaggcatggtggcttacgcctgtgatcccagcactatgggaggctgaagtgggaggatcacttaagtgagttcaagaccagggcaacatagcgagacctcacctctacaaacaaacacaattaaaaaaatatattttttcattgttgagctttattttcggtgtttgtaatatgaagacaataggtatctttttatttatcaaataaggtttattaattatgctttttcttttaaatgacagccttgagtcaactttttctgtctttgtgctaagaattacagtagtctcaacgtagagccgaggtgattctgatctaaagatgctccgtgaatgtgcgatatttctttttcttttttttttgagatggagtctcactccgtcgcccaggctggaatgcagtggcacaatctcagctccctgcagcctccgcctcccaggttcaaacaattctcctgcctcagcctcccgagtagctgggattagaggcacacaccaccatgcctggctaatttttgtatttttagtagagatggggtttcaccattttggccaggatggtcttgatctcctgacctcagatgatatgcccgcctccgcctcccaaagtgctgggattacaggcatgagccactgcgcctggccgcatgtgggatatttcgaagaatcttagctttgatgcatctgtggggaagaaatgagtgattattaacaaaggtaaaaggagaggagagtcattgcaaataaagaatcttgtagcggccaggtgcggtggctcacacttgtaatcccaacactttgagaggccgaggaggatcacctgaggtcaggagttcgataccagcctggccaacatggtgaaacctcgtctctactgaaaatacaaaaattagccaggcgtggtggcgggtgcctgtaatcccagctactctggaggctgaggcaggagaatcgcttgaacctgggaggcagaggctgtggtgagccgagattgcaccactgcactccagcctgggagacagagcgagactctgtctcaaaaaaaaaaaaaaagtatcttgtagcagtttattctaggccagagccacagtttgtgttgatttggctagaaattattaaagttggtattctgtgaaattttgtttgagtggttctttgtttggttgagcgggttcagatgaggctgagaaaacaggaagattgtgcttggaagagggggagaaggcttccttaggccaaggcaggtcagtcattctataaggagagtctctatacaggatgtttctgcttttaaaaatatggtctgatatgcaaattcacttatctagtgcaaatgattctggcaaaggtttctactttcttgattcaggaataagacaaaagagttttccaccccatagtacacaacaaaaaagaggcattataaaacttttcagaactactaaagtggtatgattttatgatttcttgttgaattcagcatttgaaaacagaagaaatgtgaaaacagaggaaaggtgcttagcataggaattaacttgtttcttggcaaggaaaccagggtcaggtgtttgaatcacttggctttgtggtggttctgttggtttttgtgtgtgtgtttttcttcttctgctggattatcatctctttttttctgccttggaaactgttgctttatctagggcaatcaccccacttacacaggaggcaaattcaaagctggttgccttatgttgttaaaagctgtcagattcacatcctttgccatatccttcttcaggagtcaggacaatgaagacaggagtctaaacatggggccagagtgagctgccccgtcctcagtactaacacctattcctgacagcttaagttgcttctcagccttagtgaagctttctcagctattctggctcatgatgatcattccctcctttgaactgaaatagcctaattgtctctgagtcatgtggcaattagtcttgttttgctttctgatatctcttgtagttgacttttattgttaatgtatgctgcttgaaggcaagggctgttgtgaatttattatattgctatatattttacagagactcttgatttttccctggtttaccttgggaagttttcctgcctcttaaatggcgagaggatcctttagaagatttcctaactctcagaatcttttagatttttcatgtcatgctgtgtttgctatggccttgaaaaagcagtttttcccttttttgcagcagacacaaccaagattctggataaagaccaggcaacacaattttcctagagtaatacttaccttgagtagtttcttatggggaaaaaagcccccaatattcttaggcttaatttctatgatcaaatattttaaagatagaaacaaatgatatatagtagttaggtatgggggcaggcaaacaagcaaaatgttaagatcttgcatgactaattagtactgtataaaacacatttaaattttgttgtacccattcttacattagaaatgaattgattgattcatatggtattggttttcctttaagggatttatttcttaatgaatcagaggtttcacattgaaaaagaatctgcgtatttttatatactatcccaactttcatctgagttatttcatgtttttcattgccccattggaaaccgtattttgccgaagagtcatttaatatatttttcacactggctttgatttggtgacatgtagcagttctggaagaattaacgatatgttaacacaagttgactgtgatagaataattacaataaatatgcctattttcctttggggagaaaagtctaaaattctgctttatagaagctattctcagctctaaaagagcatatatgtagatcttcatttcttttcttctaacaattttaggggaaaatacaaaccttaagttatttcctgaaatatttcccaggatgattactaccttggattttaaggcttctttcttcacaagttctgactcttctataagcacaatcagaatggtcagaatgctgactctcctttaggtagtcagaatgggtcttccaaacctttgtatgagcccattagctgcctcagctttccctcaactttcaggaaaacacaggttacatattctttacgttactatgagaaactacctacattatttttttttaaattttatttttggctgggcacattggctcacacctgcaatcccaacattttgggaggctgagatgaaaggattgcttgaagccaggagttgcaagacaagcctaggtgacaaagtgagaccttgactataaaaaaaaaaaattaacctttccggcggtgatgacctacccacacgagaacatgcctcttgcaaagggtctccttcatccctctccagaaaaggagaagaggaaacacaagaagaaacgcctggtgcagagccccaattcctgcttcatggatgtgaaatgcccaggatgctataaaatcatcacggtctttagccatgcacaaacggtagttttgtgtgttggctgctccactgtcctctgccagcctacaggaggaaaagcaaggcttacagaaggatgttccttcaggaggaagcagcactaaaagcactctgaatcaagatgagtgggaaaccatctcaataaacacattttggattaaaaaaaaaaattaaaacaattagccgggcatggtggcatgcacctgtagtcccagctactctggaggctaaggtgggaggatcgcttgagcctaggagctcaaggttacagtgagctatgatcacatcactgcattccagcctgggtgacaatagccctataatgtaggtagttacttttatctgcattttacaaatgaaaagaactgacagacattgagttaaaataaccagtacaaaaatcacagatgggggatagccaaagctttaaaatggaatagcaggaagttttaatttgcaaatagaatcattaatgtttaatagaatcattaatagatttaatagaattaatgaattgatagaatcattaattcatacttagtttggagtgattgttgaacacatttctcagctaatttaggtcttcattatattttagaacatattatctgcatcattaaaaaattcctcatttcctcattgcctatctctgccttttattcactcagttttaaaataaacagattttgtttatactgcttcttttattaatatttatggtaagatattttatactgctgataaatggacattaatgatatatagcctattgtttgaaaaaagcattttggattatagcccagaactggaaacaaccaagagataaataaatggtggtatattcatacaataaaatattactcagataaaaaagttcagttcaaaactttcagttttatcattgcattatttgcagttgtaaaacatggtaacatcacaaccttatgttacaaagttattaaaaatattagcaaggtacactgattgctgtagccatgttacaattaagctaaaggaatttcttgttaaccaaaagcaaaaaataagtttggtttttttggatcttaattgactatttataatagaacttgcctttgggtagcgaacagattcacaaatgaaagaggagattctggaacttactgtataattccaggtaactctgtaaagtttgaaatgtaaagaccatgccttaatacaattgataattggaatcgtgctggcatcttcttaacatctcttgcttgtctgtggagcatggcatgattacttatacattactacatttaggaaacagcctttataagacccactttttctgaagtttttggtgttactcttttcttaaccaccagtactgatctcattatgttttggccgacttacttgagggcatgctaaaaagtgatctaaatacttaatttctcccttcaattgtgcatcgtgttttacaaataaaccgtatctttactttcatttacttgcatgtcactgagaaaatttgagatctttagcattcatgtccttgcctgaagtataaggatttcacataatttcagcttttatcattcaagtcttatagatgcttttctcttgtctctgttttcaaataatggtgctaattatatttaaggggcagtatgtttattcaatatagttatagtgttagcagtgtaggatttaacaagcttttcctctggaatgtatactagttcttcatgttctatgtgataacttatacagtgctatggtatttttgttgttagatttaagttttctttgaattttttttctgtccataatcttaggctttctttttgtgcttactgtttttttctcccccagaatgatacatggcagcgattataaatctgttttataaaacttaacttcattaaacatatgaagaacgtgggattatttttcttgtcataaaaggtgacctccagtgacaaatggctattacattatttatgtgagattccttcatttcatatactgttatcaatgtgtttgataatggttgaagaaccagttggtgttggtttctaatactaattaataatttgccttgagcctgatcaatcttcttatatccattatcagatttttttcttcaaatctgaaaatgttttcttttcttttccttttctttttttttcttttcttttctttcttttttttttttttttagacggagtctcgctctttccccccagactggagtgcagtggcgcaatctctgctcactgcaagctccgcctcctggcttcacaccattctcctgcctcagcctcctgagtagctgagactacaggcgcccaccacgacgcctggctaatttttttttgttttgtatttttagtagagacgaggtttcactgagttagccaggatggtcttgatctcttgacctcgtgatccacctgccttggcctcccaaagtgctggaattacaggtgtgagccactgcacccagctattttttctatatttttatgtagttcattgagggtaataattttatcctacaacaaacatgtaagttattgaagaatattggagttttatgataatgctgtcataaatataaaaggtagggtaagagggatccaaatagagctcacttatattgtcactgataggcagtcacgctgtgctgatagaatgtggcctgacacttgatggagtgcagcatatgtatacttgggcaatttgagcagatatatacggtcccgagtttaaagaagagaacaaacaccagtgcacagctatagtattcctaatataggatgcattttaaagaatttcacattctacaaatggagagagatggcaggagaagccttattttaagtcctgcactaaggcaggttaacctcatgggtgtaattacctggacctttttgtaaggacaaaatatttaatcattaaaaggccctctgtagggtttgaaatatctatattttatatatgaatgcttcttttattaatatttatggtaagatattttatactgctgataaacggacattaatgatatatagcctattgtttgaaaaaagcattttggattatagcccaaaactggaaataaccaacagataaataaatggtggtatattcatacaataaaatactactcagataaaaaagatgaacttaatctcataaacattatgggcaacatagtgagaacccatctcttttaaaaaaaaaaaaaaaagaaaaggtgggtgtggtgatgcgtgtcatagtcccagctactcgggaggctgagctaggaggattgcttgagcccgggagtttgaggttgtagtgagctatgatcatgccactggactctagccaggagcctgggcaacagagcaagaccttgtctctaaacaaggcaaaacaaaaacaaaaaaacaaaaatcaattgcatttttatatattagcagtgaacacatggaaatacatgcaataccatttataacagttcaatcaaaagaaatacttgagcatatatctaacaaaacgtatataggacttacttgtatactgaaaactgcaaaatgctgatgaaagaaatcaaagaccaaaatagtgagagatactgtgttcatgattggaagactcaacatagtaaagatgtcagttctcctcaaattaatctacaagtttaatgcaatttttatcaaaagcccaggaagattttttgtagatataggcaagattattatcaattgtgtgtagaaatacaaggaaactagaatagctaaactgaataaaaaaattggaggaatcactctacctgatttcaagacttattgtatagctccagtaatcaagattgtgtaatattggtagaaggatagaccaaagatcaatgaaacagaatagaaaagcaggaataacagaatagagacctatacagatatcctcagtaaatttttaaattgagatataacttacatacctgtaaaattcagtggttttttattatattcacaaagttgtataacattcaccatcatttaattccagaacatgatcatcacttaaaaaataaatgctggcctggtgcggtggctcacgcctgtaatcccagcactttgggaggcctagtgggtggatcacctgaggtcaggcattcgaaaccagcctgaccaacatggtgaaaccccgtctctactaaatatacaaaaaaaaaaaaaaaaaaaaaaaaaaattagccgggtgtggtggtacatgccagtaatcccagctacttgggagggtgaggcagagaatcccttgaacctgtgcagtggaggttgcagtgagccaagatcgcgccattgcactccagcctgggaaacaagagcaaaactctgtctcaaataaataaataaaataaaaataaaataaaataaaataaaatgctgtattcattggccattgcccaactgatttttgataaagatgcagaagcaattcagtgcaggaaggatagccttttaaataaatggtgctggagcaactggacagctataagacaaaaaaaaaaaaaggaaaaaaggaaaaatctgacctaaacttcacaccttataaaaaaattaactgagagtggatcatggacttaaatgtaaaacataaaactaaaaaaaattttagaaaataacaggagaaaatgtttaggatatagagctaggcaaagagttctgagacttgacaccaaaagtatgatctagaaaaggaaaaattggtaagttggacttcataagaactaaaacattttggtctgctaaagaccatgttaaaaggctgaaaaggcaaactacagactgggagaaaatatttttgaaccacatatccaataaagactactgtctagaatatataaataactccaaactcagtattaaaaaaccccaagtaatccaattagaaaacagcaaaagatgttaaggaacatttcactgaagaggatatacagatggcatgtaaccccatgaagagatgttcaacatcattagccgttagggaactgcaaattaaaaccacagtgagatatctcaaaatagagtttaatttttaaaaagcctgggtgcactggcacacacctgtaatcctagtactttgcgaggttgaggtgggaggatcacctgagcctggaaagtcgaggctgcagtgagctgtagtcctgccactgcacaccagcctgggcaacgggaatgagactgtgtcttaaaacaaattgttttaaaggaaaaaataatatcattaaattcagtaaatgcaggaaaaaaggctaaagcagaaaaaaaccacatgtgatctcaataactgtatataacttccagtaacattttgttgtattttatacatttttttgccctctgcatttttatattatatagttaactgaatatgcagttgtgtcttgcttttttcacaatactcaatatcatgagtatttttatcacttaaaattatccatgaatatagattttaaatggctcataatctttgttgtatggatgtacagtaatttatttaaccattcctttcatatgtttaaagtagttccattttgttgctattgcaaataatgctgtgagaaacatttttgtatgtaaacttctgtcaggatttctgattccttccttacaatacattcttagaggtagaattactgtgtcacgacgtgggcatcttagaggcctttgttaactatacattgccaaaatactttgcagaaatatagtttcgatttatgccccttttatattcttacatttctcctttctctaggaaaataaatgttcatgttactcaccttcactcaaggtttccaaacactttttcttggctctcctcctacaactctgttctcagctttccaaaattgtttctctttactccttagatatctgggtttccttaggttctgtgctctccctcttctctctatgtatattcttctttgagctaatcagaaccagccccttgccttcaactacagtttacatcataatgactcctaaatcccatatctctgctgagttttgggaaccagttctaacaccatactagatatttttaccttatgctacatagccatcacaaatgtaactcccttatccaaaactgaactcattatccaaccacactaacttcatctccactgatggcagtatgacccatccagtggtagaagccagaagtttgggagttagcctagatttctccttgaattttgtgtaccactggtcaatcattacattttaagattctgcttccaaaatagctctctaatttgttacctcccctttccactgccttaatttaggccctcatattttttgtactgctgcattggtgtcttaactgatacgcccatttctgacctagttccatccctcagtttcatccttcacattaaaaccattttgtcttttaatttttaattttatttttgagacagggtctggctctgttgctcaggctagagtgcagtggtgcaatcttggctcactgcagcctctgcctcctgggttcaattcatccttccacctcagcctcctaagtagctgggactataggtgcttgccaccatgcccagctaattttttgtagatccagggtttcaccatgttgcccaggctagtctcaaactcctgagctcaagtgatccacctgcatctgccttccaaagtgctgggataggctgggcacagtgggtcacacctgtaatcccagcactttgggagaccgaggttggcggatcacttgaggtcaagagttcgagaccagcctggccagcatggtgaaaccttgtctccactaaaaataccaaaattagccgggcgtagtggcgggtgcctgtaatttcagctactcgggaggctgaggcgggaaaatcacttgaacccaggaggtggaagttgcagagagccgagatcacaccactgtgacaaagcaagattcaatctcaaaaacaaaatatacaaaatgctgggattacaggtatgagccaccatgcctggcccagtttgtcattttaatgcatgcatgtcagcatgtttctcaccgtcactgtcttctgtctcctgtaaaataaagcctgttctctgtagcatggcacccatgagcctggtcttgatttccttcctccaggctactttcatgatttatccctggccatgcctgatatggctcccagtcatgctgagctagtttcctcaacatattagaattgtttttcaggcctttatgcttttgctcatgttttttttttccttgacatgcttctttcttctatccatttgccagatttctttcacatcctaagattcaggtaacatcataacctcctatggaaagcaagccctctataggaattgttaagggcttccttgtctgtgttcccactgtgccatgtacctacttctttctgccacctcctacattggtgtacttttgttgttgttgttaagctgtccctattatactagattgtaacacatgctttctaccgcctagagcaggaactgtgtactcttaattgtttcctgagggcttgagattagcatctggcatgtagtaggtgtttaataaatatttcttgagtagatgaagatatgagtgaatgaatgaagggtttcatgctgaaaaatgaaaaaagggtttaactttaagaaaaaagtcacagattttggagtcataggaattgagtttgagtcctaccgtcatttcttagtgttgatataattttaagcaggttgtttccctcctctgatctttagttcttttgcaaaagggaggtggtagtagtagtagtaatactattaacagtagtagtagtaataataaaagtgcttttaaaataaatattctgcaaattttagttaatattgttaacagtaataaaaagcatcttctatatgtaggctgcacatgcataatgcattgtcttgaacgaagtgagaggagaattacttaaaactttgggtagacgtactcatcaattacaagatcaatttacttggttttgctataatttggttgccattgttgacccattgctttattgtcccattgtctcatcacttgctcagacgctgaagatgggtcagggggagtcagttttagaaaacagccttccctgggccgggcacagtggctcacgtctgtaatcccagcacttttggaggctgaggcaggtggatcacctgaggtcaggagttcaggaccagcctggccaacatggtgaaaccccatctctactaaaaaaaaatacaaaagttagctgggcatggtggcgggcgcgtgtaatcccagctactcgggaggctgagacaggaggattgcttgaacctggaaggtggaggtggcagtgagccgagattgcaccattgcactccatccagcctgggcgacaagagtgaaattccatctcaaacaaacaaacaaacaaacaaacagatataaaaaaaagaaaaaaaaagaaaacagccttccctgaaagttgtttgtgatgcttatggtctaggatgtgaaatttacaggatgatgaaacatgcagatattaatagtgttccatattatttttgaatgtggtttgacttttctaacgatcagcagtgacaaacttgtgtactaccagtcaaccctgttttccatgttttctctacagagatgtatagttagagcagagatgactaatgtgttttcaagaaatgctactataacctttaagtctgatgggtagattgagcatttaaagctgttgctttttcatcgcatctggatgactgtatgttcctaccaaatgaatcactttatgaatatgcatgagcttataaacacaactttttagaaaaaattcttgtgttctgaaacaaaattacgttggtagtattttccaagttttccgtaagaagtagctttgcattagccctagaaattccttgaataatatgtttttacccccttacttgtattacatttaatgacatctctggctttattttctccattcttttttccatggagtttcttaatttcactgtttttgccttgccctttagacgggtgaaacaatgatgactcattttagattgatgaaagggacagcttagcagctggagagctggtagacactagagcactaaattgccagcaccagccttctcttcattgtccacgtaaggcttgtggcagaggtatgcccattcagtcatttattaatatgtaatttgtaggttagatgacttcatcaaattatatttacatctgacctggaggttcaaccatgttttgctttgggacatttttaattgttaaaaatcatagttgggttctgatcaatatgtacatgctgaagttcttatttagccacattatgggcttttttggttttcttcagcatgtcaatagtacacagcagctcagaatggtcaaaattgtttcattagtgccttaacaaccattcatgatatatcatattgtagaatgcaagtatagtcacgcactgcttagcgatggggatacattctgagaaatgcatcattaggtgattgtttccttgtgggaacatcataagagtgtacttacacagacctagatggtatagcctactacccacctagggctatgtggtatggtctgttgctcctaggctacaaacctatacagcattttcctaactcaatattgtaggcagttgtgacccaacggttaagtatttgtgtatctaaacacagctaaacaggaaaggtgcagtataaatacagcgttatcatcttacaggacctctgttggtatatggtgcacgactgtatatcctttatctacatttcccccttttggcttggatagaccatcaattccttgggtttacatttatttcatgtaatcttaaaggattttgttttatgcatggcaccattttttttcaatacaaatggttagtataaaacccaaatttgagaatttgataacaatggcttagtattgaacacaagtgttacataaagttgtggaaaaagccttagagaggtagtcaggggatttgagttccaggtctgactgtgcacttgactcaccacgtcatcttggttaataatcacctaacaataaaaataataaccttaatttatataatgctctgcagtctgcagagcacttttaaagaaagtataggctgggtgtggtggatcacatctgtaatcccagcattttgggaggctgagacaggtggatcacttgagtgattaggagttcaagaccagcctggacaacatggtgaaactctgtttctaccaaaaacacaaaaaagtagctgggtgtggtgaaacatgcctgtggtctcagctactccagaggcttgagcctgggaggcagaagttgcagtgagctgagattgtgccattgcactctagcctgggtgacagaacgagatcttgtctcaaaaaaaaaaaattgtattgggcatagatatgattattcacattttgtgatgaggaaactaaaattcaaagactttaagagatttgctcaaggtcacataccggtaagggctagaactagcattgatttttatcactttcctttcagtcataccatgctgtctctcattttacttttatgggtatcagttatgaaataagggggttggaccggatcagtgatttttttcaagctacatttacagagagtcttaggattcttttgagtggcctccaggtttgcttgtggaatgaagattgaaatatagggaaaggtgcttagctttgcaccagagtatccacactgagtgaggtagtagttgctcattgacagttgagaaactactgcatgttattaccgatggatgagtttgtgtccctttagtatgactggacaaaaagaaagtggaaagacatctgatataaacttttgaggttttgtttttgttttttaaagaatggggtagaattccatagctacttaaagcttgcaaactactgcattagatgatttttttttttttaaggtagggtctcactctgtcactcaggctagagtgcagtggcgctgatctcagctctctgcaacctccgcttcctgggttcaagtgatcctcccacctcagcctgctaagtagctgggactacaggcacatgccaccacgcctgggtaatttttgtatattttggtagagttggggttttgccatgttgcccaggctggtcttgaactcctgagctcaagcaaacaaactgccttggcctcccgaagtgctgggattacaggtgtgagctaccatgcccagccagatggtttttaaggaatttttcagcctgtgagtttgtaaaatattgcaaccttaactttggtggtgttacctgatgaatccctgatgactttacagctgttgcaggcttacatcagtttagagttatggggcattattgaagccctgtttatcttccaagatagtctttattcttctttgctaaggtggctatttttagtaatctttagggaaaagaggcacaatggcagaaatgagcatgtgttattattagtatatttatgcagccaatattggtaatgctttttttttttttttttaaagactgtgtaggagtgaaaggggagttttcctttccgcctttgaggttagctgaaaatcaactgacaaaagtcagattaataggagaaaaggcataaacatttttattaacatgtatggaggaaaatcacagagagattgcccacaacccagtggggtacagatgcttatgtacccttgtttttagaggaagggagatggggaggtatggatgattttacagggctagtaaatgatttttaaagttattcagtgggcttggagaatatacagtggtctgggacaaagttttttgggcctacagagcagatagtggtttgtgacaaaagtctgtccaggcccgggtgtggtggctcatgcctgtaattccagcactttgggaggctaacgcaggtgaatcacttgaggccaggagttcaagaccagcctggccaacatagcaagaccccgtctctactaaaaatacaaaaaattagttatgccacggtggcgcacatctgtaatcccagctacttgagaggctgaagtgggagaatcacttgaaccctagaggcggaggttgcagtgaggtgagattgcgccactgcactccagcctgggtgacacagagagaccctgtgtcaaaaaaaagataaaagttactcccaagcactggcatagtgcagtgtgcaatatatatatatatatatatatatttttttttttttgtttgtttgtttgtttgtttgtttgtttttaagaatattagctgggcatagtggcacatgactatagtcccatctaccagggaggttgagactagaggatcacttgagcccagtaggtcaagggtgcagtgagctgtgattgtgattccagcttgagcgacagagtgagtccctgtctaaaaaaaaaaaaaaaaatcatcaggtgtattgacatacttcagtctctcttcctgcaatattagttcagttaatgaaaactcggggaagggacagagataactattttcttctttggcaggtccagatttaggcagataagggaacttcagagaacaacttctccctgtgctttgggggtggtgaggggatggtcagagaggccttgaggattgtacagttcagcatgtcaaagtgccatattttgaggtatcggtttctgggcctcaacaactgctaataagaatgattgactttggagttgccttggagttatttcaaaaagtgaaaatgttattgtttagcccacactagttatcttagttgtcatttgtgttttctacaatctgccaatggttaaacctggcatttctatcaagaaggaactctttttgcttccagagtaaaggtatttttattatattaacccttgaaatagatccagttatgtattcactttgcgtttgtttctgaacaaaataaacctgtgtggtaagatggaagtgggtttttcacttacaatattagttacttacatttgtaccttttttttttttttaacttcttcacatttcctcccttgccctccacaatctgataagcatctcattgatgactatgagagactaatttaggccgtgtggttataaatgagatttcaattcatttcttcttctcttaacccgtctcagaggagatatcacagggtgactttctatgttgcgttttgacacaaggacagtttgtttttgctttggctgatggatggggcagctctagttgatgaatgtggtttatatgctcacaggcagatgaaagtgtccactctgccctgagaccctctcctttctgcttagtggtgttatgaaagccccatgggtatttgatttttcaagaattaatcagtacacagaagttgaaatgtagaccaaaggaaagaatatgttttttcagttaggctttttgtctttttttaattatatggggtttaccctttgtgtttcccaactcaggggtttcactattaaataattgtctttgactcttaaactttttaggtaaaatttatataccaggaaatgcatagatattaaatatacagtttaatgagatttgatgaattattataaccaccaccttaatcaatagagaaaatctctatatcccagatagttcccttgtgcctctttccagtcaatctctagacacatttacttgtataataaaaagattttgacatacccaactacaaaatgatcagatctttgtttctgtagcaatgggtagaataaaataaagtaggatttacttaaaactaatattttctttgtaggcaggcctgttgttacaggtagaaggtgctcaaaagctggtttcttaactaatttatggattatttttattttttatttgttattttgttatttttaggtttttttttttttttttttttttttttttttttgtagagacagaggctcactgtgctatccagggtggtctcaaacacgttggctgaaatgatcttcctgcctcggcctcccaaagtgttgggtgtgagccactgtgcccagatttattttattttattctgtttttttagagatgacgtcttgttacgttgcccagacaggactcgagttcctaggggattctcctgcttcagcctcctgagtagctgggactataggtgcacaccatggtgcctagcttaattaatggagtttttgataatggttgacaaagatagtggtaagcaaagcagcccttatatagactttacatcttaaaacataatcccctatgtgtgaaattgagaacagctttctagaataataaacagagatctgtatgctaactaaaaggcagagagaatattggctcagccaggccctcacttttttgttcctccctatctgtaaaacatcatttacctcatcagcgtgctacggacatgggttaatgtttggaaaattctgtggaaagagtggggttctgacaatgtgctctgaccaaggcagtttagcaaatttgtactaagtggctgacctttgataagcaccactccttccccacctgacctgtgattccatttttcttttgtgcaaatagttctgaaggtttaatgtttattttttactacgatgcagtagactttcttctctcgtgtagaaactgctcgaatgactgtggatgactcctagaatataggaataacagaattggtttctcctgtactctcaacacaaaatacttctgtgaccaaatgtgtgggagtgtgtccccacacaccaagcagtcaaccagttctgcagcagctgccagctggtgtcctctaatgcagttcagttcagttcagttctgacactgtctacctggagatagcgtcagatctcacagattgagggctcagtcccacaagtctgtccccagtcttcagtgccagtcacaggctccaggtggttttacctgtgcttctgacctgctggctataaactggtttcccaatatccccttattgggttccatgaaattgttagagtggctcacagaactcaggaaacatactgaccagttcattagaaaggatgttttaaaggacacaagtgaacagccagatgaagagatacccagggcaaagcctggaagagtactgaacgcaggagcttccatcccggtagagctggggtgcctcaccctcccagcaagtggatgtgttcctcttcactctcctggatgcccccttttaggtttttatggaggcttcattaggtaagcatgattgattaagtcattggccattggttatcagtgcaaccttcagcccctctcctttccctggaggttgagggtggggttttgagttctaactgtatgagcacagggttgattcccctggcaattggccaccagtcctgtggttatctagggactttgcaaaaatcatctcattaacataagctcaggtgtggttgaaaggggcttgttataaatagcaaaagactgtcttttgcttttatcactctggagctgttcaggaaccagtggcaagaggccgaatacagtattttaaccaaagtcacttaggaaattacaagggttatataggagctttaagccaggaaccatggagatatatgtatgtgtatatatatatgcacatatacacatacaaatatcaccgcgacccatgatgctcttctcaagggcctgtgccttctgataaacggctgagttggctgttacacttactttttcgagcaaatgaatgtgtagtttcatctggctcattcgtcaaaccccgggtttggaaggttgtatgtttttatttagctagtagcagttgatgtggttgaggtggggcttttctttggggaaggtacagctttgaatggctgttatctttcaagtacaaatagtgtagctccttatggctcaatagtatcaataaactgttttatttgctttccttttctcttcctttttttctttttttttaaacggagtctctctctgttgaccaatctgaagtacagtggtgtatctaaactcactgaaacctccgcctcctggattcacggtgaaatcccgtctgtactaaaaaatacaaaaattagccgggcgtggtggcacgcgcctgtagtcccagctactcaggaggctgaggcaggagaatcacgtgaacccgggaggcagaggttgcagtgagtcaagatcacgccactgcatcccagcctgggaaacagcgagactctgtctcaaaaaaaaaaaagaaggggttgactgccaagtttaaatattggcaggagatgaggagatttcagtttttatggagctttgttaatgagccgtgactgtttattacaagacttttacttttaaaatttacttagtaattatttactcataaaacagctacttactgtaaccagtaggtcagttctactcttgaggcttcacatttcttcatttgtaaaattagtacttgtattggtgtccattccctttctgaaattctgtgatatatacatttcctttaaaatgttacaattgaaaaaaataaagttacaataaagaccgtgtgcggtggctcaccctgtaatcctggcactttgggaggctgaggtgggtggattgcctgagctcaggagttcgagaccagcctgggcaacacggtgaaaccttgtctccactaaaatatgaaaaattagccaggtgtggcggtgtgcacctgtagtcccagctacttgggaggctgaggcaggagaattgctagaacccgggaggtggaggttgcagtgagctgagatcatgccactgcactccagcctgggccacagagtaagactctgtctctaagggaaaaaaaaaagttacaataaaagccaggtgcagtggctcaccctgtaatcccagcactttgggaggccaaggcgggtggatcacctaaggtcaggagttcaagaccagcctggccagcatggtgaaaccccttctctactaaaaatacaaaaattagccgggcatggtggcaggcgcctgtaattccagctactcaggaggctgaggcaggagaatcacttgaacacaggaggtggaggtttcagtgagttgagatgcactactgtactccagactgggtgacggagtgaaactgtttcaaaaaaaaaaaataaataaaataaaataaaaacaatgatacaataattcagtcttgtttagagttgccattttctgagtgttctggccatagcatttcttcttcttgcctccttcccagcaacatttgcccacttgctgtggactgcagttaattaggctggtttggagctctttccttcctgttccatttgtgttacacctaaagcatctcatgaagatgatttagattagttcctgccatcaaagataatccagtttaggatgaagtcaacagtattttaagggtggagttctcttttggaactgtcatttggtcagaattagtgaatgctgttgtagagctgacccctgcacaacacaggtttgagctgcgttttttctttttaaaacaatccacttatatgtggatttgttttcatcccaatgctgatcaaaacagtggtatctgcaggatgtgaaacctgtctgtacagagggccaactttttgtatatgcaggttcctcgggggactgcaggacttgagtgtgtgtgtaatttggtgtactcaggggtccttcctggaaccagtcccccagtataccgagggacaactgtgttgagatatcagctgcgggtttccccccaagctgttactcaattttcacattatctggggtttcctctgttctcatattacccccgaagattttataccaatttagggacatcgtgttttccaaatcctaaatgaaaagcaggatatgaagtgttcgtattttcatgttctatggtatttcctctcatgctcgatttatttatatctaaaatcatgtcatgtaatagtatattaataatgctatacatttggtactttgccattcataaagtgtttttacaaatattgtttaatttgaacctcatgataagctatctagacaggtattttctcagacagatgaggaaactgagatttatagagattaatttgttcaattccaagtagctaattgaaatccatacgacctttctcatttataggatttgtagatcctacctcctttaggtgcaaaggagttgtataaccagttttttttctactagaatgatgacctaatcaggagtaaatgacttttacttcatgtgtgacttcttcatactcacaggtactttgattctttcaatgtgtgttacaccaatttgatagtatcttgccttaaaaaaacatttgttttattgaatgtttactatgtactaggcctgtgcttagcactttcaaaaacctttttgttttgaaagaaaagaggtatactgaaaagtgtataataaaatacacagcttaatgagctgttataaatactcctatatacaacacacagatcaagaaatagaacatttttagcatgcctaggagccagctttttgtgtgctgtgtccaatcaacatgctaactttttgatattcacttctttttcttcttcttatttattattatttttttagagacagaatcttgctctgtcaccctggagtgcagtggcatgattatggcttactgcagccttggcctcctggcctgaagtgattctcccacctcagccttccaagtagctgggactataggcacgtgccattgcactcagctaattctttgcttttctttattgatttacttcctaaacaagcatctttaaacaatatagtttgcctagtttttagcgttatataattggcattacacaatatgtattctgttgtatcagcttcttacatcctgttttatatttttctctattatgtgtagcagtagtttgttctttttcattgctgtatagtattccactgcatgaatatgccactatttcttcattctattgttggtggacatttgtgggtgttttcctgtttggggatactatgaatttgcagctgagaacatttcctcaccctcccagctttattgacgtacagttaacaaaatttgtgtatattcaaggtatacgccatgatgtcttgatagatatatacattatgcagtgattaccataacctaactaattaacataaagaacattattttattttttaaattaaaacaattttttcggagacagggtcttgctgttttgctcaggctggtcttgaactcctggtgtcagattatcctgctgcctcagcctcccaattagctgggattacagtcatgaaccactgtgcttagctcaagaactttcttatgtgtttattctggcacatctcagcacatatttgtgttggggatatacccaaaaatagataggtcatgggattccttccttccttccttccttccttccttccttccttccttccttccttccctccctccctctctccctccctctccttccctccctccctccctccctccttccttccttcctttttttttcgcagagtctctctctgtcgcccaggctagagtgcagtggcgtgatcgcggctcactgcaagggccgcctcctgggttcgagcgattctcctgcctcagcctcctgagtagctgggattacaggcatacaccattacactaggctaatttttgtattttttgtaaagacggggtttcattacattggccaggcttgccttgaactcctggcctcaagtgatctatctgccttggcctcccaaagtgttgggattacagatgtgaaccatgatgcctagccaggatttctttatcttcagtttattagctactgcccaacttttttcttttttaaaagccagtcaaatttagcaatggggggttgtataccaactttagtgacactaaagttaataagttctgataacccactaccataggaccagcctgtcaaacatttttctaaagtggttgtaggctgggcacggtggctcacgcttgtaatcccagcactttgggaggctgaggtgggcggatcacctgaggtcaggagttcgagaccagcctggccaacatggtgaaaccccgtttctactaaaagtacaaaattagctgggcatggtggcacatgcctgtaattagtttgggaggctgaggcaggagaatcacttgaacccaggaggcggaggttgcagtgagctgagattgtgccattgtactccagcctgggcaataagagtgaaacaacgtctcaaaaaaaaaaaaattagctggacatggggttgtatgtctgtaatcccagctactccagaggctgaggcaggagaattgcttgaacccaggaggtggaggttgcagtgagccaagatcgtgccactgtactccagcctgggtgacagagcgagactctgtctccaaaaataaaaaataaaaataaataaataaagtggttatagcagtttaaggtactcaccagcagtataggtgagttcccatttcttcagatcttctctaacacttgctgttgtcaacttctaaatttaaaattttaaaatttaaataattaaattaaaaattcctaatgtagtaggaatatagtggtatctcattgtggttttagtttgcatttctctggttaacaataggagcaccttttcatgagtttattagctgtgatattcaagtcttttgcacatttttcttttgggttatttgtcttttattgacttgtggtagttcttaaaaaaattttttttaaattaaaaacttttgtgtattttggagacagggccttgctcttttgcccaggctggagtgcagtggcgtgatcacagcttgctacagcctcaacttcctgggctcaagtgatcctcctgcctcagcctcctgagtagctgggactaaaggtgcacactatcgtgatcggctaattttcatatttttagtagaaacagggtcttgccatgttgcccaggctggtctcaaactcctaggctcaagccattcacctgcctcggcctcctaaagtgagagattccaggtgtgaactacccacttaaaaatcgttttaatttaaaaaataaaatgaaaagaatgttcttcatgttaattggttaggttatggtaatcattgcataatgtatacatctatcaaaacatcatggtgtatgccttgaatatatacaaatcttatttgttaataaattgttgaggaaatacctggccggtagttccctctatattttggagatgagccccccttttttttattgtacttgttacagatatcttttttcccctctgtagcttgtcttttccctgttagttgtgtcttttgataaataaattcttaattttaatgttgtaatgaaatttaatctttttttctgtatgattagtgctttctgtgagttatgacataaagtcataaagataatctctaatattatcttctaaaagttttattgctttgcctttcacatttagatttcttaagggctaaaattattagataactaggtattagttgattatatgtaattagtaaacaaatatttattgtgacttcagctatgtagaagagtcagtggtagatactaagagatgtaagacttggttcctgccctaaaataatcaacattctgtttgtgtaagtaaggcccttggcatcagcacgatgtaatagaaagaacactgactggactgggcctggtggctgatgcctgtaatcccagcattttgggaggctgaggtgggaggatcacttgagcccaggaggttgaggctgcagtgagccgtgagtacaacactgcactccagactgggtgacagagcaagaccatcctgtctcaaaaaaaaaaaaaaaaaaaaaagaaaagaaaaaaagaaataaaacacacacacacacacacacacacacacacacacaccctccccccccccccctcagaatctggagacttatatccatgtccttttggggacctggctgtgacaccacctttgtgattttagaaatctcctttccttctctgggtctcagttttatcagtaaaataagggattggcttaagtatgtagttcttgattttggttcctcagattgataaggggtctgagtagatagcactggaagcattttttttttaaagctaaaagtatacatttttagccatggtgatgccacacaggttaaccaaaaaataaaatatctttgcttttaactggagtcgtgtgtcctttctgtgtgagaactgagtttaacagctttgatttacaataaaagttttaacttagtttttcaaaaaaatacacttcgtttattgataatcccagtttggtatacaaagtttttttatgtttttttgaaatggagtttcactcttgacgcccaggctagagtgcagtggcacaggcttggctcactgcaacccctgcctcctgggttcaagtgggtcccagcctatctaggattataggcgtgtggcaccatgccctggtgattttttgtacttttagtggagacgaggtttcaccatgttggccaggctggtctcgagctcctgacctcaggtgatttgcccactttggcctcccaaagtggtgggattacaggcgtgagccactgtgcctgaccttatacaaagttttaaataacatggccttctgactttaacttagaaaccaaagagtggtaggagtagggggaaggtattaaataacagaaactatctttggtgattaaaaagttgggtacctactattctaataacttttaagggctcttctgtaggttagtgtaaaagtaattgtggtttttgccattaaaagtaatggcaaatggcgggcgcttgtagtcccagctactcgggaggctgaggcaggataatggtgtgaacccgggaggcagagcttgcagtgagccgagatcacgccgctgcactccagcctgggcaacagagcgagactctgtctcaaaaaaaaaaaaaaaaaaaagcagtaatggcaaaaaaaaaaaccctaagaatttcaatatattatgagtcagtgaaaatatagtatttgttgttttgtttccctaagtgcccaattgagagatctggacaattactattatagagattgtgaggatggacagagaaccttttgttgactgaggtagtcaaagaaggaaggctaccagggtgagctaggattgagcagtgagaaggattgtttctatgtatggagaaaaatgggaaagagggaattgtggacagagcagtgtaagcaaggatacggaaatagcaaagtacaggtcatttttagggacagaagatgaatcagtttagcattagaagatgatgaaaaagtagtctgaagttaaagtatggaaagccttcttcaaacataaggtcaaatacagctttggaaaagttaacagttacaagtatgatggtgtaatgaagattctagttcttctgtaagccaagcaggggccattggctttaggatgccctctatgctccaatataatggtgctgcctggcatcattgaaaacattaaaaaaacttttctaaaaagtatttgaggactgggcatggtggctcatgcctataatcccaacactttggaaggctgagatgagagaattgcttgagtccgggaattcgagaccagcctgcaacatagggagaccctgcctctacaaagaaataaaaataattagccaggtgtgggggtacatgcgtgtagtcccagctacttgggaggctgggaggatcacttgagcttgggagatgaaggctgcagtgagctgtgatcatgtcattgcactccagtcagtgatagagtgagatcctgtttctgaaaataaaaagtgtttaggggataaccagattgggcttgtattgatagccagaccgccaagcaggaaactttatgtatttattttttaagagttggagtctctttctctctattgcgtaggctggagtgccacagtcgttgggactacaggtactgccaccatgcctaattaaaaaaaattaaaagatggggtcttgctgtgttgtccaggctggtcttgaactcctggtctcaagcagtccttctgcctcagctccccaagctcccaagggagtataggcgtgagtcaccatgcctggccagaaaccttattttgtggtagttgttcagctataccttgcagaattttttatgtgaatcctcagtaaatcccaaacagcttctctcagtactaacacatggctgataaatggtactgaattctttgtaaatctcaccaatctcaacagaatttctggttcggggtaaaaaaaaaaatttccgtttaatttctgtagaaaataaccactcagaatccactctctgttatgtgtaacaatggacagaaattttactgttgttggtacaaaacaatgactcatcccaaatcatctcttggaattaagaatgtaatcgtaatacactcatactcatatgtacgtgctcagacagtccctttctgcctttctttttattaccccttctcactccgctgtggtttagcttgactaatctatttgcagcacatcagcatccttaatgcagaaagtttgcagcttctgtttacagggggaaaaaaaaaggagtgtggagattgcagatttcatctcttttttcttcttttaaaatttataatttccttttttcaggaggagggtgattattttcgtttttgtttgagacagggtctcacgctgtcccccaggctgtagtgcagtggcgcaatcttggctcactgcaacctctgcctcccatgctcaagcgatcctcccacgtcagcctcctgagtagctgggactacaggcatgcgccatcacacccagctgatttttgtagcttttggagagacaggatctgtccatgttggccaggctggtctcgaacttcagagctccagtgacccagccacctcggccttccaaagtgctgggattacaggtatgagccaccgtgcctggcctacattttgtctctgacatttctcaatctaaagtatatgtatatgtacatttatacatatgttatttacatatatttttttctttaaaaaattattttttggtggactgagtcgctttaattaagactcagtcattttaatgaagtggggttatttactttgaccttcctccccaggaaatagcacttaaatacttaaaggaaaaattaaagaggaccaaggccatggtggcagggactgggagcatggtggccatacagcctgataagccagcagagaagagtcccacagtaaactgacacaaccctggtgatgtaggtggtttaggcacagaaaaaaggaaagtcagatttgagtaccctcagcaggccttgtactggtcacccccaatacccatgagaacacagcatcctagtcctccctggcttatcggtgctctccacatgggggatacctgtcacagcttttattccaggactggggaagtcacacttttctgcccaccccacccattgttttgcagagaagaatctctaaaaccttcattactcatgctgaaagtgctataggtatttggaatgggagaatgggaaagagtaaattctgaatgcattggagccttaatttgctgccctttctttccttccctctctcatcttcatgaaggagggcccattgtgaataaggaagaggggaagcctgtctgggagaggctttttgggtactgggcttcccaggaagaagccacttcccaccgtccccttgatgatcatgtgacccttttctccatgcagccagaatcagcttctttggggatgaactggtaatagatgttgtcgttagtgttatttttaaatttttagatatttttttccagatgcatcttcaaaatgtaggctttggaggttgataaggttttgtgggattggtaagtgttaatctagaagttgggcagtaaacaagaatagtaccttatcagcattaaaacaaagcatctgaaagaaatgtttttgaggagtagttgaatatttagttggttaaaaatttagactcagaaaattttcaggaaggtgataaagattcactaatcattaagtagggaatctcttaaaggttttatattgatttgatacattagagaatgctataataatagtgtactttgattggtggcctataaagtaattgtgccttttatggtatttatgaattggttatattttaaacaataaatcttgacttttgcgtcagagtttctctgttttgttttttgtttttttttttgagacctgctttgtcacccaggctggagtgcagcagtgctgtcattgctaactgcagcctcaacctcctgggctcaagtgatactcctgcatcagcttcctgagtagctgagagcacaggtgcgtgccaccattcccagtgcctcactttaggctaagtttttcattttttgtagagacagggtcttgctttgttgcccaggctggtctcgaactcctgggctcaagcaatcttccctccttggcctcccaaagtgctgggattacaggcatgagctatcatgcctggccctgcatcatagatttttttttttttttttttgagacagtgtctcactctgtcgcccaggctggagtgcagtggtacaatctcgctcactgcaacctctgcctcctgggttcaagtgatctcctgcctcagccccccaagtagctgggattacaggcgcacaccactacacctggctgatttttgtacttttagtagagatggggtttcgccatgttggtcaggctggtcttgatctcctgacttcaggtgatccacctgcctcggcctcccaaagtgctggaattagaggtgtgagccaccgcacctggctacatcatagtttcttaaaatcaccaactgttatctatgttttcctattttaattagtctaatttttaataatttatttctgggttagtttctgtacttttggtagaattgcagactcacaacaggcttcaggaaagtaattttaccaaatgcaaggctatttgcaatttagttttctgattcagaagccataactctgtgctggatttgattattcattatttaaccaaacatttttcaaatgccttccttattttctgtcttaactgcgtagaattaagcccatttccaaaaggattttgaggtaattctggagtttgagattaatatttttaaaaagaaaccagagttcattttctgcagagaaagcttttaatcaaatatacatatagtaccctgtgtccttaattgaattgagggtttgacttttctccatgcagaattcgagttgatatttttgtagtttaggagttttgacttttctcttttgcctttatgttaacaaacttgtgagtttgcaaggttataatagaaagagtatatagggtttggagtcaggaagtcctaggttcaaattttagcttaatgagcaagttacttaatttttccaagccacaggttccccagctatgaaatggaataatattacccatctattggggttcttgtggggattaaatcagatgaaagtgcttagcatagcatataaatgttagtttattttcctttggcaattatttaggctttagggcaaaattgcctacttgttttggaatgaacccaaattttatggttaattttaggctttttcttcagttagacttttgatatgtctaactccttcccaattttttttttttttttttttttttttttttgagatggagtctctctctgttgcccaggctgaagtgccatggtgcgatctcagtttactgcagcttctgctacccgggttcaagcgattctcctgcctcagcctcctgagtagctgggattacatcactatgcccagctaatttttgtatttttagtagagatggggtttcaccatgttggccaggctggtctcgaactcctgacctcaggtgatctactcgcctcagcctcccaaagtgttgggattacaggcatgagccagcacacctgggtggcagtgcattttttaatgaggaagattgaacaacttgacagaagggtgagctcatattctgaactcttacagttcatctaatgtcaaatttctagaaaaaaattatctaaatctaaaagttagtatgacactccataacattaattgtgagtccctgagggggcagctataaagataaaatggagtataggatcccccaacacacataacacaaacgcttgtgattgagtgtgcattggcacatgtacacctgtgtgctcacccctcctctcccttccttcacctctatcatgagtacaggtgtgttgctttgaattggtgaggagtgggaaagagagtccttttggtgacaagaaagcaaactggttttatttagttcaccaaaatattgttttgatccttttttgtttgtttgtttgttttgagacagagtcttgctctctcacccaggctggagtgcagtggcgtgatcttcgctcactgcaacctctgcctcccaggttcaagcgattgtctcacatcagcctcccaagtagctgggattacaggtgctcaccacccagcccggataatttttatatttttagtagagacagggtttcactgtgttggccaggctggtctcaatctcctgacgtcaggtgatctacctgcctcggcctcccgaagtgctgagattacaggcgtgagccactgtgcccagccgatccttttattttcaatataaaactgttgctgtaagcacgagcatgtccaaagggaacaccatgggatagtagtgaattgagggtgataatccagttttgaggcttaagtctgcaattcctggattaatttggctgctctgttattggtggctttgctaggatcattttcaaatcactttattttcctttatggtaagtgtattaatagtatttaataacaagattaatctgggccaagggctttcctgtgaaagttactattttcattatgggagaaaaatagagcagcatggccagtgtgcatttttgttatcccatccttaggtaagtgagtttagacagcctgagctaaatacctagatttgcaaaaacacctcctacccccatgctttccttttaccatttaaaattgtttgtgaagatcttttttttctttctttctttcttttttttttaaacacagagatagggtctcactgtgttgtttgtttgggtttgcaactcctaggctaaagggttcctcccgcctctgcctcccaaagtgctgggaatacaggtgtgagccgcagtgtgcagcagcttaagtttctgatctccctcaccacctcgcactttcactcctcataccccttccttgtttaatagaaggatcctttgttttgagtagtctccaagtggagtattttggagagactttgaataaatcctggcccaagcctgatcacaacacttggacattgagcttacctgcattctgctgttgggtagatatggaatctctgcccctcttgatcaaagctacatagcccataaggaaacatccattgagcagccttctttcctttcacttaatcaatttcaatgtattgtggtagaggtctttgtgatattccattttagactatatgatctttaggaatgcttaaccctgctgtgccaaagaccaggggaaggctgtgtattcaaactcatttgttctctgcttttttctttttaattattagtagttaactctaaatgaaagtatagaactgtttagtttgagcaaggaacactatttgttggcctctgctttctgttccccttccttcccttccctccctttactgtggcatcatgattcttccttcctgtattcttggtcattctcccagcacctcactttagccctacagtggagattcttctgttcactaataactgcagtggtgtcagtttcagtagatcagccttcgtcttcctttgcttgaatggagtgtttaacatgctggatatcctgcctctttctgctgaagcatctttcctggggtcattttgacttgctgcttatataactattatgtcctttgggtttgtgatactttatattatcaaaagcagcaaaagatagtaatagaagtaagatttttattactctcattctatgaatcagatgttattatcccattttagagataagtaaattaagagagtggttatacctgaagttccagagttattaaatgacatgactggattcaaacccaagagagcctgacttcaaaatctgtgcattgatctctactgagtctgaaggttactgacccagtgaaccagtcactgttctgtttctaagaaacgtttaggttctggctcttgcagggatctttatagtcctgtatttgcaaaaacacctcccacctccatgctttccttttaccatttaaaaatgtttgtgaagatcttttttatctttttttttttttttttttttttttctgagacggggtctcgctctgtcaccaggctagagtgcagtggtgcgatctcggctcactgcagccttcacctcctgggttggccaggctggtctcgaactcctgacctcaggtgatctgcccgcctcagcctcccaaagtgctgggattacaggtgtgagccaccatgcccagcccacattttgtttttatattctgagtattatatagtaaaaaaggagaagagttcattgatacagtcttttaaaaactgatctcaatgatatagtaggaaaaacactggattaggagataggggttttaagttctaatcctgcctggctgtgcccttaactagctgtatgagactaggcaacatttaccatttccttcccaattaaattgaggtagccgtactagatttatctaacatgcctttcattgctcacatcatgcgacattaagctttaattagaaagctttggttttgggacctctttgttttcccataggctttaaccttgtttcctttcttattgcccagcaggaattggactagagttggccaaaggtgggatgaggagaagaggtaggaatcttacaagagttggttggagtaaagttattgacaggtgggaagaagtattcctgtgactctgtggttgttcccttgtaagatttgaaggaaagtaatgagtcaggtcttaataatagtgcctctatgttatttcctccaccccattatcttttgtcagaattgattagcaaaatgcacttacccaagtattttcagggtccctgtttggatagtctaaataacgttgttctttttttttgttttggagacagggtctcactttgtcacccaggctggagtgcagtggcacaatcttggcttactgcagcctcgaccttctgggctcaagcaatcctcccacctcatcctcctgagtagctgggaccacaggtgtgcaccatcacgcctggctaattttttgtattttttgtagagatggggtttcaccatgttgcccaggctggtctcaaactcctgggctcaagcgatctgcccacctcggcctcgcaacatgctgggattacaggtgtgagccactgctccctgcctttagttacctttatcaacctatggtcctaaaggtagattcattgaacttgcctgtcagtgcttaaggatcagtcctgtcttagttcagacaagttaaattcagggttgcattctgtcaactttgtttctaatcagtggatgatcagatgatatttggagaggatttttaatatatgtgaatcttatggtggcattctgttacttaataaatactttaatttcttagcttttttccccatattctccataatttttgtagatagatgctcagacgaaggcagcagtagcacatggataatcagagttttttgtttgtttgttttaacatttctcgttaaagtataatgttcagcaatggggaccaatctatactcctcatctgtagtctgtcaataaataggttgctccgactttaaattctcagcttgaattgtttcttttttgtgtgtggaatttatgaccctctgtgatgttgaccctacctaaagcaagtagaatagctacaccagcaaaatgaaataccataacaacaacgtatgcttatgtttatatagtgcttactgtgtgcctggcatggcattgaataaatatatatatttaataaatagagttggggtctcgctttgttgcctaccttgtgttgaactcctggcctcaagtgatccttctgcctccgccccgtcaaagtgctaggattacaggcatgagccactgctcccagccagcattgaatatatttttttttttatttcatcctgagaacaaccttatgaggtactttcaggtcatacttttattaccctcattttatactagaaaaattgtgctttaagatgttaagcaaattgcccaaagtgcaaaaccagtgtgttggagcttgaattccaaaccagatctgcctgagtcaagcttttcttttatgttcttatttactaaaggcttcttgaacagaagtatgtgagagttgggcacatgcagcttggtcaattctatgtaaacccggtcagattctgagtagtgtagatctgataaagtcaatgtgaatttcttatcattcgttgcaagagacttaatgtagcaaaaatcagtatcataggaaacgagatgttactgtggtaggcacactgttctctctcagctacctcatttttgttgttattggtggtggctattgctctggcaactacaaaggcagcatttacttgacacggcgtgtatgcttaaggcagaacactgactgcttttcattgctggcaaatccggacttcatcagtactggctacctgtaaggaatgtgagcatgttggattttagaacaggaaaaacacaacttccacctcatttcacagtagagttcacttagggatacagactttttggtgacagtaactgttactttctgcttattaattcagatacttgcataatgctaacctggtagatattgtcagatgacaagccttcctcctacatgttctctataaaagaactgctagtgacaagcattttattatattaaaaattctacttcatactgttttaagttaaaatgtatttattatgaagccaatattgtgaaatgtttttttctttttccagaatgtggtttttttttcttgtaatggactaagatgcaggcttattgtgtagaatgaggagctattgcccagatggaccttagtgaaagtaacttaaataagcaagtagattttgcttctgtttgggaaaatgatctaagacggatgctggtattttgggcaggtggagactaatgttttatctcaatgtttgcaacttaagttcagcctacttaagggctgtcccttaagggtgtccaattgtttggcttccctggccacactggaagaattgtgttgggccacatataaaaatacactaacactaacaatagctgatgagctaaaaaaaaaaaattgcaaaaaagtgtgataatgttttaagaaagtttatgaatttgtgttgggccacattcaaagccgtcctgggacgcatgtagcccacaggctgggttggacaagcttggtctagaagttttctagattttactacaatgttcaaatggcaaactttaaaagtggggaaaggaattttgggtgagataaaaagacaggtttgaaaaagcatacaagttcagggaactgcaaatggtttcttaagaccaaagcgcaatgtcagtgtgaagaagtggcaggcaatgggaaaggataaatcagtggagcccagacaatgaaggagctttgtacttgatgctgaggagtgtggatttgtttctgcagataatggggaacttctgatttttctttttttaggtggacagatagaatcaagtttgcttttgttaattcatgtgacaatgtagaaggtggactgaaggtagggagagtattgtattcattggagactcattaattgttagaagactattgtaatcattcaagcaagaaataatgacctaggccaggtacagtggttcatgcctgtaattttagcactttgggaggccgaggtgggagaatcgtttgaggcctggaggcagggtcttgctctgttgcccgggctggagttcagtggtgtgatcatggctcactgcagcctccaattcctgggcttgtgattctcttgtctcagcctcccaagtagctgggactatagacgtgagccactgtgcccagctcaaattactttattttaaattttttttttttgagatggaatcttgctgtgttgcccaggctggagtgcagtggggcgatctcagctcactgcaacctccacctcctgggttcaagtgattctcctgcctcaacctcccaagtagctgggaatataggtgcacaccgccatgcctggctaatttttgtagttttagtagagatggggtttcaccatatttgtcaggctggtcttgaactcctgacctcaggtgatgcacctgccttggcctcccaaagtgttgggattacaggcgtgagccactgcacctggcctcagattactttttatacattgaaagatgacctagaaattagtcaagacattaatttagatagtcatacagtcaagtgacataaacctcagagaagaggaaggtttccgtgctatcgccccacccactagagtggaagaactttgagggagatagaatagtgatattataatctagttcctatagataaagaatgtttgccaagaaggttaacttctgtagctgagctcctttgctgagaagatgaaggaacactgtttaatggatagatttagtctgtgattctctgtggaggtgattactgtcagttctctttatcctagcagcatttggaaaactgcagctaagcaacccgtcgtcatttcctaatgttactataatctggtgtcaatgactaatgatctcattgggctagttattcccttccagcgatgctggcatcaggaagcacattaatagtctgtaagaaatgcattcattaaaaaccaggtaatcactttggagctggtcctggcagtgtctgaataaattggacaagttagagaaaatcttgaacctgaaagctactttgtctttcagcttggtttgggcaaggtaggaagagatgaatcagttataatttgatgggatctaatgttacttttataagatacatcactttaatatgatgcttcatcattaatgttttagtaatctgacagcattagacagaattgatattccccttattttattatttcttggcttcatgacagaactgtgcattaaaaggcacttaagattttaaaagggatatctaagaaagtggttaaaaaacaaacaaatcccaagtggcttgatctgacttacaaactctaacaatgtgtagctaattgcagatagattttattattcacagtattgtgtcaagtctcctgtgcacatcttctgtattggagcataagtaatggagatgttatcttgcccaacattaggtttgaggaagtcgtttttaagacagaaatagtagaacagtgttattccatactgtactttccccttttatataagcttgctaaaattaaggttgggcaataggcccttgagctaaatgtgacctgatagaaagttttagcaacaatgaaaaaaattataactatctaatatacatatctaatattagatatttaccttacttacatatcatgcacaatcaaacaaatggcaattataactacattcttttttacttgccataatggaaaaactttattaaacaaattatgcccactgttgctctgggatttggggactaggtaggcatgatttcaatggaaaataatttagtaatggtatgtctcaataatgtatcaacaacctggaaagtatatattctttgacttaggattttcatttctaagaatttgtcttatagaaataatagtaggtcaaaacaagaatgtagtcataagagtatttactgcaatgttgtttagaagagggagaaaacaaatgaaaatgggctgggtgcagtggctcacgcctgtaatcccagcactttggaaggctgaggtgggtagaccacttgaggccaggagtttgagaccagcctggtgaaaccccatctctactgaaaaaacaaaaaagaaaagaaaagaaaagaaaacaaaatgccacaaaaaacaaagagatgaaaatgaaaagagatctcacaagacatatgaatatgttgcacttcaaactgatgcaaacaggtgtccatctaaattcaatagtgggcagttagaatttgaaacttagttgtcattgatgattgccctgtgctcagaggaatcacagattaaaaaaattttttttagaaagaattgaagttgagtttcagaaaagtcagacatttaagtttacaaccgtagttggagtgcaaacacatatatgtcttaattacaaaatgtctgttctgttagtacaacttagcataaagaagagatggacctacaagtgaagtatatcaactgataagaaacaaaatgctttaaaactttggattcaaacctatgattccagaactgttctaacattttaaacaatatggtcaaactctaggcaagtttggttcccttgtgtttgtgaaactatatttttcatacatcttctgaagtaaaaactaaacactctcattagttgtttaaatctggaattggatttggaatttgccttgattttatatacctttgttcttgaggctacctgtatttgtcagttttatcttaacttactcaaaatgggtcacttagtaaaaataattgtctaactatacacttttagtttgattaagctttttggattagtttgggattttgactaagtttctatatttgtatgatcaataatttcatacttatagtaaacaaaaatttatatatctgtactcctatagatttatgattctgtggctctaaaaatttcagtgctcttagagttgtggaaagagcagagcactagattaaatgaaacctctgtgtgccaggccctagctgggctttctcgaggcattagagtgataaagttggttgaggaaatggtgaaagccatacctttgtcctgccattttttttctttatgagatcatggttgaagtccctgactctcatgatagtgaaattgagattttaaatatttgtttctctttacatcccaaatccattatagctaagaggaggaatttcagatatttttccaagagcggttgtcaattttttttttttttttttttttaagacggagtcttgttctttcgcccatgctggagtgcaatggcatgatctcagctcactgcagccttcgcctccagggttcaagtgattctcctgcctcagcctcctgagtagctgggactacaggcgtgcgccaccatgcctggctaattttttgtatttttagtagagacggggtttcaccatgttagtcaggctggtttcaaactcctgaccttgtgatctgcctgcctcagcctcccaaagttgtcagtattttacttacttttctttccttgcatattggaatagcttttttttttttttaaattatcatatacactacctgtggaggtaaaaacataaactgttgttttcttggaggctgaggcaggaggatcacttgagcccaacagtttgagaccagcctgggtaacatagcaagaccctgtctttataaaaataaaaagaattactgggtggtgtgcacctgtagtcctagctacttgggaggctgagtcaggaggattgcttgagcccaggaatttaaagctgcaatgagctatgattatggcactgcactgcagtctgggtgacaaagtgagaccccatctctaagaataaaataaaatggaattaacattcactgtcaacaaaggcactcttgtgccgtttttgtccccttcttgactgtcctggtcgtatgagatctgtttttcctctaaattcattgtatactattttctttacattgtacatttggccatctctgggaaaatgttaagaatgttaatgttctcattttagtatactgatatctcacttttcagaatatcaccttcctaatctttttctttagtcattttatccagttgtacttatgtaagctaccataaactttttctgaatcaaagcaaaatataaattaataaatgtttgcttctttaatagtgtatattttattccttttatcaaatttttaagtcagtaagtactgtgatttaagaactttttatcctataatactgaataaagtgttttgatatagaatacggtacatagatgtagatatgcatttagtgccttgcatatttgttgaatgaatgattactacacatatgagctaagtcagctgtttggggtcttctttttgcctgcatctgattggcttgtcaagcagactgactgcccacctgttagacccatatgggctggctgagtatatagctagtgttttgctcagcacacctgcttgtgcgcatggattgatgtctgctcttaaactagttgccaaggagtcaagtgtatggcaaggtgaaggaagactggcagtgaagatatcttaaagaggtaatctaataataatggccagtggttcccctgaatcttgtttgctcaagttgttcacatcagagagatgtaaaattgctttcatttgggtggatttgggaattcttttttgataatgggaaaaaatgagaaggtcctctatgatattgttgtggatggatgtgcatatggtcagagaacatgaacctgttaaattttgagcttgaatacttttcattaacaacttaattgagaatagctagatagcatctattgtttattctttttataacaagtagagaaatagagaaatgtcttttttttttttttttttttttttttttgagagagagtctccctctggcgcccaggctggagtgtagtggcgcgatcttggctcacagcaacctccgcctcccgagttcaagcgattcctatgcctcagcctcttgagtagctgggattacaggtgcccgtcaccacacccagctaattttcatatttctagtagagatggggtttcatgatgttggccaggctggtcttgaattcctggccttaggtgatccacccgccttgggctccccaagtgttgggattacaggcgtgagccaccgtgcccggcctgagaactgtcatatttttaatcctgttgggtctcccccttctcctgtcactgtatttgagcaagtttatataaattattgatatttttctggccacaaaagtgcagctatatttaagataatatttttttattttcaccctcttgacataatcaagccataacatgaaatggagatttattatttattgtttattgaataaaattttgttccttcttctattttttttggagacagaatctcattctgtcacccaggctggagtgcagtggcacaatctcggctcattgcaacctttgtctcccaggttcaagcgattctcatgcctcagcctcccgaatagctgggattataggcacacaccaccacacctggctaatttttgtatttttagtagagacagggttttgccatgttggccaggcaggtctcgaactcctggcctaaaatgatctgcctgccttggcctcccaaagtgctgggattataggcatgaaccactgcacccagccagaattttgttcctttttaataattaattaattaattaattaagatgaagtctcactatgttgtccaggctagccttgaactccttgggctcaaatgattctcccatctcagccttctaagtatttgggactacaggcaggttctaccacacctgacttgttccttattttagatgttgaaaataagcaagtgaaataaaggcttatcaaagtgtacacagcactttgctagatactgtggatgatttttcagggaagatgccattcctcccctgaagaagataattattgtagagttagagctaacagacaaaatagatgatatataaatttattcttaggagccaggttgttgagaggattaagagcaatcactagacgattagaatattggggacttccaaaacatctgaagtgtatctagaatagtagataagatctgcacaggtaggaagtagggtgagccgggtgtggcggctcatacctgtaatcccagcactttgggagggttgaggtgggtggatgccttgagcgcaggagtttgggaccagcctgggcaacatagtgaaaccttgtctctacaaaaatacaaaaattagctgggtgtgatggtgcacacctgtagtcctagctactcgggaggctgaggcgggaggatctcctgagcctgggaggtggaggttgcaatgagccaagatcacgccactgcactccagcctgggtgacagagtgagaccctgtctttttttttttttttttgagacggagtcttgctctgtcgcctaggctggagtgcaatggtgcgatcttggctcactgcaacctccacctcctgggttcaagcgattctcctgcctcagcctcctgagtagctgggattacgggcatgcgccatcatgcccagctaatttttgtatttttgtagagacaaggtttcactatgttgcccaggctggtctcaaactcctgacctcaggtgacatacctacctcagcctcccaagtgctgggattacaggcgtgagccaccatgcccggcctgagactctgtcttaaagaaaaaaagaaaaaaaaaggagtgaaagtagaggtgagaagtgcctggaaaacgggacttttaaactgagcttgctgcagaggtggacacaaaaatttggggctgttttgtttgaggaatgaagaatagcaggacaaaaacagattgttttggggttggtattaataattgtataggtagcgtggggaaaacttttagagagccttaaaagctgaacccgtatgttttagtttggtgtgagtaaacgtagattcctggtgctctgtaacaggagtgtttgtcgcagtttagtccgacagtgatggcttatagtacatatgattgtggtcaagatgaggagattaattagctaatcccaaagggatttcgtgatcatttattgaatccttaccaccaagcactttttgtcatgaatcattatttcatctaaacctggcaactgccctgtgagtttgatattgttataatcctcaccgtaacaagtgagaatgctgatacccagcaagggcaagcacctttcttagggtcacaaaacgaggaaggagtagagcagtcagtgtggctccaggaaccagaatcttaaccactatgctctaaagtgtttttcagagaaaggaagattaacattctttccttcgatgtatttttttccttgctaattccctatctccttacctacaatgtggcttagtgatcttaggacaaaggtttggcttggagacttcaaagaggtttgtccatttcagactcttcaaaaacagttactggttacttacaaataacactttgtaattcaataactgaaaaatcaaaacaactttaaatagattttaaggctggagaagggaggctagctaatttcataaatttgttgaagtttgattttctttaccctagttgtatcataaataggaatggttttttatatttatacttgtttaaatatactgtttatacctgtttaaatgctaagccaacaaaagctctctgaaagaatacatgcacacaaacacatgtctgtttcgtcacggatgtgtaactcactcatggttgctcctcctgatgtctgtgtgccacacagttcggaaaaggcacttgcttggctgtcacgctgtaagttccctttgtcatttgtgacaattggtctctttgctgtacatcttttgggatgaaggattgagctcttgtaaaagcatttcagaggtttttcagctaatgatttttccgctcattctttactgtttggtttcctaggcaacccatcctccccttgcaccctgctgacgtctgttcagcccctcttcctctccactacccctcccattactcaagttgttttttcattgctgctttaggattgcactaaaggaatatacatgttttcctaaatatctgctcctctatactttttagaatatattagaaggatgggaagaaaaaaaatcatttttagaagctaagtaacctgtatttttaggtcagttataacagggtttcatccatataaggctaaatttattctgttgtttctaggttggttttcttttttaaagttaaacaataataaagaaattgttgtccatttaaaccaggaattccataattaagctattttaggaatgtaaggtgttgtataggaaaaaacagtctgaaaatggtgggcatagttgcgtttctagatggttatgctgtgatttatttttttaaaaaatcagttgtgtctgttaaaagcatttctgttactgtggggaggggtttttaaagttttaaaaatctagcttttgggtgagtgcagtggctcatgccagtaatcccaccactttgggaggctgatgtgggaggatcacctcaggccaggagtttgagacccatctgggcaacatagtgagactctgtttattaaaataaaaataaaagtagaaataaaataaaataaaaatctgtttagttgttgttcacatttggtcctttagagatacttttttgagacagaatctcactctgtcacccaggctggagagcagtggcatgatcacggctcactgcagcctctatctcctggacttaagtgaccctcccacctcagcctcccaaatagctgggactacaggtgcatggcactatgtctggctaatttttaaatttttctgtagagatgaggtccctccatgttgcctaggctggtcttgaacttttgggctcaagagtcctcctgccttggctccccgaggtgctgggattattatagtcatgagctactgctcctgacctagtgataactttttgaattccaattccttgatcctttagcatcctaggcaaagacaaccatttctgctgggtaaagcacagtgaaaagccctgcttctctgtatacaaatgaaacagattgtacaattaatatgtattgggtgctgcatggtccatcctaacagtagtgctaattgccatatcatttatttttacatttggaagtattttactttggcctcaatgtaattttgtttttttaatgctgtagagtgtatgggatataggtaaggagtggataagaaaggaaacaatagaatcagaaatagtaagaattgctatataaatgcctttccctgtaaatgcacacaaatatatgaggtgtttttttttgggggggggggtcttgctctgttgcccaggctggagtgcattggtaggatcttagctcactgcagcctccacctcctgggttcaagcaattctcttgcctcagcctcctgagtagctgggattataggcgcccaccaccacgcctggctaattttttgtatttttagtaaaaatgaggtttcaccatgttggccaagctggtctcgaactcctgacctcaagtgttctgcccgctttggcctccgaaagtgctgagattccaggtatgagccaccatgcccggccacgagttttttgtatgtatgtctaaatacgtagaaagacaagatttacccccttttttggtgtctgtaataaatttagtgatatacgtgtatgggtgtatatgtatatagatatgtatgctatgagttagaaatgaaaaacctgccataaaagcaagaggaaggaggagttaattttgcctgaagatgtcagagaaggctgcattgaaaaaatttgccatagacctggtgataggagattgaatgggccttactagctgtgtatagtggtttgtaccaaaaagtatggggataggaggggaaagtggctgggaatattggaaaatctagttgaaagataggttgaaggccgattgtgaaatagtttcacttactttatcatttaagtaataggttggttagaccttttagatcagatcagtattttgagagtatctctaatagtatagaattatttgtacttcttgactgaaactatatgttaaataatgaatttgtaacttagttattagagtgttcaaattatacctgtttctctcccttccctcaatttttagaaagcattctctaatgaggcaggggtttttgtttgttttgagacagcgccttgctctattgcccatactggagcgcagtggcatgatctcgactcactgcaaccttcgcctcccgggttcaagtgattctcatgcctcagcctcccttgtaggtgagattacgggcgtgtgccaccatgcctggttaatttttgtatttttgatagagacggggttttgccatgttggccagctggtctcaaactcctggccaccttggatccgcccaccttggcctcccaaagtgctggggttacaggcatgagccaccatgaccagccaaggcaggttacttttatattggttaaaagagtgcctgatattaaatccttagtctcccactaaccagctctctctctgaccttggatgagccttaaactttggtttaattcatttgtaaaacaagcataataatgcctacctgaaagaactgttgtgaggatttgattgaacgggataatatgtaaagcacagctcttgacacactgtaaatgtagctgaaaaatagtagtgattattttgtggtaacagctttcattgtagaagaaaattaatggaatgtgaaggattaatgattttgggaggtggaggggaggagaccttgttaagtagattaattaggaagttattggtttgtccaaacagtgcttttaggtgacaagggaattcagtgtggaagaggaggtttggtaggagaagaaaatataatcagtttagttgtagatgggttgagtttaaggtacccaaggacacaaaggtaatactgtggaggtggctgttggaaatacgaagcctggaggtacgaatgtggaagttattgctgtctggttggagatacttgtgtctgggaagagtgatcgagtgagtagtggcctattaatgttttctttttttaaaaaatttactttcaatatactgccaataaagtaatttgcactgttatactaaggtattagaccacgtattctgagttcagatttgttgcttgactcgttaatgtatgtaggttatacccagttttggtaagcctcctgacctttggccccattcacagcattatctctatctctcaaagggaaaaagaagttcattctttgaactggggagtgctctgatgttggcaggtctactcctcctcaggtctagacactcttggcctccacagtggttttattcaggaaagttctcacctttgaattgtagacttagtgcagacttgctggtagttggctaggcgggatcacaacagtgattggtattggtaagtacatgtattgctgccaagaagttgcatagttcatgtgttcagtcatagccttttctttatatgacgaccccgctgaaatacagaatggcctgctgccttctcacagaaggtctactgttccaagcttatttttttctgagtgagaagaaaaggtcttttgccactgttttcagactgaaatttaaatttcagctgccttggatcctatataataaaagattgagacacagaaattgttctattagacttgaaatttcaattgcttttacttcccagtttgtagtagtgtttgaacctaaaatcctatgtgtgtttttagttaccttttcaagttaaactttcagaaactatctgcttaacttaaaaatttactcttgttaattgcccaaccacatcttacttcatgtgtcaaaatctgcctgatatttttaatttggaagtccacagtagtgggaagtcataggaactcccagtcagggtattcacagtaactactcacagtaataggaactcacagtcaagtctaatttttcattttaatttttccaatcccttctttacttctagtatactaattgaaaaaaaaaaacttgggttgcctttagtttcaatttataatttttattaggattttactgatactgtatctttttggtactggaggtctcagaggactgacctggttctacttgtttgctcttgggatttagaacgatagtttctattgtgttgagccagcaacattttgcttattttcaagaggcagagtggcagagtactaaattgcaaggttgtgcagaccttaaataagtgtatggtgagctataaagttacaatgttaaattagtttctggctggcccacattgtttccaaagttgactttgcattttaaaagaccttactgatttaaaaagcgaatagagaactgcttggaaacacatatcatctgagagacattcgaacatgcggggaaaaaaaaaagtggaaggaaaggtgctgctggctgggcatcatagactagaaagctgcatttaaagtttaaactgcttgggtaagacatgttttcctggtttatcctcatgtttttttccatctgtgttctcttgccattattaccaccaaatacaggagaatactcctttacttattgtagtcttatttgggagacagactagagtgtggattatgtagggacagaaagggagacttgagggtttttttttgttttgttttgttttttcttccagtatttaggttcattgatgtacagggcatatgttgtcttcttttagatttttcagtgaagttttgtactcctctccataaaactctcacacatttatatttatacatatatatgtaatatatatattatttatttattgagaaagagtcttgctttgttacctaggctggagtgcagtggcatgatcatggctcactgaaggctcaaccccaaagactcaagcaatccttccacctcagcctcccaagtagctgggaccacaggtgcacattaatatgcttggctaattttttaatttttaaattattattattgtagagatggggtcttgctgtgttgcctaggctggtctcaaactcctgagctcaagcaattcacctgcctcggcatcccaaagtgctgggattataggtgtgagcaccactggctgggccaatgttttttctcttataatgtttcttctgatactttgtggctattctgaatgtgttcttttaaaaattatcattagaaagttacttcatttttctttttttctttttttttgagtcagagtctcgctctgttgcccgggctggagtgcagtggcgccatctcggctcactgcaagctccgcctcccgggttcacgccattctcctgccttagcctccctagtagctgggactacaggcgcctgccaccgtgccggctaattttttgtagttttagtagagacggggtttcatggtgttagccaggatggtctcaatctccttgtgatccacctgccttggcctcccaaagtgctgagattacaggcgttactgcatttttctgcaccaggatctctttattttgtacttaggctttgcttgctccctctttgctttagtttcatcatctgtgaaacaaaggggttaggttagaataagaaatttccaaagatctttctacttctcacagtacgtggtgctgtgtcgaggtaacgtcctttacatacctcatgaagttagtgctagttgtaccatccaaaccacacataagttctgtgaatacaaccaaacagctttgttcacatgtatttgcatgtgtttcaacttaccgtgttctctgcataatgattcttcaacagtttgaggtaaagagtgaatatttcagtttaaaaatacagtcaaaagtatagtttcttattctggtggacgtggtttactactacctcctccccctgtgttttagtttgttgctgtgctagttttattgcatattttctctcctaaaaatagatggtctttatctaaagcgtagtttttataaatatttgcatctcaagtaaattttttcctaccacatggatttcatgtggtgagttccatgaaagcaggttgtgttaagagggcattctcctagtacctgtttattcttttccatacctctgccccaaggatcttgtttactgatgtcagaatactggcagtttgagtagtactcttgaagagttatttttgtatttatttctgctggattgaaggaggtagatgttgtactcattatctctcagaacatctattcaatcctaacccccaaaatataccttagaaacaggctctctgtgtttttttttttttttttaatcttttatgaagacatacaatacacacatttctcttagatgctggccaggaatttgtttgaacaaattgaaatggcaagttttaaccctaatttgaatagagttccagaaaatgaagttagggcagaggttggtgaggggtcatattggagtgtcactgagctagtaccaatttgtttgtttgttttgtggtaaaatgcacataatataaaacttagcattgtaaccatttttaagtgtacggttcactagtgttaagtacacttgtatagttgtgcaatcaatctccaggactcttttcatcttgcaaaactgaaactctgtacccattaagtaacaactcctcatttccccttccctccagcctctggcaccaccattctgctttctgtttctatgagtttgagccagtatttgtttagctttttcatttttgtcttgagaacttgaccttctttatgacagctaaatggatgttgaacatgaagaggagagtaatccagtaaaactggtagccactcttcatgatccatgagtgttggtagttgccaaccccgaaattagagtatcagtcagtcttctgtaatgcagtttggaaattgctattccttgtgtttgaggatgatgacaatagctagtgactaacacttacttggtacttattacatgcctgaggttagaggaaagacctgcttctgggaagaaagagtaaaggaaagattgggtgcatgacaatgtatagatacataaaggaagttcttgtctgttttctctgttaagctcaaagctaagtcatctgttgaaagttagggggctcaggttggttaggaggtttaaataaagtgacagatgtttgcaattaccaggaaatgggatagagactcatcagggaaagtagaataatactaacagtattagtggtaataataacaacaacaagaacagctaataatgactagttatctgttctatgccagctacattttatgttgtaatctttatagcaaccttattaaagtagttgttattacaggtaagagactaagttgcagagttaggatgccagtgtcactctgctgccccaagcccaggtgttctttcctttttctgcactgttaatggcattgggagtgtctgcctgacactacaaaccagaagtttagagtataatttttagaaattgttcttcagagaaaggaggaagagtgggctgaagtaaacgctatatgtctaaaatatcacaattatgttgacttttttttgccaccagaatgattgatgcccttgatgggtcatttcactaaataaagtgagttaccacagcccagtagaaacccagatctggttgtgtgaccttaatagaggtatctgaaattataaattgattttcttccaatagcccgcatctgaaataactggattgaggttcatgtcagtaaattcttcaatttctatgtagggaaaaatgaggacctttttgtttgtaattattctatttattgaacagttattagttgtacttctaatctgtactagaagactatattacaaagtgtttattttccctaaacaatggcttctcttgattcgtgttcattattgccctaaataaattgaaatttagaaaaagaaaaacccagttttcttagtatcatacatgcaagcttaagttttcttatttgtttgtttttatttgacatacatgaaggttatttccaaagatacaaatggaggccaaaacagtttgacataaagcagaccaaaacagattgaattatactgtacctctacactgactagcattttgatgtctagatggataagtaagcatagtgctaatttacaagcgcaaactcaactagtaagattaactaatttctaggctgtaatgaatttatataaatattcttgttattcagatgggaaacctcataactgtgctgtagattagacttgcattgcctaaaactggagaatgtaactttttttgtttttttgacaaacccacagccagcatcatagagaatgtaactttgcctcccaaatctgtgtatgtcagatcacttataattggagctgcacagttccctcttctaggtttgactctttaaacttggtaacatctcattaggctaaatgaattctccatgccctattgtctgtcttgctatgttgcctaacactttgattttaacattaggaaaacaactaccaataaacatgagataaaacacaaaatagatgaataccactagcttggtaatataaaccattatataacagggatttgctgcagactcttttcacacatagaaaacttttccaaaagacatttttgaagtttcgctatgaagaaagtttgccagtgactgaaagaaccttttgtaggtccctatttgggagtgcggtaactggtgcttctggactctatacacagagatccaaggctaggaaaatatctcagggtaaagctatctaagttttgtatccaaaagctattaatttcttcagttatgagaagaaaccacaaattgcgtaatggccttggtattttgttggtatggagagaaggatgatctcagaagacttgtaggcctgtcttggggtgtctgtggtgtgtgtgtgtgttgctttttttccaacttataaaaaaactcaacaatcaatcttagccacgtttttgaaaccgtagatattctaagttagcaaatccaaatcagtacacgaaacaaccatttttgccagcaccaaatgcatactttgctgagctttcgtatctgggctccagagtttattcatagcaaattctgacatctgctaagttctattatgacccagaggggagcgaagtgaagtaggatgaagaatctggaaacgcatgctgcttatagggtaaattgcattgaggaatttgcatccatgtagcctttccccttatggaccactgtgacgtttagtaggctgagctaaaaggtcatattgctcaagatgaataacaataaatggtttgttcagtgacttgttaagcctactgccagtgcctactaatagccaaaatagctatttctcttctgggatatatgagtttggctgtcatctttttgggaatatggtaatttgtagccatcactttcagtgtggtggggagatctaacatttaaaagttcttatcccagtggtttacagatcccttttcccccacaaaccgctgctgcttcttttgaaccttgaatgctaccatggtttaattttttttttttttttttttttgagtcagggtcttgctctgtcacccaggctggagtgcagtggcatgatcatgactcactgcagccccagccgcctggactcaagtgctcctcctgcctcagccacccaagtagctgggactacaggcgtgtgccaccacacctggctaatttttagatgggatttcgcatgttgcccaggctggtcaagcagttctcccaccttggcctcccaaagtgctgggattacaggtgtgagccctcatgcccggccttcctttgctttgcttttcttcagttgtggttcagttctagaccatgtttacagtagatacaggggcacagctcccaatagtgtttaaaacatgtgaagtatcggggcagaagttagcacctctaataagtttaaattccctcggatttgctttataggaagtatgttaagaacattttccagagcattttcattcaactgatatattttacatagctgccttattaaaatacagatgtattcttgaaattattgaccaatttttttttttgagatagtcttgctgtgtcgcccaggctggagtgcagtggcacaatctcggctcactgcaacttctgcctcctgggttcaagcgattctcttgcctcagtttcccgagtagctgggattacaggcgccctccaacatgcctggctaatttttgtatttttagtagagatgggtttggcatgttgtccaggcttgtctcgaactcctgacctcaagtgatccatccacctcagccttccaaagtgctgggattacaggtgtgagctaccatgcctggccgatcaatttttttttttttttttgagacagagtctcgctctgtcgcccaggctggtgtgcagtggccgaatcttggctcactgcaagctccgcctcccgggtttatgccattctcctgcctcagcctcccgagtagctgggactacaggtgcctgccaccacgcccggctaattttttatatttcaatttttaagaaatgaaataagatgaatgatgagtaattcctttttcagtaatatagtagattagatattcagagaaatcccctcgggtcagaaattttttttttttttttttttttttttgagacggagtctcgtaccgtcacccaggctggagtgcagtggtgtgatctgagctcactgccacctccgcctcctgggttcaagcgattatcctgcttcaacctcctgagtaactgggactacaggtgtgtgccaccatgctcagctaatttttgcatttttaatagagatggttttcaccatgttggccttgatgtcttgaccttgtgatctgcccgcctcaacctcccaaagtgctgggattacaggtgtgagccagctggaacatttttaaatgaggctaggaaaggtaaaaatgtatgagcacatataatatacatataacgttctggaactagtgtaagaaaaataattgaggccgggcatagtggcgcacgcctgtaatcccagcactttgggaagccgaggtgggcaaatcacgaggtcaggagttcaagaccagcctggccaacatggtgaaaccctgtctccactaaaaatacaaacaattagctgggcgtagtggtaggcgcctgtaatcccagctactcgggaggctgaggcaggaggattgcttgaacccaggaggtggaggttgcagtgaactgagattgccccactgcactccagcccgggtgacagagtgagactccgtctgaaaaaaaaaaaaaagcatcatttcataaggcagaggaagccctgaaggtggtggtggttctgagggtttcttgtaggattagaggaaagtggagggacaagagacaagtagtacctaagcatagtggaaggtcctactggagactgtcccagatggaactgggaccctggagggtgcaagtcttcagtgcatgagtagaaaaaagatgtccaagatgtcctgcatgcagagacttgcctcttactgtcttggatctggttggagaggggaaagaagcctcccatgtgattgcctaagcagacgcccatactcaaagatttgcagtcagattttatactacctgtgaggactgaaaatctctaaactgaaaacttagttgaaagtattcctatttggttatggttcccagtgtctgggagaatcaaattcatatctcttttaaattaattaattaattttagagacagggtcttgctatgttgcccaggctagtgttgaactcctaggctcaagcagtcctcctgccccggcctcccaaagtgctgggattataggcatgagctaccacgcctggcgaaaacacactttctagtcaggccttaaagacttttaatagaggaagttgcaagaaatgtgagtttgcgtaagaaaataagcaactatgagttggttattttgagtcagatggggcagattctattttccagatatggaaacagtatttcctgactcctgctcttctagaacctcactattgtactatcaagaagtagaatctttttctgttgaagctgggcagtcctttgtgactgctttgaccaaaagaatatgacagaagtgatattatttcatttctgaggctaagtcataaaaataccacacatttctttattctcttgggatgctcattcttggaacccatcagcatactctgaagaagcccatggagagatccatgtggaaaggaactgaggtctcaggccagtggcaccagctataggcttccagctgatggtcagtactgacttgccatctttttaagtaagcgatcctgcaagtggatccttcagttctctatcaagctgccctgggtgatgccatgtggagcagaggcaagctcttctctctaagccctgaacagattactaatttgtgagcaaaataagtaattattgttattttgatccactaaattttggagtggtttgatatgcatcgattgacaggtaactaaacatcggtggtaaccatcagtcttataaagcctacagatgtttaaagaaataaaggaggaggttaaaaatatgatgaggagactcttaaaactgatgaggaaaatatggaagaagaactcagtctctgtagaacttctagaaataaaaaacatgcagatgcccccagacttatgatgatgatctgattgtaatttttctttctttatttctttttttttttcgagacagggtcttgctctgttgcccagctggaatgcagtggcatgatctcagctcactgcagcctccgcctcctaggttcaagtgatcctcccacctcagtctccctagtagctaggaatacaggcaggcaccactatactcagcaagttttttatttttagtagagacagggttttaccatgttgcccaggctggtcttgagctcctgagctcaagtgatctgcccacttcggcctcccgaagtgctggcattataggcatgagccacctcagctgacctgattatgatttttcaactttacgatggtgtgaaagtgatattcattcagtagaaattatacttcagtacagtattcatgaaatattcagcactttattgtaaaataggccttgtgttagaattcaagctgtctaaaccaccttgttttgttttgttttgttttaggcttttagcagtgtgaagccattgtttttagtttctctctctagtgataagcggaaaagagggttgaggaaggggctttaccgaaccaaccagaaacaggaactaagaacccaagcctgtgttccctcccttggacacccctgtaagatgattttgctcagtcgtaggctaacatcagtgttctgagcatatttaaggtggaccaggctatgatgtttggtaggctaggtgtattaaatgcatttttgacttagtaatatttcaacttatgatgggtttataaggacataagccccttgtaaattgaggagcatttgcagcgaaaaatacagtggaaagaggatacagagtagagtaaattaatgaactggaaaatggatctgaagaaaatttctagaatttagtacagagaaagaagagatggaacatatgagaggtttagtgacatagagaatgagacgataacatctgtctgatctagtggatcccaaactttttaaatcttaggatcccttatgccttatgctctctctctctcttttttttctttgtttgttggagatggagtcttgctctgttggccaggctagagtgcactggcatgatcttggctcactgcaaactccacctcccaggttcaaacgattctcctgcttcagcctcccaagtaactgggactacaggtgtccattaccacgcctggctagtttttgtatttttagtagagatgaggtcttgccatgttggtcagtctggtcttgaactcctgacctcaagtgatctgcccaccttggcctcccacagtgctgggattataggcatgagccactgcacccagcctactctttaaaattattgaggacccaaattgcttttgtttatgtgagttacacttataatttggccacatttttgcatatatgttatagatccattaaaagtttactttaaaaaagaaacatcatagagtgagaaggtgagccacaacttgggaaatgtactaacaaaggtttgttagccagaatataaaagaactcctcaaataaaaaaaaaaattaggaaaaatggaaataggaaagtcatgaaaaagttaattttacaggagtagaaacaaatggttcatgaacatatgaaagatcctcaacccttttagtaatcaagaaaatgcaaattaaaatggcaaggaactgtctatctcctgctcgtctcctttcccccaccaaacagggaaaaattaaaaatatagttacagttgttagagatgatatgagcagtaggagcagtcatactgttaggtaccttcatttttgaaaacaatttggctttacctagtgatgcctaggtatgtcccctagtgaaattcttgtgcgcatggcttaagagacatatgtaagaatattttaattattgttcatagtagctaaaaatccaaacaactcaaatgtctagcaactgtaaagcataaatacagttggtatatttataaaagggtgacctctgagcataaaaggaatttaagtgccactacatgcatcttcgtagaggaatattccaaaatagtggggatcaaaaaaggcagttagaaataataaatacggggtgggtgcagtggtacaggcctgtaatcccagcactttgggaggctgaggcaggaggatcccttgagcccaggagttcaagaccagcttgggcaacatagcaagaccctttccctacaacaaattaaaaaaaatattatctgggcatggtggtgtgtacccgtatttctagttactcagaaggctgaggtggaaggatctcttgagcccaggagtttacagctacagtgagttatgctcatatcactccactccagcctgtacatcattgtgagaccctgcctcaaaaaaaaaacgagtatgattctatttgcataaagtttagatgcaggcaaatctaaacaatatgttgtttggggatacatatatggtaagattataaagaaaagcaaatgaacaaacttcaggatggtggttttcttggagtgggatgaggtggtactggggaatggaagagtacgtaggaactatggtttgaatatgacatattttacaataaaattttttataagcttgttgttgaaaggaaccctgaggtgattcttttttctgaagaagacttttggtaatgcggatagtaattttttttttttgagacggagtctctgtcaccaaggctggagtgcagtggtgcgatttcggctcaccacaacctccgcctccccggttcaagcaattctcctgcctcagcctcctgagtagctgggactacaggtgcatgccaccatgcccagctaagtttttgtaattttagtagagatggggtttcaccgtgttagccaggacggtctcgatctcctgacctcgtgatccacccgcctcggcctcccaaagtgctgggattacaggcgtgagccaccgcacccggcttgcagatagtaattcttaatcttttggtacatgctcttgcacataaagttttacagtaaatatatttttcatttttttcctgaatttctttatgtcaaccttgctaaatagagagcgtgcctaggaagaagatgaaactaggagaattcatccacaagcttaagttcaatggttgtagccttagaatgagaaattaggccttttattctacctgtcttaaaattagcttattattgttaaaaaccaaagactgtttcttagtttgtttatttttattttttgttcaggagcagaagcactcttttgcccctagccctagcctgcatctgctgtttgttaaatacctccatgaattgacatctcttccttttccgaaggaatgtgaaacccaataattacacacagacctgacctactttggaagaaccagaggacaaagaaaccctagatttcttcgtctttttttaactaaaaagcagagatttttgggaggcgagggccagaacttcctgtatctattcttctttgaagagcccaactcacctaagaaatttctggctgggcatgatggctcatggttgtaatcccagcactttgtgggactgaggagggaggatgccttgagcccaggagttcaaaaccattccaggcaacataacgagactctgtctgtatgaaaaggaaggaagggagggagggagggagggagggagggagggaggaagaagagagaagttttcccttgtgtgtgctgcttgtaggctagtggacttgattctaatgaagcctttgcatgtctgctgatccggaaatatttggccttttcccaaggctctatggctttgggaaaataatgatgaaatacctatttattttttatttttaattgtcctattttatatgtttgatttttgtaaacacctcagccctttttaaaaagaaatagttggaatataaacatatattctcattaattaataaatcagctggatgactagtccaaactattattccattatcattgtcactgccctgtaacttattttagttctgtgttagttatatttacctgttgttattttgctaatttgatagtttattgtgaaaacaatttttaatatttgtctactgacattttttaaaatagaaaaaaattctcctaaaccacaatcagaaatcttttcatttgattcattaacagttactaaaacaccacaactgcgttctgggtcctaggccctgtaggggggctcacacaacttcactaaacaccagccttagcagaggaagataactatcaatatctggaatgtcaagaactagaagaaacaagataatgtggtcctagcagacagataaatgggatagattcaagaattcagaaataaaaccttacacttatggtcatttgacttttgttaagtctgcaaagataattcattggagaaagaagagtcttttcaccaaacagtgctggaataagtgtatatccatgttcaaaagaatgaagttggacctttgctttataccatatgcaaaaattaacttcaagtggaccacaaaactctctaagagttttcatagagttttatagttttagctctcacatttatgaagagaagaaaacatacgagcaaaccttcctgatttggagttaggcagtggtttcttaaatagactaccaaaagcagaagggacaaagggaaaaatagataaatggactacatcaaaattaaaaacttttgttctgcagacaataccatcagaaaattgatgacaacccatagaatggaagaaaatgtttgcaaatcgtacatctgataagggacttgtatctagaatatataaaaacttttataactcaatagtaaaaagtctaataatttaaaaatagaggaaagatttcaatgtgtaatgcccctcaaagtgtatgcagttagtccacaaacacatggaaagattctcagcatcattagtcattaggaaaatgcaaatgaaatcctcaatgagataccacgtatccactaagatggctgtaataaaaaaagatggacaataacaagtgttggttaggatatgtggaaagtagaactttctggcattgctggtgagagagaatttaatgatgcagcagctttgtcatttcttcaaaatgtttaatgttccaaaaaatgttaaaagtggaattaccatataacccagcaattccactggtaggtataaacccaagataagtgaaaacacattcacataaaaattttatgaatgttcatggcagcattattcataatagccaaaaagcagaacaaccaaaatgtccatcaactaaagaatggataattaaaattaatatatccatacaatggaatattatttggcaataaaaagtaatgaagtactgatacatgctgcaaggtgaatgccccttgaaaacattatgccaagtaaaagaaacaagtcacaaaaggaccagatattgtatgatctcattgagatgaaatatttagtataggcaaatttatagaaagaaagtggattagtggttgcctagggctggtggagggataggagtgggggaatgaggagtgacagctaaacaggtatgaggtttttttcagtcggaacaaaaatgttcagttagattgtgatggttgcactatcctgtgaatttataaaacacgttgaattttacactttaaattggtgaattgcatggtatgtgaatatctcaataaagctgcttttttttttaaataactagaatacaaagaaagcagggaaattcttgctgaggagaaatactaatgtgattatttgtcttgttaatgaatttcatgtcctcgttcgggctaaatatttgtcaatttttaaaaaaatctactttcagaaagagtttcaggtatctttaacagaagatcaacagattaaaacaaatttaaaagaattagggccaaatagtctagggaagaggagagatggatactattttaccagaaaacttaggctaagtagagctaccacagttcacttagcttttgctttctggcagtacaggccaacaagaaaacatggattccttaactaacattattaaataaaaggaaaaaatacaattgagaaaaccgatttcccagcaccacactgtaagtcaaaacttaataccctgtgacttgatatcaggttcacaaaactatgtctaaaagaaaaattcttcaataatacatttttaaaaaagatttcaaggccaggtacggtggcttatacctgtaatcccagcactttgggagtccaaggcagatcacttacagccaggagtttgagtccagcctgggcaatataacaagacactgtctctacaaaaacaaacaaacaaacaaacagaaacccctatggtggcacatgcctgtaggcccagtcgctggggaggatcacttgaggccaggaggttgaggctgtagtgaactgtgatcgtgccactgtactccagcctgggtgacaaagaccctgtttcaaaagggggaaaaaaagggttccaaagtgttctttatatggaaaccattttgattctggatataggtctagtgagtctagtgaagaaatgttgtttgttaagcgatctggttacttgaactgacggaaagcagaaagctgttgtttagtctggtatctccaacattaaatagaagtttcctaacaaaacaatttaagactgaatttgaatgtagtgctagaagagcagagcattccattatgatgtttgcagttaactattttagaatagctttagatgtgtagaaaaattgcagatacagtacagaggtcccaaataccccacggtcagtttcctctattcttattatcttacagtaatatgatacatttgtcataattaatggaccaatattagtacatccttattaaagttcatactttactcaaattccgttagtttttaccaaaatgtcctttttctgtgtcaggatcttgtccaggataccacacgccatttagtcaccatgtctccttaggtttctcttagctgtgacagtttctcagtcttttcttgtttttgatgaccttaatggttttgagtagtactggtcaggtattgtagaatgctcctcagttggaatttgtctgatgtctttgtcatgattagattggggttataggttttgagtggtaagataaccaaggtaaagcgccattttcatcacatcataccaagggcacatactatcaacatgacttattactgttgatgctaaccttgatcacctggctcaggtagtgtttgtcaagtttttccactgtaaagttctttctttccccccctttcataatgtactgtctggaaggaagtcattagatgcacatgcttttgatagcattttgtgcaattgaaaaaagtaactttgtttggtaaactaaggagcctgacatatttacttttccagtggagagcttacctatgtttacacagagtttgctggaatctctacaagtaaggctaaagcaaagcttttctcaagaaagagctttagttttgttcacatgcttgaactcttgcttgaaactgctacagttctgtactataaattatggaagagatttccttggcctagaatttcttggagatgatagttgtctaccttataaagaaccatgagctgttagttttctattactatgtagcaacctgccacaaatttagcagcttaaagcagcacacatttactgtcttacagtttccatgggtcttgagtcctggcatggcttagctgagccctctgctcagggtctcagaaggctgtacagtattaaatggactgcattgtcacctggaggcttaactgggaaagtagttacttacgagatcgttcaggtagttggtagaattgctttatgagtgaggatcccagctttttgttggctgttggctggggcttctaaagagactgatcctagagagactgcccgcagttctttgatgccacccacagttccttttcctgagggcttccgtaacatggccatttacttcattaagctctctagctccacttggaagaaagggaggatattacataaaggcatgaataggtctgtcattatgtgtgtgtgtgtgtgtatgtgtgtgtgagagagaaccattgggggccagtcatcatggggtctgtttgtcacacagaatatgacttttatttttatttttaattttttttgagggtacatagtaggtgtatatatttcataatatgacttctgaagagaatatttaattttgagtaggactgcatccagtaagtctgtcttgatgaaaattagtcacagagtacatcccaaatgttagtttaacccaatagagctggttgtagtaaaaagaataaactttacttttaaaaatattgggtacaaggttaaatggaggtaggtagagctgttcaatgcagcataccagctggggatgaagaaagaagttggaggataggtgaaatacggggatatgttttccttgtttcaaaattttgctaaagtctgatgctgtcagtcatccattcttttattagtcaattatctctgtttatatttaacaactcattaccataaaatctacttttgagaaggagcaaaacataatgaagtggagggctcaggttcttgagctcgactgtctggcttcgattcctgcctctgccattcagtactgtatatccagggcacataacttcattggtaggtgtctcagaaacatctgtaaaatgagaataatagtacctactccatagggttgttgtatgggttaagagttaatgcctgtaattattcttttcttttttttttttttttgagaccgagtctcgctctgttgcccaggctggagtgcagtgaggcgatctcagctctctgcagcctccgcccctccaggtttaagcagttctctgctcagcctctggagtagctgggattacaggcgcgtgccaccacgcccaggtaatttttcgtatttttagtagagacgggatttcaccatcttggccaagctggtcttgaactcctgacctcgtgatccacccgcctcggcctcccaaagtgctgggattacaggcgtgagccaccacgcctggccattattcctcatttttttcaagtgcagtaaagatgtcatagttatgtttaaaaaaagagaaagactcctgtttgaggtatattgaagtagttacagatgaaatgatacggtgattgggattttggagaaacttggtagagatatagataaaacaattgactataaagtaataattcttgaagctgattgatgctttgaattattttattgtctacttttgttaatatttgaaaattttcattacaaaaagtaacaaaaaaatttagtgccttgggacatattaggtgctcagtatattttacctattcttactatgcttatgtttaatatattggaattaactagtctaaaacaaaaaatataaaacaaactaaaattgactctttgagtttctcatttctaagtgagaaatttgataatggaaacatcgtcaaatttggctgacattggattatgcaacatttcttagactcggattcttggtttctgtgttcatgtctttctggtgtggttgtaatttacagtttaattaatttgacctacttgttgcccgtttcacattccatttaatttagtctgccattgtttgttctgtaagtgggatggaaattaatgtcaatattattatttagtgttcttagttttaacagtgggaaacattgactttaccaatagtgaaaatattagcaaatgccaaggcttttctgggcaaacagtggtgttatgctttagttttaatgtatttaattgaggaaagaaacacttattcaccaaggttatctcaaatgtggtaaatgcagttttctgcttattatcatatggtcctacattatatagcactgtaaaactagatgacttagggctgggtgtggtgactcatgcctgtaaccccagtgctttgggagcctgaggtgggaggattgcttgaggccaggagttccagatcagcttgggcaaaagagcaagacccttctcttaaaaaaaattaatttagctgggcatggtagtacatgcctgtagtcctgactactcaggaggctgaggtggaggatctcttgaggccaggagtttgaggctgcagtgagctattatcacatcattgcactccagcgtggtcaacggagcaagactctgtctctaaaagaaataacaaatacagccgggcgtggtggctcatgcctgttatcctagcactttgggaggctgaggcaggaggattgcttgagcccgggagtttgagagcagcctggactatagtgagacctcatctttacaaaaataagtaaataataaacagataagagaaaataaaagaaataataactaaaactaaatggcttgattactttaactaaccaagattgagagttgtatgactagtagtgattctgatttatgtgaatgaacccttaggacttaaatgtcaatttaaaaacttaaaaaagtcaaaacccaagtctcccagagttcgaattaggaattggcacagtgagaaccttatcttgataactctctttctttcttttttatagtcagggtctcactctgtcacccaggctaggagtgtagtggcttgatcacaactcactgcagccttgacctccggagctcaagcagttcttgtgccccagcctcccaaaatgctgggaccacaggcacatgctaatgtgcccaaccaatttgaaattttttttgtagagacaggattccactatgttgcctaggctggtctgaagctcctgggcttaagcgatcatctcaccttggcctcccaaagtgctgggattgcaggtgtgagccactgtgcccagctgatacctctgctttcaagtcatgtaatagatgaaaacattgaggattagaggggtaaagtgattttcccaaggtcacaaacatatcttagagatacagctggaaattgaactctcaatctcagcacccactgcattcgtctttttgctgtcacagtgatttccaaactgttctgcagagccctaggcttctaaaaagttttgtctgtaaccaggatggatactcttttttctgtcttatgtgttagggtttatgtgtgattttgttcagaaggaaaaagtttctactgctgtgtatgatcatttttatatccttcctacactctgagctccttattctgtgctgttttctacccagaaaagtacatttgattcattgaagggatttttttttacttagtttcaaaaaatgccaacttgatctcttagtttcaaaaaatgccaacttgatctatcaagaaacctgtgacccagagacctcaggaaagttgcacaaagacttttaaatatggagggataattagttttattatgacattattatcaattaacattttacttccttctagctctctacattttcattttctcatctcataaatctcattccttatgattttttggtggggatgtgttacttacggtctcttattttcctagaacaatatttatgcaaatatgtctttttttttttttttttttttttgagacggagtcttgctctgtctcccaggctggagtgcggtggtgccatctcggctcactgcaagctccgcctcctgggttcacgccattcttctgcctcagcctcccgagtagctgggactacaggcgcctgccactacgcccagctaattttttgtattttcagtagagacgaggtttcaccgtgttagccaggatggtctcaatctcctgaccttgtgatccacccgcctcggcctcccaaaatgctgggattacaggcatgagccaccgcgtcggccgtctgtctatcttaaatgaaactatttctgatatctggagattcttttggatctcattggcaatgaattaggggtcatgttaattggcttaaaagtagtattgtcataagacataaaagaggggctaatagtataatagttgggttttacttaaattgtggatgcttttaatgatttttaaaaacccacaatgttattaactatactcaatactttaatgaattgatacacagttacgacaatttcctttacataaaatccttggttctaccttagcatctttttgaaattctacacttgtactctaatgcaaatttaggaccatcagagaaggtcagtatttaggatgtctgtaatcctgctacaggaaaacacaaagaatcttgttaaatgttaactctgttatattaagcatatacttcatgtagctgtcttttgacatctgttgtggctatgtttaacctatataataattttatatttcagtggaatcattctcagttttttctatggcaatgttgtttatcagttgtccgcttaccacctttaaaataaatatcagaaatttggccaggcacggtggctcacacctgtcatcccagccctttgggaggccaaggtgtgtggatcacaaggttaggagtttgagaccagcctggccagcatggtgaaaccccatctctactaaaaatacaaaaaattagccgggcatggtggtgcgcgcctgtagtcccagctacttgggaggctgaggcaggagaattgcccgaacccaggaggtggaggttgcagtgagccgagatggcgccactgtactccagtctgggagacagagcgagattccatctcaaaaaacaaaaacaaaaaaacccagaaatttaagaattaattaatgtttactattagacttccagggattgatttaagttacttaaattacactattcatcacatgaaatgcaaacattcattatggaaataacatttgtttgacttgaaaatgtgatgattactaaatataaggaactcattgaaactggaataaatgcacaagccatcacacaaaacattccattttgaaggaatcccagaggggcattatctgtcagcgctggtagtgtgcacctgttcttcggaaaacaccttggaaggtagttggtgccatgttcctgatgggcacagggaggctggcttcttactccaggctgctcagggaagatagtctggtatcataaacatccagacaagaaatgcatgatttcacaacgatgcaccttttgacaaacaatgagcacactactgacatccgaggatgcattacaagtgagactttcagaaataggaggatgaaatgcagtctgaaaatggatattgcttcctgtttttccttagtcttcattgtcaaataattgggagatgtcaagagatgagggtttaggatagtttttcaactgttttctgtttccttggttcactcagctcctgctacttcacgcagactgtgttattagtccttgagggcatattgatataatttaaaacaatttaaaatatgaactgttgctgattttgttcaacaggaacagcactaccattgtaaggttagcaagatacccaatataataaatctccataggggaagtttaagaaaattatgttacggcagttgagttcagctctcttttcagctggagccttaagtcttggagcgttctaggttctacatctaaatgtgcttaacagtacacaggcttcttgacaaatgctgttcttgggaagagtacaatccttctgtgagtctgtgttatttttacctgtgagttggcattccaggaaagagtagcatgtactcattaagaaaattcatcttaaaatttattcagctttttgtcttctgacaaccttgtattttaggccctattgccaagttatttcccgtctttctgtcctgggactaaagtttctttttttcttttctttttctttttctttttctttttttttttgaaacagagtcttgctctgtcaccaggctggagtgcagtggtgtgatcttgactcactgcaacctccaccttcctggttcaagcaattcccctgcctcagcctcccaagtagctggggctacaggcccacgccaccatgcttggctaattttttttttgtatttttagtagagacggggtttcaccatgttggccagactgatctcaaactcctgaccccaggcagtccgcccacctcggcctcccaaagtgcaaaatttcattttttatagtttaatttcccaccataactttgacatttttctttggaaataaactacttttttaaaaatttcaaaatatttctataagttgtaggttgaacacccctaattcaaaaacgaaaaatgcccccaaatcttaaactctttgagtgccaacatgacaccatgtggaaaattctatgcataagcacttaatacaaacttgtttttaatgcacaagattatttaaaatattgtgtaaaattaccttcaagctatgtgtataaggtgtatatgaaacataacgttttggataagggatattcaacctgtattgttattcttattatttttattgttttattttttgaaatggggtctccctctcgcccaggctggagtgcagtggcgtgatcacagcccactatagccttgagctcttggactcaaatgatcttcccacctcagtctcctgagtactaggactacaggcatatgccatcatggctggataatttttaaaaaattttttgtagagttgggggtcttgctgtgttgcccaggccggtctcgaactcctgggattacagcatgagccaccaggccggcctattttgtcattatgccactttcttagacagtgttctttggttgccattttgaactattagaactgccttgttaaaccatttagcttttgcccttttcttccccagatccctaatacttttctgcccaatcctttctctctattcagagtgtttcctgtttgtcctacattctctttctgtcctccttctttcctgctcttccctctttttttttttgagacggagtcttgctctgtcacccaggctggcatgtagtggtgtcatctcggctcactgcaacctccacctcccaggttcaggcgattctcctgccttagtctcccaagtagctgggactacaggcatacaccaccatgtttggctaatttatatatatatatatatatatatatatatatatatatatatatatatattttagcagagacgggttttcaccatgttagagaggctggtcttgaactcctgacttcaagtgatctgcccgcctcagcctcccaaagtgctaggattacaggtgtgagccctgcacctggcctcttccctctcttttttttagggctttgaggcatccttttcaacagctccttaaccttaaaattaagccatcaatcccattctaagtatctccctcttaaacttctgcaatttgtttaatctgaaataaacacctgaaaatagaaaattgaatatctatattttgtaaataatcctgattgacctttatttttattgtcaactctcttttcctccactccttttttttaaaaaaaaaaaattgttgaatacatttaagtgataaacctgtaggacaagagttgatttaactataaaacattgttggcactttgcaacaataacaatcatgtcagtatgcctgagagagttgctcataatattggagacactcgtaggcttctgttttctgagagggtaaatgtcaaccagatgggaattactggaactgagaaatcattttctttttgtctttaaaaatttctcttctatatcttgaatttcaagtaatcacagaaaatttcctttgcttcagataccatttactaattttgcacagtataccattttccaacttattttcccactttcagtaaactttctgttctctatccagacattggaaatgcatgaactattttacagtcaccattcagtacagcctagagggcagaaaaataaaagttcaaccactcacctaaaaagcactatacattttattgtattttattattattattattattatttttgagatggagtttcgctcttgttgccctggctggagtgcagcggcgccatctcggctcactgcaacctccgcctcctgggttcaagcgattctccctgcctcagcctcccaagtagctgggattacaggtgcccaccaccacacctggctaatttttgtatttttagtagaggtggggtttcaccatgttggccaggctggtctcgagctcctgacctcaagtgatctgcctacctcggcctcccaaagtgctgggattagaggcatgagccaccgtgcctggagtgctatacattttaaattatagttgttaaccactttctgtggagtttattgaaagctgcctgacccttatctttgctggccatgtagagtccttgtgtctcgagttggctagcatccttgcatcccagccattccttaggcttgacagctgcatattttcccagaaacagttgtgattggtgtgtataatgaatagaataacctgttctttccaaatatacatccctgttttgccccttagtacttgatttgactaattgtttcaagctgaaatatagacttcaattaaaaaattggaagccaggtgtggtggctgttgcgtgtaaccccagcactttaggagactgaggtgggaggatccattgagaccagcctgggcaacatagtgagaccctgttgctacagaaaattaaaaaatatatattatccaggtgtggtggtgtgtccctgtagtcccagctactcagaaggctgaggtgagagaatggcttcagcccagaaggttgaggctgcagcgagctatggtcgtgtcactgcactccagcctgggtaacagtgcagacgttaggatcttcccaagaatgtggccagcctacatcctgaccttggtcatgtggcacgttattaatcatggccatttaatgtgtaacaggttgcattcaagagcctagcttgtgttggtttggggttcttttaaatttgttttctgttgacaattctattttctagtaaattttaaataaaaatgttttttcattaaggctgattccaaaggtacttaagttcctttctagccagccattcttagctgggtcctgtgaaagcattatgccctatagaaaagaaaattgagtgactattttctcagttctcccaaacatggtactattctagatgcattgaagagaagtcaattcattacatacagtgatgctttaagggcagttgttctcagagtttgattcagggatgtcatagactccaatactgtttcagtgggtcccctaggtcaaaaccatttttaaagaaatgccacaacattattttcacttttcattcatagtctctcacaattataaaatagagatttccagagactatgctatgtatgatgctgcaattgctctgatgaccaaggagatgtgtggttgtatacacgtgtcttttaaatttttgtcttaatttctgatttttaatttgatttctaagcaaatattgaaagatattactcacataatcaaaacttctttgaagtttctcctaacttttaagagaaggagtcctgagaccaaacagtttgggaactgctgtcttaaggctgtaagacttaattctctgagagaacccctcctgggaatggctgcacacaagggcagtacagtaaaccagtcagttgctcaatagacattttaaaaattgaattaaattgagctcctagaatataacttttgagaccttatttgagattttctcccaaggcaatgtttgagcattgagagccttgtaacttgggccaggtttctgtgagatagacagttggcaattctcaatatcaagtcaatgatttcagaagtcattttcaaggaatacgtcctttaactggtagattaattatgtagcctgttggcattatgtggatcagtgccgtccaagagaaagagggcacatatattatttacaatttttaaataatcatattaaaaaagtaaaaagtggtgaaattagttttaatatcttttgtttagcctaatatatctaaaatattataatttccacatgtaatcaatataaaaatgtatcagggagatagtttaattcttttttatattactatctttgaaatctggtatatattttacatttatagcgcatcagtctggatagttacacgtggctggtgcctactgtattacactgtacagatctagatcataaaatagttgtagagctgagccgagaatgttctagagtagataagctttgtcataaaaatagagaataaaaattttgctacagaagttagtataaaaacataaccccattgaaaaaagcttacaatgacaaaatgtttgatatctgcctaaattctaaagacatttctaaaagaaatagagctctttccttaaaacaaattttttaaaaaaataagcttttcttcaaactgtaatgttttctctttccttctaaaaagcatgcagtctgctcactatattctttgaaattactgtatgttcatctgcataccagtgtaaggagatcctctttctcgtcttggaagaatttgagcccttgtgatctttgcatttccctcctacgtagttctttcttgaactgtccatttgtcctggcatatccctgaatccgtactatctgctatagggcatttatttctgatggggaagggtggtttgttttgatcttaatgctgaactgtcccttagttcattgtcttttactctgttgccgtatcttgcttacaaatatggtgtcagaatatgcaagtgaatttattgcctgttgtgaagaaaccactatttttttcagcttcattcactatgaacattattgtgcttacaaaagtgagttgagttaaaaagaactgtgttttttagaagtgagaattaaaagggagaaatagtaatttttcctctcatagaatgaataataaagaactatgactttaaatttggcatgatctaaatttaatttttttcctaccacatgccaattgaaacagaagaatttgttgaatgggaatgtcttgagtagggaaattaaggactctcacaatctgttatctctttagtagcatacttgatacagtgtcatgtttaattaatattagaatgtcaatttacaaaatcatgctctttggaagataaaagaattctgtgtagaacaggcaaacttaggaaatatatggtctcttggtaacatgttggaagttttctgctttgttataattttcatatgtaagtacaattaggagatttatagattttcaaccccaatataataacattctttgagagtttatcttttctttacctactgatttacctttgttgtggacacattcagtttttcaagcaactggtgtgtactttacaccaaaacctttattatatagtcttcagtaatctgtagctgtgaaactcatactcatttatctgtttagatattctcaaaacaatcatacctgtgtgccagccacctgctgtctgacttggcagtttctctgttccaactttatttttctgctttttagaaaactcccactttccagtttgcagctaaggtaggagctgagttcctttccctgttaagtggtcttatcaggcagttatgccattgccaagcaacagtaagttctctcctctcaggtgttagctagtaggtagggttggcaaggggagcctggcctgctgtgaagaagtagaccagtgtctctctgccacagccctcagggtcgggtcttgctgtgggttccatcctatggctcactgtgactttcctgaatggaatgcgtttattttttttccagctctgttctttccatgttcttcccacatcagctggcggcagccagttggttctgaatgctgcccacaaattgttagctattttgcttcttggtccctcaatttgtcccttgaataaggaattgatgtgtttcagatccaggattatgttgcttagtgaagcaaatctaatccttgccaaggaatgcctaaagttgaaggcttgattccagaagaaaataaaataacaacagcactacctgtaattaacatatattgcctgtttactgtgccaggcattatattaatcaggttgcatgtattagctttgttaatccccaaaatcactttaaagtaggttccattgttgcccacattttacagatagggagccattggaaaattaagtaacctgttctaggttatatattaagggatagttccaagattttgaatctaagtagcttgtcttcagagtccttgctttcagtactatattcaactgctaaataaagcttcactttggtttttttgttttgttttgtttttttgttttggagaaagtgtctcattctgttgcacagattgcaatgcagtggcgtgatcacggctcacttcacccttgctaggctcatgcaatccttctgtctcagcttcctgagtaactgggactacaggcacacactaccacacctggctaatttttttattttttgtagagatgaggtctcactttgttgcccaggctggtcttgaactcctcgcctcaagccatccgcctgcctttaactcccaaagtgctggaattacaggcgtgaaccaccgtgcctggcccaaagcttcacttttcaatgtcttctggaatctgaactctcactgaagagtagacaggagtttgatgttttaatctattaaaacttctttgtacgtgccttctaagaacagattatattcaatgcaatttttcctgaaaagatgaagtacatttgtttgtaaaattcatgtatgtatgtatttatttattatagtacatatttatggggtacatttgatattttgctgcatggatacaacatgtaatgatcaaatcagggtaattaggatatccattaccccaaacatttatcatgtctttctgttggtgacatttcaaatctccttcagccattttgaaatatgtaataaattattgttaattatagccaacaaaaggcattattgctagtacagatatttcttgacttatgatgggttacgtcccaataaacccattataagttgaaaatatggtaagtcagaaatgcatttaattcactctattgttatctacccacgtgattgtgtggctgactgggagccacacaatctctgtttaccattatgaagatcctattgcttcagaatgcaaatgaaatttagagtgagtgccttgtgaatcagggaggccccactatatgactccctgtgatctcttggaggtgaaagaatgcacaaatttcataagttaacctgaaggtcacccgcttttccccagttacattgtacatgccatcaattagtagggggtgggcagaggtggaagatttcaggcacaggccttagacagttgatgccctctgttattaaggtaaataaatcctagcagttcttcccaccttttgcacatcatggcatgcacagaaagttgagattggaggtgatccattattgcttgtaacccatttccaacacacttgtttggaagttctttttttttcttttgagacagggtctcattctgttgctggcacgatcatagctcactgcaacttcagctcccgggatcaaactgtccttccacctcagcctcctgagtagctgggactacagacacatgctaccatgctcggctaatttttaaaaagttttttagtagagatggggtttcaccatattgcccatgctggtcttgaactcctggactcaatcagtctgccctccttggcctccgaaagtgctgggattacagctgtttggcagctctgctatggggatatatctgcaagtttctaagcttgttatatttatgaaagcattctgtacattacaaggtgccattcacatgtaagattttattaataatgactattaagaccaagctatttgttctaggaagagacattgtgtaccatgattttttttgttgttgttttgggagctgtcctgagagaagcaggagcagatgctagaccagttgtggagttaaggtcttgtatgtgatctggtgcagtaatgaggagaagtagaaatgcaggtggtcaagggttatattatccaagacttcttacaggaaaccaagcagctggtgagatcctcattaaattctctaccttcttctctgcctatcccagttctctctgtagtgaaattctgctttctttgtcaagtctttcccagactttttctacctcttctcctgtaggtgaaggtcattcaccatcctctgtctgttgttatacctggtacatagctccattgcttgtacttccaatgctgcattgttttcagttccacacatcttttttcctttttagactgtgatctccttgaagtttaggctgtgtctgattaatccttgtagctccagccacacccagctcctttcatcacactccctcgttaggcatggcttgaatgctctttgagtacagctgaaatttatctccctgtgcctttctcccgtgggtcctcattttaacacctgaaacagcttcagataaagttacttttatgccagccatttatacatctgaataatctgccacgtatggctccaaacagtctttatttctctgagctaaacatttttacttttgtaattttgttttcctgattttttcctcagtaagtactgtatatgttccctttacctctctggtgcatagaatcttagaatgttaagatttggagaggactagagtttgactagtctaggttcttcatctaaccagtattgcttccatactgattacataattgaaactgagatatagacatattttggagcaacacaaatattttaagtatttcactgaggaagtttagatttagtaaatttttaaaagtccttcatcgttcattcttcattaaaatgtatttgctgatgagtatcttattaaaagggggcacattggaaagatatgttttatgatgcagtgcatgtatgctaaagaaagatcttcagattcttataacattcttattaagaatttgattctaaagccaagctacctaggcttcaatcctgcacctgccacatactaggtgtaaattacttaatcttgggttaattacttaatctctgtgtgcctcagtttctgtatttctaaagcaaggttaatgataaggtgggtgttaggaggtttaaatgagttagtacttccaaaccactaagagttatgcctggcccatagtaaacatttcgtatatggtagatgctgctactgctgctgccaccaccatcactgctactattattattattattgagttctacaagcatctggtgagatgtgtaaagcccctgtgaaagttctcatagaaccttagtaagacaccatgtatttatgatacaagcttcttgcctttttaaaaattttttattttatttaaagcttcttgtcttaatgagagaccctgtataccactctgcactgaaacatgatttgacccagaccgtaacgacatctatggagtaataaagtattttttcataggattttaccgtataagcaattgaagaaatggcagaagacccattagcttttggagtctgttcctttgagaccaacttgctaggaatccatttcctatctttttaaaaagagtaaattaattttcctcattgacattctgtaaacagaatactggcagcttatattttatggaacgtaatgttttaaagtgaacctaatttttcttagtaaactgcttttaataatgcatcagagtaatttttttccctctgttgtcaggttgctatcaagatcatagataagacccagctggatgaagaaaacttgaagaagattttccgggaagttcaaattatgaagatgctttgccacccccatatcatcaggctctaccaggtaggatcattagtgtatagcagatagctgcaaagaacccagaatattgtatgtatggctccctttgaagaaatgtgggtgggtgaacatctgtgactttttttgtttctatgttaatcctgctatctttcctacccttctgtttacgcgctcagcacttagtatcctcaagtttcccctggccatttactagtacgttttccttacccaggtaggtctttttaatttgttctttaaaatttgatgccattcttagcaacaactacacaaaatgttaattcagaagatgatgagaatttattttatttagttcagagttctaacacaggatgggaaactcaaaaagaagagaatttagagaggtgaaaagttagagatgaatataacatttttttaatagcattatttgaatactagtttctgtgatcatgttataaattgttatggcaaaggactgcttcttggatcaatcaaaacctacctcttttctattctaataggattgtagacttagttttccaaggtagtaattattttgataatcaagagaccagatcaagtgaccagatctctccaataggagagatttctattttagttttttttttttttggtcttcccaagaaacatgcatatttcatgccatcatcaaaatgattccctagcataactacaaaagcagtaaatctgatggctggaatttcaagcgggataggaggagaggaccttgccttagcaggctggtgaaagagatattttgggagaggtggggcttcgggatgcttctcaaattgcaatgtgttggcagccgagaactttgcctctgcataggcccaactctacttgctgctttctgccagaacagccatctcttagttctgaaggacgtggccacccacttggttattttgctgctgttagtctgcagtaaatggttactggcccagacataggaccatgtgtaaaagtggagaaagtacacccaaggctctatgggcaagctttcgtagcctcttagttttatggaaaagaaaacatgttgtgatattaacatgtgtggttaaaactacagcgttagagctcttccctggcatcagctgctcacataatgaaattaggtcaacaggagcagacctgttgaaatttatcagcctaaattatgttgaacaacgcctaccttctgccccacaagcaaacttatgaaagcttcctggtgctgcctgaagacctatatctgtgagctcacaggtgtctaacctcagcttccttcctatcctgatgggctgaataaatttcttgaccttaccttttaaaataaatcatctttaaataattgtggggcttaggctgacctttctcaagaggttgacttatagctattacccttgtaactgaattctgcaagtttgcctgtcttacccaagattagcctatgaggatttccacaggtccagtgctagctttgagcagtgccttctttcaagctttaattttgctttctggcagctgggttttttaaattttatttatttatttatttatttatttttgagacgaagtctcactctgttgcccgggctggagtgcagtggcatgatctctgctcactgcagcctgcgcctcctgggttcaagtgattctactgcctcagccttccaagtagctgggatcacaggcatgtgccaccacgcccagctaatttttgtatttttagtagaaacggggtttcactgtgttggccaggctggtctcgaactcctaatctcaagtgatccacccacctcggcctcccaaagtgctgggattacaggcgtgagccactgcgcctggccggaactgaatttttaattgtatttagttttaattaatttaagtgtaaaactaaaaataattttaaaaagaattgttgaaatgatagtattttggatatattggggtaaataaaaagtagtattagaattatcttcaccttttcctttttcctttttaaatgtggctactagaaaagttaaaataatatatgcagttcatattatatttctattggacagcactgttgtagaaagatatacaataagcagagaacagtgttcctctggggattgagatggaggagattgggaagaggaaagcctttggtcttttgttttataatgagtgtatgtaatcattattacttttaaaaatgtttgatggaaaatgtaaaaaggaagaaaggactgacaacatactacaatgaattttaaaaaggagcaacaaagggaccaagacaaaacacaaatcacttacgttactttaaaaggttgagtattttaaattactgttctctttttttcaaataaatgggcagtggaaaggaaagttgtcatttctataaaaaaaagaaagacatatgtgatttctgtggcgttcttatgtgactcccattattttccccaaaggcttctttttgctttagtttttttttttttgatttgatagggcatttttgtgcttcagatgattgatgttgaatctgaagtttaagttttggttcttgacaacttctttgcctctcagttttatggagcttaagagattgcagagacctcatggaacatcaaaaagcctatctctctcaagcaataaatgtttcctacttttaagaacttggaggaatatctaattttccctttcttcttaataacatttatatttgtttccccaaaaatgttttaaattttctttaatctatagtggttattaatatttcaaatgagaaaagaggagtcattagtttatcttcctgtatcagcctgtcatttgtgtcactgtctgtcactttcctgcctttgcaccaggttatggagacagaacggatgatttatctggtgacagaatatgctagtggaggggaaatatttggtaagtacatttattgcattctttaaacagctattgagcacactatggcaaacctaaaatagctgttcagtgcctttgtcacttgagcagcagtcacttgatgctgttcttcaatcctgccattttctatcaacaaaggcattttaatttgttttgattaatctagtaaaatccctttaacacatttgtttccttagcaaaggtgttttgtttatttcagtcaggcgctgacagttgagattaaagatctccaaaaacaagcatcctttctgaacgtgggacttagggtctttcctgtttgcaggttttaattgaggttaccaagtgcgacagaactcacacaagtgtgtgggcctctgttgtgtcagaaagagccacttagagcacataatctcacccgagtgcgttccttaaactttgtttaaatataacatgtaactatattatttaccatgtgttcacagttcccctcagtaattcttgtaattttgggggttctgccttcagtagctatattttcctctcacacttagctttagcacaatgtcagaaataagcaagagactttgttactgacaaatctgatttttaagatgctaaaaactgacaaaacgattttttttctaacagtgataaatggagccaagtagagttaaagggtaaacttccaaatctaaattgatgtgtcttttattttttcttttggcaactaactacagagaaaagtttctttatatactttatttgtctaatttcctcattttaaaaaaaatttatcaatatgaacacttgctagtttaaaattttttaatttttattttaaacatttgctccttcctgcacgataaaatgtatttaaaagcatagaatcacttttaaaatgaatcttcttattaatgactagtcagttgtggctgcatggatgtgtgtgtgtgtgtgtttgtgtttttaaagtttccctagcgatctagtgtttttttgtgtgtcaaagtatctttagggtaagtgctagtcctttttaaaagaggtatcattatttcttaattttatatttaattggctttgtatatgtgattagttaatgtcaaagctaatggtgatagaaatttatactcaatatagtatgggaggggatactttattttaaagaaatgaaagcattacaagatttgaaggatagcattgtttgtcaagaaggtatagtaggccttcactatgtatgataattatatgccaatcatgtgccttggagatgctgactcaattaagacactggttttcctttccgtggagaaatctggtggaaaacagacagggaaatcaacatattactttgaagatgagaatggaaactgtaaaactctgtatagtagagaacagtagtgcagatggcagtttggttaactcttggagatcagggaaatcttcctggagggcatggttatatggaaatttatgaaccagaaaatgaaagcacaagagagaatatttggagagagagaaatagcagtcatgttattgggagactatactatggtctgacattccaggcacatgttatgataaacctgccttaattaagatcacaaatgtatacaaaggcaaatagaaaactttcattatctagataaggttttttctttggacaaggtattgctctgctgccctggctggaatgcagtggtgcaatcctagctcactgcagcctcgaactcctgggctcaagtgatcctcctgcctcagccatctgagtagctgatactatagctgtgcactagcatacctggctaatttttaaatttttagtagagacgggggtctcactatattgttcaggctggaagatacctttttacaagttttattctataaaaagtcaaacatctcccaaatccttgagctgcctgttaggtattttatttcatagaacgacatttattggtggggaaacaatggtaatttggggagaaaaaagatcatgtcatcttaatgtttgtaataaaaaaagacccaaacacagggcacatcaatctaccttactctttaagaaagcagattttatttatttatttatttatttatttatttatttatttatttattcttttttgagctagggtcttggctctgttgaccaggtgaagtgcagtaacgggatcacagctcagtgcacccccagcttcctgggctcaagtaatcctcctgccttagcttcctgagtagctgggactgtaggtatacaccaccatgccaggctaatttttaaatttttatagcgattaggtctcattatgttgcccaggctggttgtgaactcctgggctgtagcaatcctcctgccttggcctcccaaagtgttgggattataggcatgagctactgcacccagcaggaagcagtattagagagatccgtttcttggtcctggacttcatgtgaatgtacctcaagggatgaacaaacagaataccacttctgataatgttattttaaaaacaaaatattttaggttggtgaaaaagtaattgtggcttttgtcattgaaagtaatggcaaaaaccgcaattacttttgcaccaacctataattatatattgtaacacatattatgtaatatataacaatagaatttgaaatgttattattgatactattaagtaatattattataaaagatccagatgtggaagaaaatagtgtattacctaaagaaattattgagactgcacagggatagaactgtctcatgagctctgatttttaaaaatgtctgtgtaaaaaagatgaaaggggcttagtcaagaaaacctgggctttggatgtatttagacctaggtttgaatcagatctctgtcacctatttgcccttttacttagagcaaattactagatgattctggtgcacaggttccaggtctgtataaggtaagatctagaatatttgtattatagttgtgaagattaaatgagatcgcatatatagagctctagcacagtgcttccttacgccttcatgtgagagagagatcaacttctgccgtcaaggtgtgaggagctctgctgacctgccttgcttgctgaaacaagtgaaaactattaaagaaaacaaaacccagtcatttaaagtctctggaaatcgtcctaagagtaagcagaaaatgaaggaacattattcaagaacatctgtgcaaattcggtaagaaacaaagtctggtcagcaaggtggaaattcccgtccaggctactgcagccaagaacgcagggcttccttctgtcaaaagacaaaattgcaagtttagtttgatgatcccagttggctttatttgcgattctagaatcggacaacatttcatttcatagaataagtgttccagtaagttgagcagaagagtttggcttatggacagaagggcttaagaagtctgaacagtgtattggttacttttaaacagaacaatagaaaattaaccagttaacatcaggttacttcgggctaccttttttagtaaggattaaagcagagggaacttcatcattgtgccagttaaagattttagactgggctgtttgggaaattggctgttatctctttctcctgatttctcaggtcagataacaacctagttttcgctttggaactttagcatgagtgactccattttgatatttagtttggtctgttggtgcctagtgcagaagtttattcgaaaacaatggtctcctgtaatttttatttgtcacttctcctcaattctctccagcatctgaatagcagctttcttcccaggaggatttggacatcagcaattctcattctgccccgagctgcctattgctgagtcctggagaagtgcagttaagagatgggggccccttcttctactcagcccccacttgtggaacttgatcaggtatgccgagaatactaggacccagatcactcttgccttgggtattaagacagtggtttcactgtcttttgctgctaggagaggcaagctgagaggaccccaggctgctgtcctcccccgctctccatccaccaaactctcagttcctagagtgggagcgtcactcagagaagtttgctgttgtccccaaccccagctccagagccctaactctgagatttttacctgtggagaaaaacaaaccataaaacagctcctaatttcttcccaaaggaactgacttcatttgcaacagggagtgaagaagttcaaacctgattgtactctcaagaacagtagagggaaaagaaaaaagaaaaagaacagtggaggttgtggtaaaggacatttgagaagagattcatgaaacaggccaaatggtaggtttgctagttcgcagggggagaaccaatgaattaatttagaaagagcttctctgggattagaatgaaaataaatcactggctgggtgcacacctgtaattctagctattcaggcaggaggatggctcgagcctaggagttggaggtcagcataggcaacatagggagaccctgtcttaaataaaaacaaaaataaaacaaaaaaacactgatggcaaaaattatttcttcaaaggaaccagaatttgattgtattgtttgtagaccaatttgtgccccagggcattattcaaaacaaaagggcaatcagccagcaactagtggagtttaacggctgagtatggtcagtaaatgagaggaagaaagtcctagcaaaaacactgtgatcccaaggtaactaactgtaggcataccgaagctgcctgttccagaggaatcacattagaggctgaacactgtaaatatggagaaataaacttcactagaagaatctagcttttagctgggcatggtggcatgcgcctgtagtcatagctccttaggttattgatacgagatctttctaactgtgggcattttacagctataaatttctctctaagcatgctttggctgcatatcatgagttttagtatgccgtattttcattttcattcatttgaaagtattttctgaattcacttttgatgtcttgtttcattatttatttattagtgtgttgtttaattttcacatatttgtgaatttcccgaatgtttcctactcttgatttccaatttcattccattatagttggttgtttttctatcctctatttcataatttctgctataatatttgttatttccttctttctgcttgcttcagttttagtttgttcttcctcttctagtgtcttgaagccaagcagaaagaaggaaataaagattatagcagaaattatgaaatagagaatagaaaaacaatagaggatatcagtgaaaccaaaagatagttctttgaaaaaatcgacaacattgacagatctttagctagattgacgagagagagaagagaaaaagagaagactgaaatgactagaatcagaagtgaaagaaaggaacattactacagtcccttaagaaacaaaaatgggctgggcatggtgactcacgcctataatcccagcactttggtatgctgaggtgggaggattgctttagcccaggagttcagtaccagcatggacaacatagtgagacctcatttctactaaacataaaaaattagccggatgtggtagcatgagcctgtggtcccagctacttaggaggctgaggcaggaggatcacttgagcccaggatgtcaaggctgcagtgagccatgattgtgccaatgcatttcagcctgggcaacagagcaagaccctgtcttaaaaaaaaataaaaatgattataaaggaatattatgaacaactatacatcaacaaatcagctgggcttggtggctcatgcctataatcctagcactttggggggctgaggtgagtggattgcttgacctcaggagttcaagaccagcctgggcaacatggtgaaacaccatctctacaaaaaaaaatagaaaaattagccatgcatggtggtgcacacctgtagtcccagctactcgagaggctgaagtgggaggatcacctgagcctaggaggtggaggttgcagtgagctatgattgcaccactgcactccagtctgggcaacagagtgagaccctgtctcaaaaaaaaaaaaaaagtcagcttagatgaaatggacaaattcctagaaagataccaactgttgaaacaactgacttaagaagaaatagaggccaggcacggtggctcatgcctgtaatcccagcactttgggaggctgaggtgggcagatcacgaggtcaggagatgagaccatcctggctaacacggtgaaaccccgtctctactaaaaatacaaaaaattagctgggcaaggtggtgggcacctgtagtcccagctacttgggaggctgaggcaggagaatggcgtgaacctgggaggcggaacttgcagtgagccgagatcgtgccactgcactccagcctggacaaaagagcaagactctgtctcaaaaaaaaaaaaaatacatacatacatacatacatacatacatacatacatatatatatatatatttccctagctaaagtaaaaaatggtgttctggttgcaaattgatagtctttacttcatttgacctctttgtagcatctgaattcttgactgtttccttctaaagctcttagttttgacttccacaaatgttcaacttctgattcttctattgttcggactgttccttcttagtatcttttgctgggcctcctttctctgactgctagaacatgttgacatgttgtagcatattctctgactttatatatatatataatatataaataataattatatataaaatatataaataattatatattgtatataaataataatttgtatataatatattatatataaataataatttatatataatatattatatataaataataatttatatattatatatatatttttttgagacgaagtctcactctgtggccatgctggagtgcagtggcgcaatctcggctcactgcaagctccacgtcccaggttcagaccattctgcctcagtctcccaagtagctgggactacaggcactcgccactatgcccggctaattttttgtatttttagtagagatgggttttcaccatgttagccaggatggtcttgatctcctgaccttgtgatctgcccgcctcagcctcccaaagtgctgggattacaggcgtgagccaacgctcctggcctggctagggaaatattaataaaatggcagaggtggagacagatgttaaagaagtggaggcattgggtgctattttgagaagcattgctctgaaggaaagaagggagaagacagtagtttgtacaggaagcaaggttgttgggagagagttctccacggatatctcacatttcttcatgtttcatgagtaaggcactgactgcctttgttctagactgttttctcaaggatgtttatatagtgagcacccttgaaagacagagatagtatctccctccacagctcaaagatctgtttattgcccagtgtgaaagattccctaagctccaagctcagggttcctctcctataatggacccgactgtgtgtgtaggcgtcatctggtcccctttgcagtgccctgtgaaaattagggcttggggaactgaagcaaatatgttgatgttcatgctgcttgctgtgccgtaagtgacaaagtcttttgtctctgacagaggggtttcctatcttctgccatcacccatgtaattgtggcaggttgagttattagcttgcagaaatggtgagatctcagaccctcttgatacttgacaggaaataaggaggggtttgttttattttgattcgtttaaatatgagacttgattacaggttgaggttgaagatgcagtagtggggaagatgagtttgaaaataattgatatggaaaacaatctctaaagcaagatcaatgaggaactgagggatgagcataattgcaagaaattagccttgcacatgaagaaggatagaagataaaggatgcatgtgggtgtaggcaattttttaggtagaagaatgtgaaaaagatgtttcatgcttttcatataattttctattgagagtagcagattatgttatcagatgaattaagggtgagagggtagagacctggatcagcatggagaaagtgaaattagctgcagggaggaatgagagagagggcaattaagaatagctaaataagttgattaaaggccttagagataggaaacagttaacttgttattccattatacagaattgagtgatttttttcccctaccaccaatgctcaattacctgtgtgtaaattgaataagacagacaattggactgatcctgtttagagtttacaggacatgtgcaaatgaagaggcaacaggtgacaagggttttgaggccactagcaataatgtaattaaagtgtgggcttttgggcttaggctgaagtgggttgggaaggcaagtgagaccaggatgactgatcttaaataagaatttttaaagctggctgggcatggtggatcatacctctaatcccagcactttgggaggcccaggcaggcagatcactggagcccaggagtttgaaaccagcctgggcaacatggagaaattctctgttatttaaaaaaaaaaaaaaaaaaaaaaaagaattcatgaagctacaggtctagatgaagttgaaaagcaagtgtgttagtgtgttgggcatatgaaggttggagagatgaaagtctaaaactacactgcccaacacgacagccactgtccacatgttgctgttgtgctcacgcctgtaatcccagcactttgggaggctgaggcgggcggatcacgaggtcaggagattgagaacatcctggctaacatggtgaaaccctgtctctactaaaaatacaaaaaatgagccaggtgtggtggcggacgcctgtagtcccagctactcaggaggctgaggcaggagaatgttgtgaacccgggaggcggagcttgcagtgagtcgagatccagccactgcactccagcctacgggacagagcgagactccgtctcaaaaaaaaaaaagaaaaaagaaatgtagctagtgcccctgaggaactgagttttgaatttaatttacatttaaatttaaaaactgaggtattatgaaaagttttaggccagctgtgagagttagccaactacagactaagagagcatagtctccaagatcacccctcactctgctgtcacctacaagttcaggaaattcccaaaaccggttcagtttgataaatagctagaaggattcacaaaattcactgaaagctaatatactcccggtttggtttaatacaggtaaaggatacagattaaaatcagccagggaaggaagtgcagagtccaggagaagtacgaaatgcagaacttttgttgtcctttccatgtggatacaagatatgttacactcctggtattgatgtgttacattgtgtacagagcagtacccatcagggaagctcagcccagcctctgtgttcagtgtttttattttacataagcctgattgattgattgattgattgctcacatgattgatctgtgtgtctcggtcaactgatgctcgtgacccaaagcccacacgtcaagtcacgctgttgtgcagccaacaatgtatatccagcctctaccctgagactatatgggtgtggcgaatcccagcctaaatcatgttattagactctctggcatgacccaaggctcccagacagagacactccgagcagacataacattccaagaacccagagactgcttcccagaagccaagggaaggccaggccttctctttgggtaaggccaagttcttcactctgcagagtctaaaatatttttctattaaacgcaactcttattttgataaaactacattacaccttggctatagacaacttagtattttagttgtgatacgcttataaagtataaaatacacagtggattttgaagacttactatgaaaaaagaaggtaccctatctcattgctattatttttattgattacattctgaaatgatcttttgatgtatttggttaaagtaagttactgattttcaaaatgagtgctttttttttttacttttaaatgtgattacaagaaaatctgaaattatataaatggcacacattgtattttatttgatagtgctaatttagaaggttaagataagagagggggaagtttagaatttcagagttaaaataatgtcaagcaaagacaagttcaagatgtggccataggaatagttgctatacattggtagagttctaggtcaccggagagaaagaaggctaaaggaaccatgaagcaaactgtcaaataagttatcctcattgatgttcacattccctaggtgatggcagaatttgagtggagggcgcaatagactacaaactaggtttcggtgagtgtctttgatgaatgtgaaggcaagagaggcagaaagggagtataccagctgcccaaacatatggcgtagtattgttagtggagaccttgaagaggttacattaattcctaatccctggtggaatattgtccctttttacctcaagaggcctgtaaaggaattgctagtcttagaggagttggttggaaaagtgattatcaatgggaggtgttggccccgatgtaaaagccctgctgcccttctttgccctctttgtccctccttaacttttgtgacccatctcaaatgttattccccctgtgaactctgctctgattttgccaaatagctaattacctttttttcttcactttgaacatacctctcctatagcactttttgaagtaattttttttttcatttctaagtttgtcttttactggtaatttagactctggtccatttctttttcctttgactattttccaaggggcttgattgaatccatgaatgtggtgcccacagatagagagggaagactatatatgctgaattcaatcacttatcaccacctccataactaccaatctggtctaagccaccatcatgtcttgctaagatcactgcagtagcctttaaatagtctctctgaatctgccctgacttcccccccgattatagctagaaggattcttttaaaattcaagtgggaccttaccactgagctacttctgttggctttcccatctatttggaataaatttataattcctactatagcctataagattatataatttggtctcctgctgtctctcaccacagctcctagcactctcctcctcacatcggcatctttctttttcattaaacccttcgctgtgctcccgctttaagaccatatattccatttcttcttcctgaattactcttttcctacatatccacatggctgtctctcctgtttcttgccagtctcttatcaaatgttatctcattagagaggtgtttgctcaccatgctgtctaaaatctcattcttcctactggcccattgctctgtagtctctgtcttgctttacttttctttttggtttttatcatgaactgacatatatttatttgtttttttactgtcttgagtcaataaaatttacgtgccattaaagactttgtcatttttgtttcctaccaaatcttcaatactcaaaatagtgcctacagggaatgcatgttccataaatatttattgataagttgaataaaatactaagtgaatgaaagaacatcactggattgctgattatggcgtttaagttttattcatctgtgtcttccttgtttaatgtagtgtctaacatatagtaggcactcagtaaatgtatttcattgtgtcataatgaaatataactaagtcaagcatggaatttgcatgttatttaataacatcttagttaaatgagtttttgacatggggaaagcaccttttttgggtaactgtatagagaaagacatattgaagattatgaattctaagcagtgtaataaatagacttcagtaattggttatttcatgaatatttactactcattcaattgacttatccagtttatttttgcatactattcagccttatattatgaaggagcagtgatgacagtgtgggtttatttaatgttacaaacagaattgagaaactggttagttttgtaaaccactaaatttataatttaaaacttccacactctgatatctttagatatatatccccaaacttcctatttgagaccatgaagtcataaatccagcactttatcaagcaaaatttcctgaataccaggcagaactcatgggcatttaaaacaaattactaatttaagaggagtctgttgaaatgtgtatgatttattatgaacattctcagtgtcttaaaaataatatttcttaatggtgccaacatgtatggaaccctgaacttctcacaaagccattcatttatgccataggtcactcaaaaactattaggacagaggatcagaaagactaacttgcataaccattgtgtacaagatactgtgttaagtgtttcacataggttattttatcttgtgactgcctggaagttcaagaatacaacacatttgtttgaacactactatgtactggtttgttgtggctttttttttttttttacatgtttttatttaatccgcagcatcctttatgtcttcacaactaaactaccattttcccactagtttatttactcctttgattattaaaaaaggtattttcggccaggcgcggtggctcacgcctgtaatcccagcactttgggaggctgaggcgggcggatcacgaggtcaggagattgagaccatcctggctaacatggtgaaagcccgtctctaccgaaaatacaaaaaattagccgagcatggtggtgggcacctgtggtcccaactacttgggaggctgaggcaggaaaatggcctgaacccaggaggcggagcttgcagtgagccgagattgcgccactgcactccagcctgggggacagagcgaggctccgtctcaaaaaaatcaaaacaaaacaaacaaacaaacaaacaaaaacttagctattttctaagggtctcctaacaagcaagtaaccatgctactgaactttagtcactctgaatcaaaataattgacttgtatttatttccctaattaatttcccatttattattattcattttttgttctgttttcttaatatcagatatgactaacatttattttatttatttatccttttttttttttaatgcccccaccaggagtgtgcaagtggagagatgcatggatgaaggaggggagctggcgggggtgggtctgtgaccagcatttatattgtaactggccaagatgtatgaggaagccacctgtgctttgacctcactttacactaaaacattcatttatagtctgatcatccagtcatttctaccatgacataaaaataagagccccagagaacaaatcaaattatttttgctgtattgagtatatataaatcccaaagggccaggcatggtggctcacttctgtaatcccagcactttgggaggctgagatgggcagatcacttgagatcaggagttcaagaccagcctggccaacatgttgaaaccccgtctttactaaaaaatacaaaaattagctgggcgtggtgacacacgcctatagtcccacctactcgggaggctgaggtacaagaatcacttgaatatgggaggcagaggttgcagtgagccaagatcgcaccactgcactccagcctgggtgacagagtgagactctgtctcaaaaaaaaaaaaaaaacaaaaaaaccttaaaggaatatttttgcctggctcctacattaacatttactttctctgaaaatcataaccctgtgtttgttattatccagtgtctacaaacagcccagcttctatagttaggtaaagtaaattcaatatcagttgttctttcataatcaaaacagaagtctacaatgccattcttacatacaacagcattgacagtaattccttactatcatgtaatagccagggcatgtttagctttctgcagatgtttcaaaacatcttcttatagtttgtacaaattacgatgcaagaaatccatacatccattgagttgaaaaatgtctaaattttttataatctaaatttttaaataatctgtgacaacctcatctcttccctacaaacatttactttttttctatgctatctatttatgtaagaaactggattgtcttaaaaaatgtcctacatttggaatttggctgatcatatatttattgtgtcattcaacatgttcctgtagttcagtgtttcttggaaagtggaagttatatttaggaatttgcttagttcagtttttggaggggaagcaggagtgctccatagttttttattgcatcacttcaagagttgtataatatctgattttcccacttttagtgatacttagaataatcttcaggtatagttattgttcaccaaattgatcctttataaagtttcccatcagtcttttacgtaatgttttatctactcctgtcatttagttgcctagctatttcattagaagttgcaaggccgggcttggtggctcacacctgtaatcccagcactttgggaggccgaggcaggtggatcacgaggtcaggattttcagaccagcctgaccaacatggtgaaaccttgtctttattgaaaatacaaaaattaaccagccatggtgatgcacacctgtagtcccagctacttgggaggctgaggcaggagaattgcttgaacccaggaggcggaggttgcagtgagctgagtccgcgccattgcactacagcctgggtgacagagtgagacttgtcttaaaaacaaaacaaaacaaaaaagaagttgcaaaatggtgattatttgaattctctcattcattcaacatttatgagttattcttcttctgtaaagaactttgccttataaactacttagaaattatagtaatgacaagataaatgcttgattctttcttttccttatgtatcagtttttagaataatgaattggttctctgcaatctccagtggagactaaggaagttggttttctattttgtaacataattatgcaattatggattttagtatattttatgtgcttcagtccattaagtcattcttcttttgaaactgaaattattccacttagccagtgggagcctggagcctcttcaggctgactcctgtgtccttttgatgtgagctcaatagtctttgatatttttgttgcttttaggcaagatgtcctatgcttatcttgaacatttcctgtaccagacatggaatcaaacatttctcctaggaattctggtttggtctcctctcctctcctctcctctcctctcctctcctctcctcccctcccctctcctctcctctcctcccctctcctctcctcccctcccctcccctcccctcccctcccctcccctcccctccccttccgtcccgtccccttcttttcattttccttttctttttctctccttctcttctcctctcctctcctctcctctcctcccctcccctcccctcccgtcccgtccccttcttttcattttccttttctttttctctccttctcctctcctctcctctcctcccctcccctcccctcccctcccctcccctcccgtccccttcttttccttttccttttctttttctctccttctcttctcctctcctctcctctcctctcctctcctctcctctcctctcttctcccctcttctcccttcccctcccctcccctcccctcccctcccctcccctctagatagagtctcactctgttgcccaggcgggagtgcagtggtgtgaactcagctcactgcagcctccgcctcccaggttcaagtgattctcctgcctcagcctcccgagtagctgggactacaggcacacgccaccatgcccagctaatttttgtatttttagttgagacggggtttcaccatgttggccaagctggtcttgaactcctggcctcaagtgatccacttgtctcagcctcccagagcactgggattacaggcgtgagccaccgtgcccagccaactctggtttctttaaatggaaaatagcatttaaagaccagaatttgggcctcagggatgctcgttagtgctactgggttattattgcttagaggaggggacagagctatgaaatatatatttttaatggagaggaaaatgaaacaagtttatactaacactccaattaaaatgtaagatttcagcatttttacttcttaaatattatatctttagttctcttttcccttatgttgaaaattgtggttccagatgacgttaacatagtcacttttttgatatgagtgaggggagagactgattgattgaaaacaataccagtagtattacaaataataaggagacttgtggttctttttgttcttaggatatatcccatgaagaattgtcttagtctatttgggctgctctagcagaatacttttaactttatgtatagttaggtattatgtaccgtaatctactgattttttacaggttgctttcaatttttagaaatgttcttctatttgattcaattctgaattgtttcagttatgtaagacattacttgtttccaaagttaaagctacaaaacaaggtgcattcatatgtctggcttccacaccttttccgtaagtaaccatttatttaacattattccttttggcaaatctaaataaatatatgcatatacatacacatgcatatttgtattttcccttccttcctacacaaacagaaacacactctacatatttttctacgtcttgcagtgcttcatggatataaacccatccatggaccaaaaatccatgggctaggagggaagacacacaagataagaaattactgtaatataattgtttgctgatgtcatagaggcagatagattaaatgtcattagacacaaattatggagcagtttttctagggcgggtgagtaggttagggttagcttcagagaaatgacctttaagctggactttaaaggataaccttgaattccaaagttcagctggggatggggatgagaataggagacaggcattccagcaagaagtaaaaccctgagcaaagtgtacagcatgttggtgaaacagcaagtacacatgcaggtgaactatgtttatgaattagaactatatattgtaggctgtgagattttgttgaaaagttctaagttaaatgaatgacacgaccaaagaaatgtgttagaataactggtaacaatgtaaaggatgatgggcagaaagggaaacctgaaggatagagaagaggaggcatactctttaaatgtaagtcgaaaatttagcgtattttgtaagtaattggatgttaagagtgaggaagaaagaggagttgaagatgattccaaagtttctttcatggacatctagatgatggtaatagggattcaggaggagaactaggttacagcaggaagataaagagaacgttagttcaggccaggtgctgtggctcacgcctgtaatcccagaactttgggaggctgaggtaggtgcattacttgaggtaaagagtttgagaccagcctgaccaacatggtgaaactccgtctctattaaaaatacaaaaattagctgggcatggtggcacctgttgtcccagtgacttgggaggctgagataggagaatcacttgaacctgggaggcagaggttgtgatgagccgagatcacaccaccccgcttcagcctggatgacaaagtgagtctctgtctcaaaaatgcaaacaaacaaagagaacgctagttcagtttggtccatgttaaatttagatatctttcaaatttttttaaattataaaaataaagatgggatctcactatgttgcccaggctgatcttgaactcctggactcaagtgatcctcccttcttggcctcccagtgtgctgggatcacaggtgtgagccaccacacctggcctaaatttagatatatttatgatacctagatgaagtttttcagtagacatttgaaaacaggagtttggagctcaggaggttagatgactagaaacagtgaatttggaagccattagccttatgtattggcattagttaccatctcatgctacataaaattccctggagacatgtacttgagctgttccctttggaagactagttagagctaggattgcaacattttgatagtcaatattttaacaaatcgaaaggtacctctgttgacttggagcatgcaggttatactaggatctgattagaacctctgttacaggattagcaaaccaagtattgctaataccttggtgtagcatgagaaacattggtactatatgagaaaacttgaataacatttttgaaaggccttttgtaatatatgagattctatttcaaagcctacctgggtttatgcttagtctagaaatactttttaagaagccataagaaaacaaatccttccttatacattactgtgaatggacttgatatgaaaaggatggcatgttttttatgaagacaacttaaaaagtgtgtagtttacaaaccttgtttaatagcaaaatgaagagtaaaaaaagtgtttttgtaaaagcttatagtctcttctctcattggtattccttgagttaatttataataataaattaataagtattaataatcaatataattaataataatttatcattattaataatagtttaaagatagggtcttgccctgttgcccaggctggagtgcagtggcatgctcatagctcactgcagcctcgaactcctgggttcaagtgatcctcctgcctcagcctctcaacagattaccaggtgcataccaccatgcctggctgattttgtttgtttgttttctgagactgggtctcactctgtcgcccaggctggagtgcagtggcacgatctcggcttactgcaaactctgctttccaggttcaagcgattctcctgcctcagcctcccgaatagctgggactataggcatgcgccaccacacccggctaattttttttttgtattttgagtagaaatgaggtttcaccatgttggccaggctggtcttgaactcctgacctcaggtaatccacctacctctgcctcccaaagtgctgggattatagaggtgagccaccgcgcccggcctatgcctggctgatttttaaattttttgtagcaatggggtcttgctttgctgttcaggctggtctttaagtgcggggattataggtgtgaaccaccatgcctggcctaatctataattattaagtatccatcataggcagagtactattttatgtgtaataaggaggcatagaaaaaaatagttctagttccacattttcaaaactaaagcatatcctgtgataatgtgtttcacgaagaaattgtgttgtctcaaaactctcagggaaaaagtttagtttatttggaagagacagaagaaaatttagtatactttttgcttgtatgccaagtacagacttggatatatgaagacaggtcatatatgttagtgtgcctttttagattagttgggaagactcttgaattcattgaggtgagcaatagcatttagcattcattttgctaataaaatctaaggttcaggaaatagttttaataaacagggataggaatgtattcaatcatcttttgttcttttaataaatacttattaagtgcttaatatgcgtcagataccgttcattgtactagacacagtattgaacaaaatggcaagaatgcctgccctcatggagcttgttttctagtggagaagacagatagtacaccaactaagtagggtagaatgtgtcatttgttagaaaatgataaagtgcgtaggggaagtgaatatgaaattgaaatatcaggaggtaagctgacaatagagataggaaagacctctctgagaaggttatacttttgtaaaagatcatgcagctatttggggaggagcattccaagtagaaagaatagaaagaacaaaggccctgtggcaggagtatttctgctgtgtttgagaaatagcaaggtggcatatgtgattatagtagaacaaaagagccagtgaaagaaggtaaggtcaaaggtcatgagctgggaacccatccggaggttttgacagaaaaaaatgatgtgatcttatttaagatttaagagaattaccctgctacatagaaatgcagacttaattgtttgagtgtaggagtttgaggctacaatgagccatgattgggccactgcactccaacatgggcaacacagcaagaccttgtctcttgagagagagagagagagagaggaaggaagaaaagagaaaatgcaaacttatattcatataaaattctatacacaattgtttaattgttgatagcagctttctttgtaatagctaagaactggaaacaaccaaaatgtccttcagtaggtgaatggataaggaaactcttgtacatctattccatgctgtactactcagcagtaaaaaggagcaaatggggccaggtgcagtggctcacgcctgtaatcccagcactttggggggctgaggcgggtggagcacgaggtcaggagtttgagaccagcctggccaatatggtgaaaccctgtctctactaaaaatgcaaaaattagccgggtgtggtggcgcacgcctgtagtcccagctacttgggaggctgaggcaggagaatcacttgaacccaggaggtggaggttgcagtgagccaagattgcaccactgcactccatcctgggtgacagtgagactctgcctcaaaaaagaaaaaaaaaaaaaaaaggagcaaggttaatagacacatcaacttggatggatcttaaggacattatggtgactaaaaatatcaggccagtcatggtggtttatgcctgtaatcccaacactttggaaggcctaggcaggaatatcacttgagcccatgagtttgagaccagcttggtcaacttggtgaaaccctacctctaaataattagctaggcatggtggcagatgcttgtagtcctagctgcttgggaggctgaggtgggaggaggtcaaggctgcagtgagccgtgatcttgccactgcagtccagcttgaatgactctttctcaaaaaacaaacaaacaaaaacaagaaaataaaaaagccaatctcaaaaggtcgccgactgtatgattctgtttatatagtgttcttaaaatgatgaaattacataaatgggaaacagattagtggtttctaggagttagggatggtggggcatagaggaacaagcatgactgtgtaggggtagtgcaacggagatctttgtggtggtgaaatatttttgtatctttttttgatacaaaaaattgaacaggggaaaggcaagatccgtttacacatgcaggcatatatgtgagagtactcagtaatgactgagtccgaatagttgtaattgctattgtagtaattgcagttgttgttccacaaatctacacatgtgataaagtgacatagaactatacatacgcattgtacccatgtcaaattctgggttttgatatcgttctataattatataagatttaaccattggcggaaactgggcgaagggtacacgggacctctctgcactgtctttgcaacttcctgtgaatctataattatctcaaaataaaaagtttttaaaaaaagattactaccttggctgctcttttgaggagtaatcctaggaggttattgcagaaatctaggagtgaggtagttgctgttaaatgaggctggtggcactagagtggagtgaaggcaggggtgagaaatagttggattctgaatatgatttgaacgtagagttaatagaatttgctgatggataggatgcagggtgtgagagaaagagaagaatgaaagatgccataaaagtttttggcctggtcaatggaggagcaaagaaaagagatagtaacaagaagcagcaacaagtcaagaagcccggtaagaggtagttggattcttggcaagaaagacaaaatgacaaaccctcttcctctagtcagtggcagccacgcctgggagttagaggacaataggatattaaagtgactgcactcttattaacctgcttagggggagctgagttatcttggcctcgccctgcttttttggaaagaagcgtttgtttgataaacaggaagtcgtttccatgggtgtaggaagaagaaatgatagaactgagtggcaaagcaaagaactactagctgtggttagtttggaattggcagaagttttttcaggtagtcacctaagatgaagatgagcacacatactgccttttcccttttctaggctgggttcattcttcactgaaatgtggtatttctgcctattgcttgtcctgctgtcagggtatgttcattttcagctagtgttttgcatcaactatgagttgtagacttagcagacaaatggagacactgtctgtttagagtggaaaagtgacttattttaagaaatgttggctccgcaccactatcccattagtggcatacctctgacactccattgaagctggcctagggaaggtaagactggcttctgtgtatttttgctctttgaaaggtcagaacctaaatgtaccacaagatattttcttcctgagtaagattgggacaaaattacaaacagtgaattctgaagcaaacttacgtgctggtgctctaatactttagaaaattcaaaatcgatttcctgtacttctaacaatattactcttcgtcgggtatgtaaatctcttagtgtcacttacttcttttcattttgcaaggaagggcagaccaaaaagattaaagaagaccaatgccaagtcatggtcatgggaaagtgagaaagagaatttaaaagtactttttacttttttttactttgttttactttttacttttgaaaagcacttgaaacaggagaaccattttttttccttttaaccgagagtcacctcatccctgtctgggtacatgtttggagtgaaattgtggtcaaagaaaactttaaatttgtcccagacctataatggcaactaaatagataagtagttgattgatggtgaaaaaagcttagtgtgatggacttgactttatgcagcaggtgtctacttgaggtttgtttagattggtgggggtggggagggggcaggactctagctaggggcatggctgcagtgtggatgattgggatgaggatatgggtagtatttgtgtctcagtatttaggagaggtagttcactgaattgcctggaagaagcagaacaactctggagttccttgcaattggagtttatcctgacaaggttcaacgtacattttactttgcgtattgagtggattcaggagccatttggtttcatttgccttctgaaagtactgcagtatttgtaaaaatgctgtgactatgtgttaagtccaggctggtctacagctctggatttcttcactgaaagttaaatatcacatttgaacttgaagaatgtttgctgcctgcctctagagcatatacgaatataaagcagctatttgtcagcaggcagctgaaaggcgattttcagcagggagtgaaaaccactgcaggctgctggcttcctggcacacccactagacctcgtaggtttacagtgaaagcaaaccaatgggagtaggggttggggggataagatgggcaaaaatcagggcagaggctgaggtctgaatgcgattgagccactggaaggagcttgcatgtgaagagcacagtgctcccaaagagaagaaaacttgaaccctaaacacaatggctaggagcaaatatctaatgtgaacactttaaaaaaaaaaagtgatttgttccgtaagtgtatttagagtccaggggaaaaaaaaaagtgatttgtttatcttctttgtatctataactataggggtactgaaggtaactttggggaaagtattatagtttaagctgtactacccagtgcgctgttacagctaccttttaaccagaaccattaacagtgacaatcgatgtgtagaaaatcacctttaagctctgcagaatcctgaaggactttgtgctctattgactagatgtttaagtattccctatatagtattcagtggaccttttcaaaaatgtcttttgcaacatctttgaaagtgaaagttttaacgtatgatactcttaatcagagtacacgtttattcccaaatattctgttctttctttgggtatagcatgcaacagagtttacttgtatttagaagatcaagaggtgggggtattggcaggataaatgatttgtccagggacaactgatgtgtcactgtagagataaaacagaactaggctgcattccagcagcttctggcccgtataacagttttgagaactttccaatcactttaggaaaacaaggtacttagaaatttataaagactttcttaataaaagaaatcacttattttggaaattgtgaaattaatcattctgcagcatttaagaagcactttgatgtgttctggtaattagtatttactgccagacaaatgtctcttgggcattttaattaatgggtagcttggccaaatgagcttctgatggtaaaccttcataagggtttatttttatgtttctcaagaatagctgtctcttcaaagctctttaattagacaaggtttagcaactaaaacatattattagaataattaggccttgggttaagagaaatagggggtcagaggagcaggtactgttagaaaatggcctcttaaaacatagcattctacctctgatggatggccagttctttcacagcttctgttaagttactctccctagtttggacttcgtgttgtttaaagttcatagcagacctcaccggaagcctaaacacacccgagtgggagcttacttatccccacctctgacctcccagggaaagcttgattctagtccttttaactgctaagtggaagacttcttattttctcctttttcttctattaaatcgataatcttggctataacaatgacttgtatttttgagggagatgcttcaaaagccttgtgtgtggcgaacaaaaattacaataattcctttgaggatctttcttaatgatttatattatctacatataagatatgttcttaaagtgactacagtatttgcattccagaatgttatatttcttgtggtcagaatgcagtttgaattattttgcaatctgctctgtagatgggctggcatctaactccccttcttcaaccttctcccctaccatttcttgccacaagcgctcagtcttggcagttattgctagtaaatatgtgctaccctgaacttcctctttgtggtgaaggaaagatacacctgactggtcctgtgagggagtgagatgtcaccaaaacaattgtgtattctaccaaaactgttgataaatcacaatatatttatctatattccctcatttttcactttcctactgtctcaggatgcttaggatggcaaatatgtccttttcccagctagatcagttgattaaaggacagtgctcatgagactattagacatttctaacagaacaactgtatcatagctgacatttctaatcccactagctgtcatgacctatatgtgttgttggtttgataaagaactgagtcaaagatatgtatgttgttggtttggtataaacctactgctattattagaaagttcttaaagaacctgctaatccatcaaatcatttttgaatattgaggatagcctgctttatagtattatgattttatcacatgtaaattcttttgatataccttagttaacaacatggccaatgaaatgattttatttgagttggtagaaacttcacttggtttttgattgatgttatctgtaaaaattatcattttgtaagaaccatttggtgagccccataaatgcagatataaagatgtaggtatatcgctatgcactccagagaacagttaccgagtaagtgtgtttttatgtcaaatcgaagaactttgagaaagcagaaagatagtaacctaaacagagtgctctgtcgaggagttttctccccctagcagtgacgaatttctgtccaccctttccttaaatgatttaatattggggccttgcttttttacctcctctttaacacaggaaatatttctgatacttatcttcatgtgtgtgtttgctcatgtctgtgcagtcttctgcagtgaggatatgaaaagaaaggtagtgagttctatgacccttgaaaaacaccagaactctcttttcctaatgaaagtacaagtgtgttcttatgcatacttttgtataacaggatttatacttaaaatagtttggatacttattactaatgaattttgatagatgcaaaccaggactatcaatgtgttgttctctcattgctcattttgcctctttaactcactcgagagggccccttgtagccctccttaagtctaccttttgaaattacacaagtgtccaaaatgaaaactgactgtattcttcttcaacacagaccacctggtggcccatggtagaatggcagaaaaggaggcacgtcggaagttcaaacagatcgtcacagctgtctatttttgtcactgtcggaacattgttcatcgtgatttaaaagctgaaaatttacttctggatgccaatctgaatatcaaaatagcaggtgagaactgtactgaggatgtcagatagggacaaaggagcttttccttggggttctataagcaagggattatctgtttccatctcttcagaaagaactattgtgaaagtaaggacaatttaagatgaaaaaaaaaatagcctgaaaattgataaactttaaaagtacttcccctcccctgccctttttttttttttttcgagactgagtctcattgtcgcccaggctggagtgcagtggtgcagtcttgactcactgcagcctccatctcccaggttcaagcgattctcctgcctcagcctcccaagtagctaggattacaggtgcgcatcaccacgcctggctaatttttatacttttagtagagttggggttttgccatgttgggcaggctggtcttgaactcctgacctcaagtgatctgcctgccttggtctcccaaagtgctgggattacaggcgtgagccaccacacccggcctgtttatttttaatgtagtatcagctggaactaggctggggagaaagaagggaaaggtgatatttaaaatactattactttggttaacgggtccttttttacataagaaataaaatatgtaataaagtggaaaggaaaactactaaaattgtataccctctcaccttcacttgagaaggttgatttatgtcactgctgacacagagcatacttattctaaaggctgtaattgtatgataatttaggaaaaatagatcttagagtggcttataggcagtccagctttttgtcttctcaaattttactagtctgcttatctgacagtgccttgagagcacttttcactgccttgatctgttcatgcttaattttagtaaactatcagcattttgcctaatgaatacagactcaccatttactaataaaattaagtgactgcaatctatagagaaactgtaaatatgaaaataagccatttatgtttgccgacactttccggtatagcatcgtgtatccccggtctcccagataaaaggaaggacatctcatatagaaaactaaaatatagctagaatgtaattgtctagaaaaggcaaggtataaagcagttctaaggattttcttccttagtagaggtgggatttgagagtttggatttttatcataggtcaaagttacctaagggtacctttgcagggtcacaattcttctgagagttgcttttgtgtagataagcctgttcacttttacatcctggagcatcacctagctttttatatatctgaaactgacagctacacttttgtttagaactttcatatcatttataagttctttcactcctgcactagcttattacagagtacacaggaattaaaggctttctttatcttatataaaatcatgtttttcctttgctctcatgtcggttttattttctccaaagctctatagatactggtagttcccacaaaggtgtgtggcatggaaaagcctggcaatttcaaaccttcttttgtaattatttgttgtagcttcaattaaattaatactaataatacctactaaacttcacaacccttaaaactgtaataaaagattgattagtgtcttattattactataacaaattaccacaaacttaatgacttggaaaaacacagatttgttagcctgtagttctggaggtcagaagtccaagctgggtctcacagggtgaaagttaaaacagcagcaagggctgttcctcctggaggctctgaaggaaaaatgtgtccttgccttttttagcttctaaaggtcacctgcattctttagctcagccccttccttccttcactccaacctgtggcttccattgtcacatctcctactcctaattccgaccctcctgcttccctcttgcaaggacctttgtcattacattgggctgtctcagataatccaggatcatctctctcccacccccacctttttttgtttttgttttcgagacagggcctcattctgttgcccaggcaggagggcagtggcgtgatctcagctcactgcaacctcaacttcctgagtatctggaactacaggtgcgcgcttctatgcccagctaacttttgtatttttagtagagatggggttttaccatgttggccgtgctggtctcgaactcctggtctccagcgatccacccaccttggcctcccaaagtgctgggagccaccgtgtctgtcctcatctccccattttaagatctttaatcatgttaatacaagtcctttttaccatgtatggtaacacattcacaagtatgggggattgggatatagatgtatttgggggccattattcaacatgccacagatgtcactgtaaggctctttggattatagattagggtagtgaattaaaagaaggccctctggacacgcaccacccactctgcactgaccagcccacctggatagcagaggacacccccagcccccaccaagcattgaagacatagtttatttcctcatatcctttctccttgggtgtagttggggtggggaaggagggaagactggggtcatctccattccttgggctctgtgcccgagtccatggtgcaccactgtgctgcgagctgtggggcctgctgcagtgggagtgtgtggaacaccttgaccaaaggggagctttgtcttgtgtgttttgaaaaaggcttaatgaagagaatgttgttcattcttagtagtatagtttgcaattcttaatgacaaatagtaagtttcagtagaaaacaaaacaaaacaaaaagaaggccttctttatattctctagttttattttccgtccgctgacccaagattaaaaattttcttaatgctcccttggttcttgattttgaatttaggatgattttgatttagttaaagaaatttcttttttttctttttttttttttgagatggagtctcacactgttgcccaggctggagtgcagtggcatgatctccgctcactgcaacctctgcctcccccaggttcaagcgattctcctacctcagcctcccgtgtagctgggattacaggcatgcgccaccacgttctgctaattttttgtatttttagcagagacgagttttactatgctggccaggctagtcttgaactcctgacctcaggagttcaagatcctgatccacccgcctcagcctcccaaagtgctgggattataggcgtgagccaccacgcccggctgttaaggaaattttatatcctttagtttttacattgagaaactcagagtaaaaacagagattattgataattgaagttggaaactctactgaaatatttggtaaggagatttttaaagacttttctgttgttgttgttgttaatagttaaaacaaattcaaggagtcacaatgagagtgtctacctgctgatatataattacagactccggggtgctggcagccagccttgggctctctctgtgttaacacatatactttggcaagatttttaagttcattaacccaaagcgtacatttttattatttgttttaagagcaaaacagaaaaataaatgagcacctctagttttgcggcctgctacaatacctaacattagctttgctcatgcagtctttctcttatatgccatcgttactcagtttctcagtcattgcctgaacctcctttcttgcacataaattaaatagaattatcattctcacctcccagttcttttttgaacttaatggactagtgggagaaatgcttctagttgaagccaactagaacatgactaattttggagaggtaggttggatgtttttgacaggataaggtcagataggtaacgaaatcaactttaattctaaaagccaaaagtaactttcagattcctgatcttttcaatggcctcccttttggtaaagtatcttaaatgtcagtaagaagaaactactatatatgaaagaaacatgcaagagagaaaaagggttttttggttttattttaagaagttagtcttggctgggcgcagtggctcatgcctgtaatcccagcactttgggaggccaaggtgggtggatcacctgaggtcaggagtttgagaccagcctggccaacgtggtgaaaaccggtctctacaaaagttcacaaattagctgggcatgatggcgggtgcctgtaatcccagctactcacgaggctgaggcagaagaatcacttgaacccaggaggcagaggttgcagtgagctgagatcacgccattgcactccaacctgggtgagagagcgagactccatctcaaaaaaaaaaaaaaaaaaaaaaaaaaagagaaaagaaaaggagaaattagtcgtaagcagctcatctttaaaataatcgtatatgttatagtaccaaaataacttggaactaataaaactcagattaggaagtataaaagattcatgttttctgtatgccattgtttaagtgattttaatgaaaataatcatgcatccagtttcgtgtagaagatgaataaattggtctgtggatatttgtgtttacattaatttatttttacattttgtattaatgtggtgatttacatttgatactgtttgtttgttttgtagagacagaatctcactatgttgcctaggctggtctcaaactcctggcctcaagcgattctcctgccttggcctcataaagtgctgggattataggtgtgagccaccatgcccgccccttcccccttcttttttaagaaactgggttaccttctgttgaccaggctgcagtggcataatcatggctcactgcaacctcagcctcctgggctcaagtgatcctcctgcctcagcctcccaagtagctgggactacaggcatgttccaccacacctcgctaattttaaacattttttgtcactatgttcctcagcctggtctcaaactcttggcctcaaccagtcctccctccttaacctcccaaagtgttagaattatgggcatgagccaccgtgcctggcctacatttgatatttgatactgtaaaaagctagctatcacaactgtccatactagttctcttcgagagaataagtgttccctggatagatagatattagttatagatattataagttataattatagtataagttatatcttcagtcataaatactataagattcagctgagcaaggtggcatgcatctgtagtcccagctagttgagatcaaggctaaggcaggagtcttacttggacttaggagtttgagtctagcctcatagtgataccttgtctactgaaaaaaaaaaaagattgaaccattgttccactgtttatgattttttttgtgcttaattcttatttatgaatttttgttctagttctgtttctagagagaataaagcccaggtgaataactttgttttctttctggttttagaattattagtaacaaatccgtgttcttaatggcagtagcaaacctgtcttctgtagaatttttaaagagatgtttctgtcattagtaatacagaagaagccttgatcattttcagaataaagaattttacgacagggagaggtggctcatgcccgtaatctcagcactttgtgaagccgaagtgggaagatcacttgaggccaggattttgagacctggggcaacatagtgagattccatctcttttttattaagaagaaaaaagaaaaaaaaagaattttatttctaaaggcagttaccaagtctagaactaagaatttgtggaggtaatctagaatcttacttgttaacgaagcctccttgcataatggcacagaagagaaaaaagaagcgtgaaacgtgactccagccctaaagaactgaggctatatgggcagcaaacattagatctttgaaaagttggtaacaccaaaattatgctttgcatatatataatgtacttcacaaagcatttttacatgtatcacctaattttattggcatgcaaatatatcttattaaaaaagtaaaatctcttcatcttctggcacttttaactctccaaaacttctgaatttcttgtaaagagcacccaggcaaggtatagagaaccccaatgctgggaaaagagtaggattcttggcctccgacttttaacttttcttgcctgagatgtgtaaggatccacagaagagcagttgaaggactgacgaggcacaacacagctcactcagcatggagccggcatcgctggatgatagtatccttaacagctaccaaattatagttggatacaatagaagagatgttacaaggcatgtcatgactcattatcacattaattgtacagtctaattagcataggagttcagaggatgatagaagtactgtagtttgtaagattccacaagattgtcagttccacaaggactgtaaccatgtcctgtttattgtcacactcccactggctcatacatgcctgttctgtagcaggtgctccccagctttgtcgaactgaagttcaggcggtactgataaaggacataaatattgtattgaggacatggcatttgaggtgcgtccagtgtcatgtgattggatgatcaggtgtagaggagagaattccagcaagtgttaataaggcacctgtcagttgcagacactgatacaggcacgggggtacagcagtcagtaagataaccccttggaacttatattctaatggggataaatagacagtaaacacaaataagctctcatagggctgtgacaaagataaactcgagtaacatggcagaatgatttgtgcgagaggtactgcttttagccaggatcttcaaaacattccacgcagaaagaagaacaatgcaaaggcctgagagagataaattcaacatagaagaaaggggtagaagaaagtccagcatggctggagataatgaataaaatggggattggaagaagttggggtgagagagatggcaaaggccagttgcacgtggttaggatgtgggatttcatttaggttccagtgggcactgagttggagcagcgtgggcagcagtagaatgcacaaggtctatttgaaaaaaaaaaaaaaagggtgagcagctcagtggaagggaaggctaaaggagaggagtctccccgagaaggcaggagcagtagatgtttatattagattgaaatcatttgaatataagatataaggcttaattaatccaattcagtatggagacggcaaaaagctggaagctgagggaagggaagggcctcctggtaataggaaggccagttaaaggctgtgaatggtaaaatcccgcatgagggtgatggtggcagtaaacatgcaaaggaagaaaacggcaacaaattcaagagagaaagcaagcgagaatttctaggaccagataaccaatcatatgtcttgaccaggaagagggaattttgaaagatatgtttagaaataaagaaatgaaattttcttactgatggattatattaagctatcaaaaaaatggtgttttgaaaatggttaatgtattgctattcgaaagtaattttaatgtccttgtccccaaagattaagtagcaaggtgtctatatttaaaatagattgcctgagaaaaaactgaaatgtagctggcttactccctgaagaaaagttctttcaaatgcttagacgttataagaatgttctgaaaattgtggaaacattttttttaaacctaaggaagttggaaacttttgtctttaaatgtcgactcccagaatggtctccatgagatagtttccactctcgtgttattgttttagttggcaatcagtagacagcaaagatcagaaatgcaactatagaaaggccaatatcctggaaagaattttcagagcatggatttaaggtaccatggaaaattttgaccttaatgcagtgagagctagaccattttattattttttagggagaaattaaaacatttcctaactcaattgacctttcacccttagtatgaatatactgagataccatcatatagaaaagaaaggttggaaaccttggatttttgagtacccttccacagtgtgttgactgacagtgcctctgactggtcacaggaagtagttatgcaatactcattatatcaatctaaattgtatttcatgattctaatgccctctttttaggctatcattcattgcacctcccaggttgacatgtccagtgaattgagaccagagaggcctttgtgtttgtcctgaattcataatagagtctaggaattttaatagctagacctgtgttcttgccctgaaatggcatatgaccattaccaagaagcggctctaaataaccttcctgcacgttgacccttgggaaaagaaaatttgaaatattatctctcttgaatcctattcctgagactagaactttacaaatttgtattctacttaatgtcatatctatattttttaatattaagattattaacttagtttaacacagaaaaaacgttgatgttccaggaaggtgcaccctatttagcctacggtttctcgtatatcttggaacactgaagtgtaacacctgaggctgtgtaaacagaggccagcctgagaagctgagaatcaagaatttgatgctcaaccatagattcctcttactcacacttctagtttgtgcagagtgacttctctattacttttcctcagcctcaaggattttcatgccattatctattaattgcacgtcacttattttggggataattagaaaaagggggaatgagaggttgggaatagaaaaagggagagaagcaaagggcagaaaagaaatggaagcttttgctttgaggtcttgtgggggtgggggtggaaaaaaaagtgtaggagaagcctgagcccaaaagcttgcctcctccctctacagggaaagggagttgagcggagtgtaagagggtggatggcatgcgcttctgacctaccaaagcatctggaaatttcagactgctctttgtctctgagactgtgttgggcacagcattgaataaagtgtggatcaataagtatgtgaagtgctggatatgttaattcactggatttaatcattcctcagtgtatacatgtatcataacatgtacgatgtaccctgtaaatatatacaactattgtaatttgcccattaaaataaaacaaaatataaataaaacatgagcagtgatgattaaaagccaaagtttcatcttaatctgtataatatctagaacaaagaaaaataattttatcggcattttattgaagctgcagaaaatgacagctttgaaaaatctcaagcaacgtatggtttaaggaaattaggtgtacacttaagctatagtttgtttgtttctccctttcctttcctttcctttcctttcctttcctttcctttccttccttcttcttccttctttccttcctctcttgtcctctccttttctttctttcgttctttctctctcgctctctttcctctctctctctctctctttcccttcctcctttccttccttgcctccctccctcccttcctgtcgctcagactggagtgcagtggtgcagtcatagctcactgtaaccttgaactcatgggctcaggggatcctcccacctcagcctcccaagtagctgggactacaggtgttttgccaccatgcctggcgaatttttaaattttttgtggagatgggactcgttttgctgctcaggctggtcctgaacttttgagctcaagagatcttctcaccccacctacctaactgttgggattacaagcatgagctactgtgcccagcctcttacctgtagtttctagtttaagaagttttagaagaacattgatattctatccatttagagtagtgttttacttttattagtggctatagaaactataagaactatagaaaagttatagaaacttacagttcttataggaactctaagaacgtttatataagtctgcccaaggtcatgtgtcctcatgaggatcgtaagctcctcaaatgcaagttgatgttgggaagggactaacgaatcacccagagtgctccttcactctgattctgagggagtctttattgtgttgtgtgaagcgtgttggaagccaggtgtggtcgcacgcacctgtagtcccagctactcaagaggctgagatgggagggtcgcttgagccgcagaggttgaagctgcagtaagctatgattacaccattgctctctagcctaggcgacagagcgagaccctgtctcttaaaaaaaacaataaaattttttactttttgtagagatgaggtctcgctctgtcgcctagtttggtcttgaactcctgagctcaagtgatcttcctgcctcagcctcccaaagtgctaggattataggcatgagacactgtgcctgacctaaaaaaaaaatttttttttttttttggctcacacctgtaatcctagcactttgggaggccgaggcgggcggatcacgaggtcaggagatcgagaccatcctggctaacacggtgaaaccccgtctctactaaaaatacaaaaaattagccgggcgtggtggcaggcacctgtagtcccagctactcaggaggctgaggcaggagaatggcgtgaacccgggaggcaaagcttgcagtgagctgagattgcgccactgcactccagcctgggcgacagagcaagactctgtctcaaaaaaaaaaaaaaaatttgatgtgatattatagaaatttaaaattaaagcaatgtcaaaaagagtgaggctgactttttaggcaagcctttgcaaggtggcagaatattagtaaaggtccccattatatcagaatctggttgtcatttatgagttctgaaatataccttatcagttctcttaaaatcataagagagtgagtataatatttgtatcagttttcttagcatcaaaaagtacagtttgctagtggtaggcatgggtatttcatctagtctttttaaaatatcctgatttgagtggtctttggctcgtctttgcggaggttatacacagaccatccttaatttaccatctcaagtagtatacaggatcttttcccagccagtgacttctgaatcctcagagattttcagtgttccaagagattcatgtcatacaaagtgataatgacttttctattttttagaagttaataaatgaaataattacttaggtctttccgcccttcttaaatggaatagtttgagagcctctgagtataaatcgagtctacctgctggcagggcgctaatgagcatgcttatgacttggtcattccatttattgttcaagtagttggttatcataatagctttgaccagggtacagtttttcattgtattttattaagtttacatctattatggatcactggattatataaagcataaagaacactaatgttgaaattcaaattgatgaggataaaaatgataattctgtaatgcctcaagacaaccttcaccaaattcatgatttgtctttgtttggccatggttcttacacagcacatcaaattgtttctagggcctcaagaaacaaagtttaaaaatgttacattacatacatacacacaaaatatgtatataccacatgtatatacattttttacacacatatccgtatctatatctatctatctatattatatccagtttgatttattgggaataaagactatctacattcatagtatattatttgcaaagaagtgctaataagtaatgacccaatatttgttaatccatttcattatttaaaagcaaggcatgaaaataattcatttaatcaagtctggtttttaggttcaaacatgtaagtgttccaaatcctaggtcatgaaaagtattcatctgttttgtgtattataatctcagtatatttgtggcttccaaagccaggtgccgtggttcatgcttgtaatcccagcactttgggaggccaaggcgggaggatccctgcataccagcctgggcaacataataagaccccatctctatcccaccgcctgcccccccgccccatcaaaaagaaaaaatacacatacacacacacacacacacacacacacacacacacacatatatggcttcctactaaacatgatatatcaattttaaataaatactttttcttgaataattgaaataaatagtgtgggtcacttgtatgatgggataatatgaatttgtcttaaaattcatagtgaacttttaaattaatttttaatgtactaatgtaaaataaaatgtcttttagctaaagtctcttctgtatcataaatcatagaaaaatgacaaaattatttttaaaatttctttcccgggaggtttttaagataatacattcctttgaaaggagtttgtgagtcagaaaagctggaaaataaaaaggtaactgtactgatttctttacattctaatccaagtataccatggttttcttgatcagattgagtgagtctctgaactgttgatagaaccttcttcaggaaagccccatttctctagaatataccaattgcccctctggaacttttccttaaaactcatccagtggttataattatatagttacatgtgtgcttgtttcatgtgtatctcccccactggactaatctgctacatgagggcagggaccatgtctgtcttgttcaccttgtactgagaatacatttgtggtccatcaaaaaattgaggaggcaggccgggcgtggtggctcatgcttgtaatcccagcactttgggacctgggcggattacctgaggtcaggagttcgagaccagcctggccaacatggtgaaaccttgtctctactaaaaatacaaaaatcagccagctgtggtggcacatgcctgtagtcccagctacttgggaggctgaaacaggagaattgcttgaacccaggaggtggaggctgcagtgacccaaaatggtggcattgcactctagcctgggcgacagagtgagactccatctcaaaaaaaaaaaaaaaaaaaattgagaaggggagtactttattcccattatcatattttcacatcacctttcagttgggttacttttcagatgtctgctctcatttgaagtttttttttgtttgtttgtttcctattagctttaatctaagatagtattttgttacctactcttaatttctaggtaacaccttagagcttcttaagtgacaatcctatcttcttttctctaaaagtaggcttctgcttatcagaccatatgtcttagtttttaatttggaaaaaggtttttgttttgtttttttgtttgtggttttttgtttatttgtttgtttttttgagacacagtctcactgtgtcacccaggctggagtgcagtggcccgatctctgcccactgcaacctctgcctcctgggttcaagtgattcaagagaatttaaggggacactgattcatcctgttctataaaaggcacactaaaattttgtataccatgctcacctatcattattagaaacttacctgattaaatgattaggcttttattgttcttgttgatattctttacaatcatgactatgatatactcattaatgtttttaagaattccgatgagtactgtttgcatgtgttgtagaaagtgtctcattataatcctttcctttatacatctagtcagtactgagtttgatgcaaagatcctatattgaggaggtgtttggggatttatatgagaagggttggatgttgctatctaaaataaatagagtggagaagactggtttattacttcatttaaaatagctgagttcagctattgtacctgctaaggtgttttgggataaaaatacataagtcactcattggaaatgccaatataatgctgatccaaatctccccccaaataagatgattacttgattttttttttttccttgaaggaattttctcttgtgtatatatgctaaggctgtgagtcaggagtttttggcattacttctctattagctcctagtgaggaagttcagccaggggttgaagtgattactaaatcctgaggacttcccaatatctgtttttaagagtgaactaatattgtgacttctgagaactttgaaactcatcctttgtcactaccacaattctgagatccacacacttgacttttgttttgttcaatttcaaataaagcccttaggtcatatggtttggccagtgacattatataggaaaagcagatttaattccttattagcgtcatgttccattttaatagtcaggagaacattctaaatcctatttatatactgttcttacaccagtcttgatctttggttctttgcatcatttctagcagcaacatttctaattattagaaatttctaataattggaaattaatcaaggacctaattatttctgtcttcatctttgggtctctaattgcaaatgcagtattgggattgtgaatcctcagaagcttttagctttgaaaacatgaaggatcttgtcacagtgatttttggtgaggttgttcatttagggtaagtaaatatcttcccacttcactttttcccctctgctccctgcttccaagctgtttacttatacagcaaggaagtgaagcacaagttacccttggaaagcagggttgtccgtcgctcaaagctgtactgtattgccttagagacactgagaacactagtactggctggaaagttgtgcctaatctgtttacatctgctttggattgttctttggttagccaaaaaagaagtcaagttcattgctctaaagtggtagaccaaataagaaaattgcctgttgcagttgccctgatttataaattaatgccgcccgttttgctcttttcccttaccacatagacatatccagttgatgatatacttatttttagggatatcagttatcactaccttatatatccccaggctcctgatctcacctccaacaaagaattccaagtctcaaaattgatagtaagctctggtatttaagccttcctagaagacagtcatatggttcaaattaaagtctcctgctctgtattaagagaaagggatttaagttgccatttcagcctgcggacaaatgctaaccaactagggtgttgggggttggaaagcaacttaacaaattatattgagagccacttgcgagtggagaaataaatgaccatggccacatgaagagaccaacttcgctccactcatatggcttctgttgtgtaggtgtgcgtatccatcttaaccagcttcttctgtttctccctgttcttccgtaactctttagaatattcatcattttaatgttgactctgtaggtcatacatctttcccattgccagtaaataagcagtaagggatatcaagtattttatcggcatcagtacctgagaattacataaaactaactgctcagtgtttttgttcttattgttcaagatgatgtcttaaagtctttatacttaaaataaaaattttagttatagaataatgtaagcatactatagaaaatttaaacagcaacaaaaccgttttaaatattcaagctgcaatcccacctctgaaaccattgttaacattttgaatgcattttcttttgtctttttactatgcatgtttttcatacttataatcagtgtatttacaattttatatttcccatgttgctccatatagtcatcattttttttttttgagacagagtctggctctgtcttgcccaggctggagttcagtgccaccatctcgggtcactgcagcctccgcctcccgggttcaagcagttctcctgtctcagcctcccaagtagctgggactacaggcatgtgccaccacacccagctaattttgtatttttagtagagatggtgtttcaccgtgttgaccaggctggtctcgaactcctgacctcaggtgatccacctgcctcggcctcccaaagtgctgggattacaggcatgagccactgcacctggcctcatcatttttaatgagtgcacatcaagtagatgtaccataatttacctgatctaccccatattgtttttgttttgttttgttttgttttaaaagacagggtttcgctctgtcacccaggttggagtgcagtggcatgatcatggttcactgcaccttgaactcctgggctccagggatcctctggcctcagcctcccaagtagctggaactacaggtgtgcgccgcttcaccaggcaccatattgttttatgatctcaccaattcttggtattagcacaatcctcactttttctttggcatttattactgcattctaaaacttcaaagtgtgtttacttaaccttttgaacgtacagggaatcctttctttgccttaagtttctgtgttttttttgttgttgttgttcttgtttttcacttacattgaagttgtcattcttctggattttttttcctttatatttcaccagcatttggcctgctagcactcttcatcttgagccatgtgaactaaacttcagcttatggtagtctagtttactttatgtcttctggaatccagctagtggtaatgatcccaggccttgtccctttctctttcccaggctgacttgagctggagcagtacagcactccggtgttccttagagcgatatgagctctggaatggtgaaagaagattgttaccaaatacaaagtgcctgtggttttggggagatgatgaggctctgtgtgtttactggctgcttacctttgggatttgaataacttaaagattataatcagaaaaaaaatagattcttaaaaaaaaatggggagagttaagattatctgaaagattactaaaactatgtcaactttcagttatacaggtttttaaaaatattatctaggtttttttttcttcttttctggctatgttttttcatttgatagtttacatattgaaggaaaagaaggaaaacctaattttttttagtgttcttcgttaacagctcttgttagaactaaggaagcaagtgatattatagacaaaaatgaatttttaaattatatgtagtgtatactagctttgtctcttactaatatgggttactgagaaatagttattagtgtgggagtaatactaatattttcaatcatgtgactaataagcatatcactcacacctaattgccattttagcattaatgattatacctatcactaaaatatttactcttcctttaaaattatatttaatgataactggaaacttcatcattgtatatattcttcctagattacagtttttcttcatatatgaaaattgctattttcaacaaaaactttagttgagatctctgtcttaccaagtagttcccagttcctacactctgagttctgatacattcatttcctatttcaaactgtatcgctcttttcttccctttctcccaccctctctgttcttagttagtcagtgagttgttttaagatatttattgagtgctttctcttcctgtcagcactgtgctaggccctaggaaatcagtggtgagaaaaacctctgccctcaaaagccctaatgattgtggagcttagatcccagagcagtggttccaagtggcgagaaatagcagtggaggaggaaaaggagctattcttgtctcttttgtctttcatttattatgaaatattatgtttatacataaattttctttaagcatctgtgtatactttagtgaatcactagaagcaaatacctgtgtagtaattggcactcaggtcaaaaaactagaaaatttcatcagccaggctgtacacctcatcacaaccatatccttcccccaagagaaaaaaaattttttttgtacttttgtgttaatcacttatgtgctctactttataggtgtttttttttttcttttagtagttttgccactgatgtaatgcattacttaggagttttgctccaagggatgccatttatactgaatataatgtgtagtgggtccatccttaaacaatatagttttgcttgttttgaatgatacatgaatagaatcatattgattatattattttttgtctgtttcatccaacagtctgtgagatttatccatgttgtttgtatagctgcgatttattcatttttatttctatatagtattccatgatatgaatataccacaagttatttttccattgtacctattaatagctattttaaaagcagaagcccctattgctttcagtttggggcacttactaacagctgcaacgaacattcctaaacatttatcctggtatactcttaaacattagtgtgtattcttaaacatttaagagtgtaaactgagaagtgaaattgctgggtcatatggtgtgtgtttttaggttttatttggtaatgctgaactgtttccagtaggtgtgagagttccacttgctccatgtcctctccagtgcttgttattatctactcttaaatttttgcccatctggcaactgtgtaatgattatcttgttgtggttttaatttttactgtttctctttaataatgagattgagcttctttttgtgtctcttggcctttttttgtcaattgtcaatagtcttttgctcatttttctactggattctctattggtcttattgatttataggagtttgtttctttttgatagtctggatacaagtcctttgttttttttgtttgtttgttttttgttttttgatgattgattggttggttggttgttgagatagggtctcactccatcacccaggctgcagtgcagtggcgtgatcacagcccacagcagtctcggcttcctaggctcaggcaatcctcttgcctcagcctctcgagtagctgggaccacaggcatacaccaccatgcctggctaatttatatttagtttttgtgaagacgaggtctccctgtatttgcccaggctggtcttaaactactgagctcaagcaatcctcctgtcttggcctcccagaatgctgggattacaggagtaagccaccacgtccagccgagtcctttattttataagttacaaatatcctccctcactttgtggtttctcactttctgtttaacgtgtgtataaattttggcataattctaatgtaacgaagtttaccacttttccctttatgattagcactttttgtttcttgtttgagaaattcttccatcccctgaggccgtaaagatacctgctttttttttttttttttaaataaaaacgtgatagttttacctttcacattagggctataatccacctggaattaatttggggatagagtgtgaggatggcagcctctgtaatttttttccatatgaataacgagttgttcctgtgccactttttgagaaatttatccttttcccattgatatacagtgtctaccattcttttctatgcatgtttttaaaagaaacttgacgcagtattcctgaagcattatgtgtctttgggaattaacataagcagagcaaagggtggcagtcaataataaaatgaaaaacagtaaactgtaataactaaggaatttgcaagttttttgtttttttgagacagtgttttgctcttgtcacccaggctagagtgcagggtgcaatttcgactctggtgcaaccctccgcctcctgggttcaagcaattctcctgcctcagcctcccgagtagctgggatttcaggcacctgccaccacacctggctaattttttatttttagtagagacggggttttgccgtgttggccaggctggtcttaaactcctgacctcaagtgatccgccagccttggcctcccaaagttctgggattacaggtgtgagccactgtgcctggcaaatttttaaatttcaataaaaataattatgggatgtacgtgaacttaaatataaacacatacatgatgctgaaagcacaatgtggggctggattttgagggcactgagaactggcgttataggctgcatctgattcatactaatttttctttaacctttatacttgggaatgttacttttgaacctcacgtctcaggcataaaacaaaaataatgctcatctcaatgaggtaataaatacaaggtgctgtagcgcagcactcaacagaaggtcctttgaaaaacaactgtttaatactgcaaagtgcagcacaaataggaaaactgttgcactggagagatgagtcaaggacagtccagttccaagtctttctgggatacatggctccctccagggctcttgccactcacctgcatggccacgacgttcgtttctaagtactctgaatatatttgtatataacttaggattagtatctgttggttgtcatcaatcttggtaagaaatgcctaattttattcacagcttgacattgtagataactctgaatggatctggattatatttgtagtccatttctgtgatgtagcctgtctttacaacaaataaacaaaaattctgaggggaaaatgataccatttctcatcgagaataattatgtcatcatttgttttccctcagatcaaagttacataacacttggatgagattacatggatgctgtaagccacctttttctgcttttctgctctctcggcttccttgttacattttcctgactttcttcctttagccgcgctttctctctcctttttgctgcatcctctttctgttctcgcacctagggaataggaagtacctctgggtgttttcgaagccttaattctcatccttcccttttctctactttttctttcaaaaatattttatccttttactactataattcagtttctcagaatatcttcacttaaatttctgatcaccttctcaaactcaggacataaagaaaaagtaattttttttcttcccaaaccaacttctgctttccttaagtctgtcatctgctcagggccatattctctacttctccttctttttcatcccatatattctgtttgttatcaagtactgtccgctcctttcagaacatcttttgaattgtttttttcattttcaatatctcatctgatcacagccttcaatattcacctcacacctaacctaatcttgctttctagtttattttaccacttcacctgcctgctcagaagtcctagcaactccttattgcctgtaagtgtggctctcaaacctcttcagaaagaactgtgttttactggtacctttatattcacaccaaaagcataagtgacaaaaggaaatacagataagttggacctcatcaacatttaaaacttttgtgcatcaaaggacatcatcaagataatgaaagtccacagaatgggagaaaatatttgcaaatcatatatctaataagagatttgtatccagaatgtataaagaacactcacaactcaataataaaaagataaccaattttaaactgcacaaaagatttgaatagacatttctccaaagcagatatacaaatggctgaaaagcacatgaaaagatgctcaatattattagccatcagggaaatataaatgaaaaccactgtaagatatcatttcacatccactgggacagctgaattgacaataataagtaataataataaagacaataagtgttggcaaagatgtggagaaattggaatccttgtacgttgctggtagggatgtataatggtacggccactttggatagcagtttggatacttcctaaaaagttaagcagagttaccatatgacccagcagttccactcccaggtatatatccaagagaaatgaaaccatatggccacacagaaactcacataaatgttcatagcagcattatttttagtcgctgcaaagtggaaacaacctgaatgttcaacagatgatgaatggataaataaaatgtggaatgtccataccatggatgttattcagcagtaaaatagactcaagtgctgacataggcaacaacatggatgaacctccaaaatattatgctcagtgaaagaagccagacactaaagcttatatattgtatgattccatttatgtgaaatgtccaaaattgacaagtctcatagagacagaaagtagaaagcctagggctgggccattggtgaaagacttgaagggtgttggggagtaactcctaattagcacagggtttctttttggggtgatgaaaatgttctaaaatttcttctttggttttttcactgccttttccttacaaggtgaaaaatgttctaaaactgattgtggtcatcgtcgcacaactctgtgaatgcgctaaaagccgctgggcattacactttcaatgcgtgaattgtatgggatatggaatacaagaaatatgttatggccaggtgcagcggctcatgcctgtaatcccagcgcttcggaaggccgaggtgggaggatcatgtgagctcaggagttcgagaccagcctgggcaacacagcaagaccctgtctctattttattctatgttttaaaatttaaaaattaaaaagaaaaaagaataacattttataagaaaatattttatgagagacttataaaagagacattaagaatatgaagtaatatatttcgtattccttatctcaataatgctgtagggaaaaaacaattgaaataaaagcagtaaatgagtggagcatggagagtgtgtcatgagccaaaggttataataaattcataatcaagtttttttgtatctgaagtctaataaaatttttaaatgtggaggaaaaaaaaaggaaagaaaaaatagtaatggttcacaggatgaagtccaaggtcttcattctgtcatttgaagctgtattttatctggcatgatgctgctgtgcactctttatttcttgccatatgcccctacaaaccctttattgtacccagggcagtgtcttgcttgtcacttgaacttagcgagttaattctaagtgttctgcccttgctcgtgctccctcctgactgccattcagagcaccctttccaccttccttcattgcctctccagatcctggccattcaaccaagttctgcttcctttgagcctttccctagaactatgttttatgcctttggtttgttagaagatctaacacattgctattcccattggaagagttccataaatacatgttacataaagagtgaaggaaatggaggaacttacttagagacttataaaagagacattaagaataggaagctttagtaaataatgaaagatattgtgaattagagtagctccagagccaaaataagatgaaaaagcctattaaatagaaatggttttctaggttcaagttcagatcaaacttaagctctaaagcttttcttggcttggtgcagtggctgttgcttgtaatcccagcacttacgaaggcctagtcaggaggatcgcttgagcctaggagtttgagaccagcctggacaacatagcaagacccccatcactacaaaaaaattttttttaaatagctaggcatggtggtgtttgcctgaagtcccagctacttaggaggctgaggcaggaagatggcttgagcccaggaggtaaaggcttcagtgaactatgattgtgccactgcactcccatctgggaaacagagcaagactccatctccaaaaaaaaagtttttctttacctttttctttggcatttctgacttaagccagtgagaattcttcctcattcttttttactcattgcttgaatttgtgttatgagaatttttttcctccaacttggatgatctttcaattttttccagttgtctatacatgtagataactgaaaacagcaaagctcttagtgattctgttccatgtctatctgttccccacctccatttcctaccacacaccccagcattcccctagtacatcactaaactatcaacagaacctaaaatagactagtttgttttaactgtatttttctttccagtcctcttaaaatgtgcagcaaaatgtccccaaaggcaagcagctaagagaatgaagaggaggtattctcccatcacagttactcagtcccagaagtattgattggaaggcactgaattttcaaaatgacttccagatttagtacatggtaataatttgaggctttcccacacggataatttaaatgttcagaaaataagttatgttatagctgaatgggcagcaaattagacagaattttaacttacaagatgcatagcaatagtgaagattaatgtgaaatactagtaaagagccactggtagggaagagaagacagcgatatgctttcaatgaaaccgtcaatttataataatatgtatattgaaaagggagagtggatcagatcctgttaggtttggtacgttaaagaaagaattaggataccgcaggctcagtaattaaaggaatctgcccataattggggggtaaaaggtgtcttgtaggcagggaatagcaagattttgcttgaatgtacaccttagagttgggagtaacaatacttggaatgattatagaagacctctcgacaggtttctgagactagaggattttgtttggtgcataataggagatgagagcaagccagtagtatttggttgttgttgaatcttacagaaatcttgcatttggttattgggtctagctgttgaagccagctgtttggatgtaacatagtggaagcaggtgcttctgcagatgtggctctctctagttgtctggctgtaatatatcattcattctcatacactcatttctcatataaaatccttataactattagcagtctaagcctgcagacattgctgaagctggttccctttgatattgttttctttgtaacagtttcctgtttggtagataaaataacaagctcacactattaggtttgtgccttcacctccctggcaaagtaacatgctagaaaggttactaaacattagtggttcaaaatgagaagtctgtacattttatctgcttataggcgaatttaaactcaactggtttaaattcattgcttagcctgttgcatgctccattgaaaacacaaacaaaaaactccatgattcttctagccatgattcttctagagtttgttatccagtcattccagtgccagaatccatcaggcagaacagaatcattcgcatttctcctctgcactggagagaagaggaaggctgatcatggaaaaggacctggtgaaggttttttgcaaatctaaggatcttttttctgtcttttatttttgcaaacctaaggatcttccttctggataattcccagagacgtcaactttgctgaatctcagttgttgggatttttagcaacctgttcccactctcctaagaaaaaaatcttaatagtgaccagtgtgtgcagactttaatttgtaagtgaaagttacggtgtttcaaaagttgcaggttagttggtagagcattaaatgcagttttgttcatagtcaacattaagtgcccactgtgttaaacactgttagatactgtgaaagagagaagaataaggtaaggaactagagagagagggtagatctttacaagagaggatgtttttcaggagctagaagaatacattatttatgtattcaaataataaagggaaagaaagtacagacagagtagataggggacatttcttgtaggggatccaggaggacttcacagaagaagtattatttatttccattaatgaatgagagtattcatcttctcatagaagaagctataatgattctatttgtggtcctgactgccacaccccttatgatcattaagttaattttagaaccttgggagggacagctaggaggcagaggctctcgttgctggccagctgccattgtcagtttgagaagtctccagtagtcaggaggtgacaagaggattggcccagttattttattgcagtttaatttcgtgaccctttcttgagtctctgctatgtattagaaccactgtgtagagactaggataaataaaacggtatctcctccatttactaattaatggagggtataaacacacaatacaattaagtataatataaggcagaggctgggcgcagtggcttacgcctgtaatcccagcactttgggaggccgaggtgggctgatcacctgatgtcgggagttcgagaccagcctgaccaacatggagaaaccccgtctctactaaaaatacaaaaattagccaggcatggtgatgcatgcctgtaatcccagctacctgggaggctgaggcaggagaatctcttgaacctgggaggtggaggttgcggtgagccaagatcgcaccactgcactccagcctaggcaacaagagtgaaactctgtctcaaaaaaaaaaaaaaaataaataatatatatgtatatgtatatgacagaacagtaatgggatgtagaggcgtaaacaaaaggctgtggaagcacggaggaggaagccattgacatggtgttttctggtggaaatcagttaagccttcatacaggaagtaatatttgactgggccttgaaaatgagtgatactttaaagatggaaaagaaaggaaaaggcatggtacagagaggaaatagcatgtggaaggcatgtaaacacaggatgtgaatagtctagtgatgctagcatggccagggataaattggaaacataggatggagctgggttgtgaagggccttaaatgacaatgctgagatgaagactcttctgtaagtagaagggaggcagcccatgttttttgagcgaggaggtaacaggatctggtttgtgtaactttgtgctatgaatggatagcttaggggaaaatgaaataggaagtaagcaatagcatcagtcaagctagggatgataagagtatgaactgcagtggtagaaatggaaatagaaaagaggaggtggagtcaagacacatggagttgaagcagtaagagttttattaccaggttgaaatgggaaacgagggagaaaggacttgaagatgactccagtgtttctagtaacacaggtggtgatgtcactaatgagggtaaaagcactgaaagcgcaggtatgactttggaaaatggtgggtttgaggtgtttcttcccaagcaagtattggggattcatgccaagaacttaagagtggtaccagggccagacatataaatttggggtatttatatcaaatgctggtagaagtagcgagattaaaagagttagccctgagaaaacatagagcaaggagaggcagttaaaatcagcagagcctgctgaaaaacaccttctgtagaaggtagaaagaaggaaagcaaatagcaaaaggagagttgtcaacaagagtaaaactggaaaagagagggacgggtttcagagagtaggtgggtgcttaacattttcagatgctgtgatttcagggagcatggtgtccctggggcatgagggatttctagcctgtcacatgggtacacatacataaataaaagcatttctacaccagagactcaatcctttggccagccatccttgctcattgtcttagtgtagctcctgaagactcatccctgctacctcccatctgctgcgtcttgtagcagtaggagagggagagaagaagggaggaaaattgaagcacaaggagagttaaaattaaaatgtaagcattcttgcttcagtttgtaaataagttgcatattcttccttttgaataaactacttaattataataatgtcactttgtctaatttttaaatggtcatagatgtgtttgtcataagaagtaaatataacataaaaattctgggtccaagccaaaagaacaaagctggaggcatcacactacctgacttcgaactatactacaaggctacagtaaccaaaacagcatggtactggtaccaaaacagagatatagatcaatggaacagaacagagccctcagaaataacgctgcatatctacaactatctgatctttgacaaacctgagaaaaacaagcaatggggaaaggattccctatttaataaatggtgctgggaaaactggctagccatatgtagaaagctgaaactggatcccttccttacaccttacacaaaaatcaattcacgatggattaaagacctaaaccttagacctaaaaccataaaaaccctagaagaaaacctaggcattaccattcaggacataggcatgggcaaggacttcatgtctaaaacaccaaaagcaatggcaacaaaagccaaaattgacaagtgggatctaattaaactaaagagcttctgcacagcaaaagaaactaccatgagagtgaacaggcaacctacaaaatgggagaaaattttcgcaacctactcatctgacaaagggctaatatccagaatctacaatgaactcaaacaaatttacaagaaaaaaacaacaccatcaaaaagtgggcaaaggacatgaacagacacttctcaaaagaagacatttatgcagccaaaaaacacatgaaaaaatgctcaccatcactggccatcagagaaatgcaaatcaaaaccacaatgagataccatctcacaccagttagaatggcaatcattaaaaagtcaggaaacaacaggtgctggagaggatgtggagaaataggaacacttttacactgttggtgggactgtaaactagttccaccattgtggaagtcagtgtggtgattcctcagggatctagaactagaaataccatttgacccagccatcccattactgggtatatacccaaaggactataaatcatgttgctataaagacacatgcacacgtatgtttattgcggcactattcacaatagcaaagacttggaaccaacccaaatgtccaacaatgatagactggattaagaaaatgtgtcacatatacaccatggaatactatgcagccatagaaaatgatgagttcatgtcctttgtagggacatggatgaaattggaaatcatcattctcagtaaactatcgcaagaacaaaaaaccaaacatcgcatgttctcactcataggtgggaattgaacaatgagaacacatggacacaggaaggggaacatcacactctggggactgttgtggggtggggggacgggggagggatagcattgggagatatacctaatgctagatgacgagttagtgggtgcagcgcaccagcatggcacatgtatacatatgtaactaacctgcacattgtgcacatgtaccctaaaacttaaagtataataaaaaaaaaaattctgggtccagctgagtaggcttacatgtgtttcctgattctaatgtggtcttaacatcatccagtttcatttgcattcttttttttttttggagacggagtcttgctctgtcgcccaggctggagtgcagtggcgccatcttggctccctgtaatctctgcctcccaggttcaagcaattcccctgcctcagcctcccgagtacctgggactacaggcgcacgccaccacgcccggctaattttttgtatgttggtggagaggaggtttcaacatgttggtcagaatgatctcctgacctcgtgatccgcccacctcggcctcacaaagtgatgggattacaggcatgagccactgcccccaggcccatttgcattcttaaaggaacaagtaccactcgctttattctgcctaggtttatgaagggagcagtactatttttgctgacataaactgatcatgtttatatttcagctcatctatatctctgtttcactattattgttttaagtgtctggctatgtggtttctaaatgttctctttttgcatttaatattcagacaatgatttggaatctttagtgactagagactagtgtttgctcagttataataaaaggttacaataatacgaattatgtccatttgcctttctagattttggtttcagtaacctcttcactcctgggcagctgctgaagacctggtgtggcagccctccctatgctgcacctgaactctttgaaggaaaagaatatgatgggcccaaagtggacatctgggtaagtaactgccttctcttataccccacagcattagctacccttggttgatgacagctattcgcatcctgaaggatacataatgatgcaacatgaattgagatcctggtcacctgttctttcaagtcccaattcctgtgcaaagcctttttttttttttttttttgaaacagagtctcactctgtcgcccaggctggagagcagcaggatgatcttggcacactgcaacctccacctcccaggttcaagtgattctcctgcctcagcctcacaagtagttgggattacaggcacaagccaccacacttggctaattttttgtatttttaatagagacagggtttcaccatgttggccaggctggtctcaaactcctgacctcaggtgatcctcccgccttggcctcccaaaatgctgggattataggcatgagccactgcacccggcctactcgtgcaaaatctttcctccaatacttaccttgtggactgagccacatatttcaaatttcccctttgcatttgcaaaagaagcccaagggccagcttggatgggggccgttgccaagaagagagattatttctactgtggccacttaccttatccccagagaatgagtactgagaaaaattcaggatgttaccctaaattaatgcctagaagcaaagaagattgttaactgttctaagatggaagaaaaagtttgttccataatcgtatgcatgactcaccatcatctgcatacacacactacagtagtcttttttgtttcccctgatgtgattaattgtacatcctctctgtttgggatgcagagccttggagttgtcctctacgtgcttgtgtgcggtgccctgccatttgatggaagcacactgcagaatctgcgggcccgcgtgctgagtggaaagttccgcatcccattttttatgtccacaggtaagggagtcgctagcacacagctatgaatgggttcatgaaagttagacccactcagttatcccaggaatttagtgatggagtataaatggcccacttacaaccttttttaactccagcttgctgacctgatgcctccaggaggcaaggttctgtagaaacagtatataggttttggcatcagagagccctacttgggtttgaatctgggccctaagtctgtctcagctttagtgtcctcatctataaattggctgagagttttgtgagggctgctattactgtaaggattaaatgagataatgtatgtgaagactcagtaggcccatggcatagcagtaatgcaataaatgcttttgtttcacttctgtcttcctaccctttttcaggatatttccacttattgggttctcattgcaatgtggttttaaatgccaaggataaagtaggctttgcatcttagtcttgctactgcttcatttcctatttctgtgctctttgtcctccagaatcaaatttaaaaaattttatttaacgagtgggcagtaaggtaggcaggtcttggaaaaatttaacaccgaaaatagatacaagatactcagaattaacagtattttatcaccatttatttgcacataagaagggaacattttagagaacgcaaaaagtcatatagttttgcttaatcatctgttttcattttaaggaagaacatgtgtccactgggttgacaacaaggtagaagcccatggtaattgcattttagaacaaagaggtgaaccttggagtagatttaacttggctcctttgaactgataacgtcatagtgtagaagatagtgctaaatgctgtgggacaaataaaatagagaaggagttaggatagtggttggtaagttacatgaaaaccccttcatggagaaagggacctttcagcaaagcctgaaagaaggtgagggtgaatgctgtgcagtccggggaagagcaccccctggctgttgaggggtcagcgcagaggccgcggggatggagcatggctgcatgtgaaggaacgggaaggaggcctgcgtgcctggaaggaaggagcggtgagagatgaggaagagagatgaggtcagagaggtaagagggagcttaattttagggcctagttaatgtaaagactttagattttactgtgactgaagtatacaggattggagggttttgacaggagtgatgtaatctgagttttattttttccaaattttatgatgaaaaatttcaaacatacaaaaaaattgaaaaattttgcagtgacttttgtttaaaaaagatcactttggctgctatgttgccggtaggctaaaaggtacaaaggctgaaggagggacaccagttaggaggagacttttacaatagtccagataagagatgttggtggctggttcccagtctggggtgtcgagatggagatggtaagaagtgatcagattcaagagatgctacctaccatgtgtggcaggcactgttcaaagcacttcacaaacattaactcacttcattattttaacaaccctatgagatacacaagattattgtctccattttactggtgataaaactgaagccaggagagattaggcaattttcccaagataacactgctaccaagtggctgaagtagaatttgaacccaggtattttggctccaataacatttagtgttggatttgatatgaaagaaagactccagagtttctatcctgagcaaatggaaggatggttttactgccaactgagatggggatgactggggaagaatacttacattttggagagatgttttagacatgtcatgtttgaggtgcacattagacatcagagttaagatatgaattggcagtcgcatttaggagagaattctgggttggggatgtatgtttggaatccccagtgtatagataatagttaaagccatgaggtgagctcactttttaggcagtggttacagagaagagaagaggtccatgaattaaactctggaacataccgctatttagagaacaagcaggtgaagaggtatcataagagttgctggtgaggtaagccagagggcctgctgtcctaggagacaagtgaagagactgttcccaggaggagggaggagggagtgaggagctgtggggagtgaatgctgctgccaagtcaggtaagaggactgagaactgaatgttgcatttagaaatgtggagatcgttaatgattttgtttcttttttatccccccacaccctcaccttcctagatcattaatgattctgaagtacacttttggcagaggaacaggagcaaaagcttaatcatgtggttgcaacaaaaaaggaatagaaggaaaatagacgacacgctctttccagtttactataaaaggaagcagagaagtggtccagtattgctctggccagggtcaccagtgatctcgttattgatcaactgcatatccttagtctttttcttaatcactgcccagcagtgattaacacttcacccttgccctccctccctctctcctttcctcccttcctccctaactcccttttttgggactgggtcttgctctgttgctcaggttggaatgcagtggtgtgatcgtggctcactgcagctggacctcccaggctcaagtgatcctcccttagcctcccaaatagctggagctgcaggcacacaccactatgcctgactaatttttttttttggtagagatggggttttgccatgttgtccaggctgatctcaaactcttgagttcaggcgatctgcctgccttggcctcccaaagtgctgggactattggtgtgagctactgtgccctgtctctttagagttatatgttagagcagctttagattcacagcagtattgagtggaaggtacacagtttgcatgtaccctctgtgctgtcctgcctccctcccctgctgacccctgtcataatcaatgtgccccaccagagtggtatgtttgttacaatcaatgaacatgcattgacacattatcacccaaagtccatagcttacatttgggttttctctcagtgttacacattctgtgggttttggtaaatgtatagtgacatgtattcaccactataatacatataaaattgtttcactgcccccaaatcctctgtgctctgcctgtttatccatttctccctaaccccctgcaactactgatcctttcactgtctccacaagtttttccttttccagaatgtcatatgggtagaaacatacaggatgcagccttttcagattggtgtttttcaaatagtaatatgcaataaggttcctccatgtctcttcatggcttgagagcccgtttctttttagcactgaataatatttccttgcctggatgtaccaccctttatcctttcacctacggatgacttggttgcttccaaattttgacaattatgaataaagctactgtaacatctttgtgcaggtttttgtgtggacataaatttttaattcatttggttaaacactaaggagcacaattcctggatcatatggtaagagcatggatagttttgtaggaaactgccaaactgtcttccaaagtggctatgctattttgcattcctgccagcaatgagtgagagcttctgctgcgccacatccttgtcagcatttggtggtgtcagcattttggattttggccactctaataggtatatagtgatatttcattgttgttttaatttttaattctctaatgatgtatgaggatgagcatcttttcttatgcttatttgccatctatatatctttgttgaggtgtctcttcaggtctattggtcgtttttaacttcaggttgttttattttcttattgttgagtcactcattacattttaaaacactttttctcattgcttctgagacgccatattctccagttttcctcctgtcctctggaagcaccttctccatcttctctaccagacttatttttctctgctcatcctttagatcttttcatctttacaacatctttctggagccatgttatttactgctgtagcttcactgatcactgtggtgatcagtcctcagttaactttttgtcccagacctctcgatctagggcgacatatccaagtatttgctaaccattatcttcactttcatgtattgaagtcagatcaatggagacatattcagaaatgaacttgacttccccctccctagatttgctctattctgtatttgctgccttagtgaatagcatcaccatctgaccaaggccagcacaagccttgatgtttcctctctcaccagtgccacagctgatcagttaccaaatcctgtcaattcaaccctccattcatgtaggcacttctaagaccatactatcatcttcccttgcctcaattaaacaatagccaattatatggattcctggctccagtcttgtccccctctaatctattgtcaactttgctacatgactaatctttccagaacacaaacatataaataaataaaacataccacacacacacatacacgtacattttctctctctttctctctctcttacttaaacacacaaatctgattatatcattttctagcctgaaacttttcagtggtttaccattgcctctaaggtaaagtttactccataaggtggcaaagcattggcttacaaacatttttggctatgataagaaaaaagtacattttatactgtgacccagaacacgcatatatagatacaaatgaacaaaagctttgtttgcttgatttagagatggggtcttgctattttgtccagactgaactcgaactcctgggttcaagtgaccctcctgcctcagtctcccaagtagctgagactagaggcgtataccaccatgactgaaaacaaaagacttttttttgagacggagtctcgctctgtcacccaggctggagtgcagtgatgtgatcatagcttcctgcaatctccagttcctgggctcaggcagtcctcccacctcagcctcccaagtagctgggactacaggcaagcaccaagcaccatcatgcccgtctaatttttaaacatttttttatagagatggactctctctctgttgaccaagctggtcttgaattcctaaccttaagcgatcctccctccttgacctccatgagccactgcgcccagccagcaaacaatttttttaaaaaagcaaaacttaccttactatgtacagtgcatttcaatatattttattctattccattttaaaaaatgctgatttcgacttactaaattgatctcctatctgctatttcagaaacaatgacatagaaatacctttataacctgactcctgcctagctcttcagccccagctcccactctcccaccagtcaccctaattttcttctcgttccctgaacaagttctgttttctggagcatttcccactgccgagaatacatcttccctatcccaccccactccacccactcctgtattctagaattcagaataaaaaaaattagattggatagaaataagaatctagataatttctattcactcttcatgtctctaaactttctcttatcgtggtgcttaccaagctttatattgtaactacttctttcattgtatgtcttccacaccagactgaacttagtgaaagtacagacgaaacatgtctttttcacaactgtcaataacctaccacaggatctggtgtgtagtaggacttagtaaatatgaaatctgaatcagaaccaccccatccccagtggcatttgtttacattcagaataaaattcaaggagtcattattactatggcctacaaggcacagctgtcattgccccttctttggtctcatttcctgttactgttcacctccggttctgagctccagtcacagggccttccttgctgtttctcagacttgccaaacacatacattcccctcagagaggagtcataggtcccctcagagaggcctgtcctggctacccccatcattctctttctgtaattctgctttttcttcatagcacttactttattgtctcctcacctcctatcaccacttgaccataataagcatttggtttttgtttactgttatgttcccagggctttggacggtgcctgagttctagtaggcactcagtaaatatttgttgaatgaattaatgcatagggttgttcgaacactgactccaaaagcccctctggagagtagtcttatccaaatcataatatcagtagtaatatcaaataattacatttgtttagggcttttgagtttataaaataatttcttttttaataggtttattttttgagacaggatctctgtcgcccaggctggagtgcagtggcgtgatcttggctcactgcagcctccgcctcctgggcccaagccatcctcccacctcagcctcctgagtagcttggtctacaggcgcacgccaccacgcccacctaatttttgtatttttttgtagagatgggatcttattatgttgcccaggctggtcttgaactcctggactcaagcagtccgcccaccacggcctcccaaagttttgggattacaggtgtgagccactgcacccagccaatatattttttaaaaatatttcaatttttcagtttttatatttttggcgacagggtcttgctctgtcacctaagctagagcctagtggtatgaccatagctcactgtagcctcaaactcctgggttcaaacaaccctcctacctcaggctccaaagtagctaggactataggcctgtgccaccattccaagctaattttttaaaagattttttgtagagatgagtctcactacattgcccagtctggtcttgaactcttggcctcaagcaatcctcccaccttggcctcccagagtgctgggattatgggcagaagccagcatacgcaacctaaattattttcttttacttaatctaatttgagctacataactatattttagaataggtaatagcacatattttatcatcttgctgatgaagttttggaagctgaagtttagagaaatgagttaacttgccaaagccacacaggtaataagtaactaggtcagtattcaaatttagtgtttgttttactacaccatactgttgcaaaaagagcaagataaaccacttcctttacttttccaatgtccacagtgtttcctgtgagcaacttggatcttttctatcctccacccccatcacctcacaccatggcaagagattcttactgaacccttcccggagccggcttcagatagggggtcctagaaaacagctaagcatgctgtcagccacactgtctattagtgcttagaaataaactaacagtctaactgcttagaactattatttgtaatatgatgttagttaacctgaaagcttcaagactcagagaaagccaacaggattatcctaaacgtagtcgctctttaatcccagttaaataattccctaagtagcaatacaagtttttgtatgattagtacagagaatgagaaacaaccagggtaggaagtcagtagatacttgctatattaccaatatgatctctctggcccttggtaatatacatgtgcttggcattgctgaatgtcataggcctaaatcccaaggcccattagagaatacttcaaaaggataaggcatagcagaaaatgaattcatcggttatttaggcttttcttagcttagacaaccttcaagtaccagaaagtgtcaggtgaaggaagtttagagtctgtcccagagtcctttttctgcttacgcctcgtgtttctgggcacagttgtatctcagtagacctggagcatagtcttctgatggaggcgagtgctggctgcttttcagcctgtgaggccagctgctattgctgtattacgggagatagcgtgattgagagaattccttatgcacaagatccttccttttctcagctgttgtcataggcttgagctgagtttatctgtttttcttcctgaagggtctagaaactccagcagagctggtatagtgttctaaatgatcacttggaagaccagagggcaaagcctctaccatgtagctgcttctagccaagttgaattccagagtagctacatacagctgtgtgggaggccatgctctgcaaatggatatagttagctcaagaattctaagctgctctctattgtcagtaatgtgtggaatgaagtatcctcacaattcatgtatatttctatgcctggtgttgtttgtttgacacaagtttcctttcataggcatcctgagatgtactaaagacatatattttcaagttggaatgacagtggcatacatttaaaagaggatttatttgaggctaggttgattgtataccacctagtttttataattatgtatgtgtcttcctcctctccccactagaatgtaagcctcttgattatcagagctgtgttttacactcaataccttccataaaacctgacagcccctggtaagacataagcattcagtaagtgtttttgaatgaaaaactgagtcatcactacttaactatggaatcttatatcagactcttgtttttttttttttttgggagacagattttgccgcccaggctggagtgcagtggtgcgacctcagctcacggcaacttccgcctcctgggttcaagtgattctcttgcctcagcctcctgggtggctgggactacaggtgcgtgccaccacacccagctaatttttgtatttttagtggagacggggtctcgtcatgttggccaggctggtcttgaactcctggcctcaagtgatctgcccgcctcggcttcccaaagtgctgggattacagacgtgagccaccgtgccctgccagactcttgtattatattattaacatgatctaaattatttattcatcaaaccacttggttttatatactttttttttttttttttttttagtgtagagacaagattttcatcatgttgcccaggctggtcttgaactcctaggttcaagcaatccgcctggctctgcctcccaaaatgctgggatcataggcgtgagccatcacgcccagccatggttttatgtagttttgttatatgagttattgtgaaggtgaccaagtcaaatgacttttaggtgtaaaagggtgttttgatctactgtagagtttgcttcctattccttaagtaaaataagtttgatccaggccagtgtttttggattaaacttctcagagcatcccaaagagcagtttgataaaaccctgagtctaaattatagaaggattaaaagttgaaacttgctgttttcttgagctgttgtggaaggtgaaacctggcctggcttcatgtgttggcaaatatttcctctgatctgcccttccaccgatggatgcaaataacttaaattttttgagcaccagattcattcaatatatttttttaacaacatacttaaagcctagtttaccctattcccctgttgtaccacctgctagcagacatactaagatcgtttatttaactgaaggaaaattaatttacagtgaaaaaactgcagcgttagtgaaggcatagagatctcttgtggacaatatttttgagtctttattgattagacttcattgtgacttaattaattgtaatactgcatgagcattttattactgggaacgcaaaacccaggcttacataatgcttctgatggagaatgtaacctgcagctactgccaaaaagcttctacttagaggcaaacaactctgccctgataggcttactcatcaagaaccacacagcatcttgcttggctaaaagcactttgtttagaaccaatggggcaagggattaaattggctcacccaccaagtctccatataccgaggggctcagagtcctcaaagcagttttctcataccttttgagacacactgcaccgccagagagaaaaatctatgtagtgctttcatgtcagtgaatgtagaaatcacagctgatgtcagaaaagaggttaagaactacttcagagtgaaacaggccagccgtgttcattcccatgacctaacataactaaaaaccagtagataaatagtggtactgccctatttattattagccttttcaaaccagctgtctcctggcttatggcaaccctaaatagaaaaataaaagaaggacattccaagtggaaggacttcagagatatggataatagtcaacatttattgaccactttctatgtaccaggcactgttgcattaccttatttaatgttcagaacaactgtctgaggtaagctgttttatgaggtaaactgtatgagaggttatttgataaataagaaaactgaggcatgataaggttaagtaacatgcccaagatgcacatctagtaagtggcaaagctgagatttgaacccaggcagtctggcttcagagaccatctaaccatatgtgtttgtattttcattctcaataaatacatagtaagttagtccaagaatcaagagagtcatagaatggatatatttgtctgcatcgggattacttactgaaaaacgagtagcaggaactctgtattggacctggaggcagaattttcttaaactgtaatgactgatactaggagtcaaaagatactagaatgtaaaccacaagatggacagcctcctgtaaaacagtatagcaagccaggatcttttcagggttgggctagagctaaatcttggcatccctaccctttaggccaggatttcctgatttctgaattttaattctggcagcatcatgcccacctagaaaaactgatcgaaagtaaggaagttcaagaaataggtgtcatttttctaataaatggatatacatgggtcaaaaccttttctttgtggtctgtctcgggttgataaacttggtaaaactgaagagaaaagcctctcagtgcatgtttattgattcctaaagaaacttttcttatgggctccatctctttgcgaaagtgttccaggccatctccctatggcctctatgttcagtcactgaaagtgtctcacagaatttagagatataaagaactttatttctattccaggatattctgattacaataatttgcagaaaccactagggttggaatttatagttaaatggataattctccaccttcttttctgatatcttactgttggaatatcatttttgaaattttactgaagtgtgggacttccatttttcttcccccgagcaactgaaaataaatgtttcaaaacatgacagttttttcttagtgccattgtgtcaagagaagctaatctcaatgcttattttttatgagtcggatcttactgcagtcagtgctgtcataggttaagttccaaggttgtgtattttctttgtttgtgtaaaactgtggcattgactacatccttgtcaggcttggtggcatgcacctgtaatcccaacaactcaggaggctgagatgggaagattgtttgaggccgggagatcaaggtggccagcctgggcaacatagcaagaccctgtctctaaaaaataaaaataaaaaaaatagccagatgtcactttgggaggccgagatgggcagatcacgaggtcaggagatcaagaccatcctggctaacacggtgaaaccccacctctactaaaaatacaaaaaattagctgggcgtggtggcatgcacctgtagtcccagcaactcaggaggcatattatcgtttatgaggcaggataatcatttgaacccgggaggcgaggttgcagtgagccgagatcgcactgctacactccagcctgggcgacagagcgagactccatcaaaaaaaaaaaaaaaaagccagatgtggtggtgtgtgcctgtagtctcagctactggagaagctgaggcaggaggatcacttgagcccaggggttcgaggctacagtgagctatgattgcacccagcctggccaacagaatgagactccatttcaaaataaaaataaataactagtcctttaacttggtatttagaaatgtttatttctattatagcagtaatatgtcaaaatttaatgtatagaataaaagcattccaatccttataacaccattgttctagcagtacccaaaataacaaaatttcagtgcaacaacaaaatccctgtattttgtattattatagttaacatttatacaatctctgaatgtatctataggttagcacatttactgtatgttatttatatatacaaatgtcattttttttttttaagacagagtctcactctgtcacccaggctggaatgcagtggcacaatctcggctcactgcaacctctgcctcccgggttcaagtgattctcctgcctcagcctcctgagtagctggaattacaggcacacgccaccatgcctggctaatttttgtatttttagtagagactgtgtttcaccatgttggccaggctggtcttgaactcctggcctcaagtgatctgcctgtctcgggctcccagagtgctgggattataggcgtgagccaccatgccgggcccaaatgtcttattttgaggaccatttgtctatttgtttacatttttaaatagtgactatgttaaataaataggtttgatcttagctggcagttgacattgacagtgtttcttgagcgtattaataaaacatcatttttagggcttagtccacaagcagagtgaagattcctaactctggctggcttcttagcaaaagaaggtatcttggcagaaaacacccctggtttcttattgatttactttttaattatttctgcagggatcatagcactgcaagatagtcacactgttctgtccatgttataacaagatcaggacattataacagactttattttcttttcatgaggaaaaacagcatgttttgtgtgcagtttgtcttttaggaaaaggcaggcagcattaaagaggtgctctgagacaaacattttttaaatccagaacatctaaaatacagggatagactcttatcaaagccatgtggctccatcctgagattgctgttgcaggccatccattggtcttgttctgtttgctataatagcatcacttctcccccagggctggtacccgagctggacaaagtgagtggataacagcatcaagcagtgtattgcatagcatccttgttctgaaaactttaagactttaatgtcatttaacttttaaaaggtttttgtcaagtaattcattttccatagaaacatgtttcagagatttaatcgccaatttatttttgtttcctttttagattttgaaatttagaaaaaatagaaccctctttgaagtgagaattgtgccagaagcaattcattactaagaagtaaacatttttaagaagtttgtttaaattattgaaaatatagaactcttgggctgggtgctttagaattacctttgaacacacctaccattgactggaccaagtacataagaaactagatcatccccttcttctgagcacctgtaagcagcatgcactttcttgcctgcaagaaagcctttctgtgccttctggtacacagatgtcttctgtttccaccagctcaaagcagctttatgtggtcagaaagaatccatgactcagtttcttctatgccattgctcaccacagagctggaaaggattgttttgccatgttctgttctttggtgtcacatgcagggtttcagggacaaatggctttccctccttcataggatcagcctgaagagtctgatgatctggttccttaaatttttacctatctcctcttatctttgatccttgattcgggaagccttctgtttcaagccttccatcatagtcttcatcaccttgcaacaactagagtatataaataagtttgctctaccacagtgtatttaatcctcaccagcaaaattatgaataagacaacgctccccatttagtgttctcatgtccctgcctcattaatccatccaacttgccgtctccccttaaagctagttcttggtctttgcaccatctatttgcctggcccattttgtactaacctagcttgtgggtgattctgtcatgatggaacctgtgaagatgacatggcatctgatctgccagaggagagaattgttttggtttgttttcataacccagaataccaataatgtgtttattttaggtaccatgtaggttaagagctccctggagtaagactgaccagaatttgtattctgctttggcctcttattatctgatcaagtttctcaacttctctgattttaaattctctttgtctataaaattgagataatagtattgggttggtttgtgaagtagatgcttaaattaacttaaagggtttagcactttgcctatcatgtaaatggtcaataaatgttagtaatgattaaataatattgttgaatgaattgctctattagtctttcattctcttcttccctattttttttactcttttctatgtatctttctctcatttttgctctcttggtatgccaaagggacattactattttcagtcaaatccacacggcttatggagaagacttatctcccaagaattgttttggtttgttgtaaccacttagagaaatttgttttattatcaaggacaaaaaaaaagaaaaaaaatgttgctttcacagatacggactcacactggctatgtcaacttaattctcattttaggaccctgcccatacagcagctctctccccacaaagtcatccaaatgcctggcagcgcagcagggcaaggcctgtgctgaacatcctctagttaacgttctgttggcagatcaggtttcctgggcccacagtgactctcactgcggagaccgcttggcgtcttgcatggagcagatgaaagcagctctgaagggaagctgcttctctggcacacacaagcagaggagcatattcttgcattgcccaaagtggttcagtttcatttagcatcagaggccctgccttttgggtgggagcaaataatggggcccttttattttttatttatttatttattttatttatttatttttttagagacggagtctcgctctgtcgcccaggctggagtgcagtggtgcgatctcggctcactgcaagctccgcctcccaggttcacgccattctcctacctcagcctcccgggtagctgggattacaggtgtgtaccaccacacccagctaatttttgtatttttagtagaaacagggttttaccatgttggccaggctggtctcgaactcctagcctcaagcaatctgcccacctcagcttcccaaagtgctgggattacagacgtgagccaccatgcctggccaacagggaccttttagacaataaaatagagtagttcttggtatctggaaaagttgatgttttgtttaatgtgagggctccatctttccatgcttgtaaattgaatgtcctgtgggtgattgtgttcttaggtttgagagcatctattcccctcgttttcaccctgtttccatgttttatgtagaatggtgtcttcaaatctcatctgaatttaatttcatgaactacatgacacttaggaaatatgaattgatgatgatactctagctttctgcattttgtcatattttccatctgcaccacatatgaaaaatgttaaatttctgttccttggcacgttcgatattatgtaggatagtcaagattaaaaagctcttgcccttgacactgtaaccaagaattgttttggttcttaatctggggcctgtagacaccagggtctgggggatctatgcaggcttcataggacatcgttgagtagtctaaagttacatgcaaggtcttgtgtataaattcttgtgcagatttttttttttttttggagaattttcaaggcatctgaggccaaataatggttaaggatgactgaatagaggtttcaagatcctgaaattgaactagatatatcttctaattaggaattattatggtactgtttttggtttggttgtgtgtgtggtggtgttgttgttattgttgtttgcttttaaggaaattgccttggaaaaaatctgttttaaagcaagcctgtaactgaacaccattcagctttggtcatcttatgcactaaattgtgtgtggagaccaaaggaaaacaggagagtgccatctagaggccttaacaacagtttggtcctagccttctccctacacaggagtctttaacaacttcctaaattaagaacacttttgtcctcttaagtaactgcaaacgataaacatatgtgtcaatgacatttataatctatacaggtgctgctacagttgtggctctagccttactactctggaaatgtaattttaataaagcgtactgttgtagatggcatttactttattctataggaatgtagaagtctttgagatgtacactgcatttgaatatagttttaattgtaaagcaacaacaaattgatgcctgatgtaagaaatcattttgatataggaactttgttgtattatcttttgaagttagagtaaattaaaataagagtaatttatcttagttacttgtagtattcttttcacaacagtaatatagaatggtgtttgccaaatggtatagaaattgaagagttgaattcaccctagaaaagtagatcaatttatatccatgtggagatgtataatagggtagtcaagagcacagcttagaagtcccaactttaccatttctttgccatgttgaatatgttaactttcaaaatcttgtttcttcttcatttataagtggagctaattatagtctctaagttaaggttgttgtgaaggttaaatgtaataaagttggtaagcacagtgcttggtatatcaaaagtagttttttgtaataatgtcttactgttgttgttattttcactggccagttttgttttcaggacggttgtgattaaatagaagcagaaaatttaaaaacctatagaaaattttattttaaaaaaattttcacaattacaatctcatttgattaaatactcaacaaatatttatttacatattcagtagatatttatgcagctcctaagtgtctagatataataaccattttaggtactggagagttgatactgggtacaacagaaagaaagacatgggccttgcattgcagtggaggagtcagacaataagtaaatacataaacaagatggtttcccaaagaaatcatttgcgtgaagacaatgaatgtgatgtaatagagagtgactggaggcccatcttagagtagatggttaaagaagagctttctgaggaagtgacgtttaaactcttacctgaatgacaaggagccaatcatatgaagatctgaggaatggccatttccactaaaggaaaaaacaaacaaaaaaacacatgtaaaggccattggatgagagtgtgttaaacatgtgcaaaaactagaaatgtgcatagtggcaggaaaccaggtcagagagggaagtagggggccaagcgcggtggctcacgcctgtaatcccagcactttgggaggctgaggcaggcggatcacttgaggtcagttgttcgagaccagcctggccaacatggtgaaacctcgcctctattaaagatgcaaaaattagctgggcgtggtggcacaggcctgtaatcccagctgctggagaagctgaggcaggagaatcacgtgaacccaggaggcggaggttgcagtgagccgagatcgcacactgcactccacagcctgggtgacagagcgagactctatgtaaaaaaaaaaaaaaaagggagagagagaagtaggagccttggaggcccaggactttagatttcattctgagggttatgggaagagattggagagttacaggcaaagtggtgatatgcccaaatttatgctttggaaaaattccttttgcctctctatagaaaacagattgtaatggagaaagaatggaagcagaaagaccgggtaggagacttttgcagcgtgtaagtcagaaatggtggcttggataaagatgttgaattaatggttcagtgctgaattagtgttgggggatttggatcccccaacaactctgcaccacaggggcagggtagcattgtggttaagagaaccaggtgaagagtcaggctatctggtttgacttaatagccatgtgaccttgacaagtttctttacctccctgtgcctggtttttgctattcctaaaatgggaacaatgatagtacattcctcctaggattgctgtgtagattaaatgaggaaataataattgtaaaatgctcagaagatgcatcaatagtgctgttttggtatcatcatcactgccttcatcacaactattactctcatcaccctcagtagccacattttatagatgagaaaacttagagggtggttttgaaatcagaatatacgtttcttgattttgaatccattgttctttctgcaatgtaatctgtaatacgagctcccagagaaaaatttctatagatctgaatatctgtagctcacagcccagttttaaatacctatgactatttaaataacattgagaagaaaatgataaataaggctagctgaatcccagggcataggagagaagtagcctgtggctctctccccacacaccttgtgccatcagaaattcaagttccctgagttttgaagaagggtattgcacacctaagccaaaagcattagtatgcgcgtggtggtacatttaggaggatagaactgaatattttgagaaccttgtaagatactgaatctctttagaggccattctactcttcattacttgtgttaaatagggccatatacataatataaataaatgaaatccatggattatccccagaccttttctggtcagccttttggtgaaggcaacaaccagactaccacacttgagtttctttttctccacctctctctgcctttgcttagccccttctggtggcataagcaacagaataggtaaggatcaaagagcaagagagacaaaattagaagcagggagttggatagcctccctgctggctttgcccctggttcctctactcccctggtgcctcccctcaccagagactgaaggcaggctgtttgtccattgcagaatgtgagcatttgatccgccatatgttggtgttagatcccaataagcgcctctccatggagcagatctgcaagcacaagtggatgaagctaggggacgccgatcccaactttgacagggtgagctgggaaccgctgctgcaggggactcctctgaaagctgctgcagcctcctttgcatgtgattgtaatcaggccataacctgaaaggcggacactgggaacaaactattatgtaacactaaagcagcacgtgaagcaagcaagaaggaatgtaaaaccagttaaactgctggagaatagtgatcatggttccctaccatgtgtccccaaattatcgtctgtttttggcttttgagatagcacagcctgcagttctgcagcttacctaccatggggatgtcgccttcctcttgtcttagtgtgctcaattcagtggcttctgtagcatgcttttatttaaaccactatggccatgccaggtatgccagggagctcaggaaacagtgagttgttgtctgtttacagctgatcactcagggctctcttccttagactttgtctgaggccaaaaatatcccaagccagagggcatggaacaggttggtcattatatatgctgtgccacatttgatgtggttaattggggggttgacagcttcctcctttttatgttacagttaatagctgaatgccaacaactaaaggaagaaagacaggtggaccccctgaatgaggatgtcctcttggccatggaggacatgggactggacaaagaacagacactgcaggtatctccgaaggagtggagaacaaagtgggatgtagcagttcctctaacctgctttttccatttttcgccttctcgggaacttgggccttttttttcctcctgtttttcttcctctgccccttcctgggccttggaaagaaggaaagaaggtgctttggctaatgttattactgaaagggttctggtcatcaacatgccatttcaccagggttttgtactcttttcccttctctcttggtagtcattaagatcagatgcctatgatcactatagtgcaatctacagcctgctgtgtgatcgacataagagacataaaaccctgcgtctcggagcacttcctagcatgccccgagccctggcctttcaagcaccagtcaatatccaggtgggcaataactccagtgacctagttcaggacaagtaacaccaggggggtaaaggttagctgttgctcactaaccctaagtcgagagtttcttgctcttccttacctctgtctcctcccatttgtcatctcttcctttgtcagaggccaatcaaagatctgaaccttttttgatggagaggagggatgagcaacaatagttgtgccttttgtttttttgaagaaatagcaaatcatgaggcgatgctatcctcttcacaggatgcttccttgttgtgacttctaagggccgatgaaccaaaaactttagtaatcagggaaacatagactttagcaatcaagactacttggaaagactcattatttctctctagtgttaaaggtatgcgtgtatatgtatgtactgctttccaggcggagcaggcaggtactgctatgaacatcagcgttccccaggtgcagctgatcaacccagagaaccaaattgtggaggcaagtagcaacctgtgggagctgtcagctgaaaccactttctttgccatatccttgcttcccttccttctgatttctaactcgatggtgtttccctccacctcagccggatgggacactgaatttggacagtgatgagggtgaagagccttcccctgaagcattggtgcgctatttgtcaatgaggaggcacacagtgggtgtggctgacccacggtgagtatccggccaacagccctcactaacactggggcaaagaattgtcacctgactttcagtgtctaccatggcacatttcctactacattgtatccccagaggagatctaatccagtggccaagtggacaaatgatatgatgtaacttatgtatgtagacaattaaaatttaaatgaataaggatccaaaatccaataacaacagtttcccaaagtgttttcccaaaatagtctttcatgatgttccctgctgcctgcacactggaaaaaatggactgaaggccagctcgccccatttttgttccacggttgaagactctcaacattaaaatagccttacctcttttctggattttttctttgctgagtaggaagagaaggttgtgggaagaattctcctgagaggtcaaatcagggcaaagctggttttcttataaatatctcttttcttccagtgaatttccaaaaaagactcccatgcctgctgatgtgcttgctttatgtctcttgttctcagcctatgatcaaataggcaataggggaacattctggctccacagactgagatagctttaaaggggtggagccctgagtcgctctgttagtggaaagatgtcttactttaaagtatgctgtaaaacctatcattgtagcaagatagccctgtacatctagtacttatctgtcctatcagcactgacaagagtaattgcattctttccctggtgaatcagttgctacttcaggcagccattatcttagtggatggcccatgttctccagaaacttggtgttcacctccaggatttgaaaacctgaactggactggtgccactatttcctcttggctcagagctgttggttttacatgaatggccaataaagaatagcaatccttcgtcccaaatagtaaaggagcagagagttaaattccacactttaggcttttgctttgctttaggatcttaaagagaaacataaattcaggaagaaaataaaataagttgtactgaacatagcaatgccatcagttttgggatataagcacttttgagtaagaatgttaactaaacttctctgtcattctgttttgtatcagcacggaagttatggaagatctgcagaagctcctacctggctttcctggagtcaacccccaggctccattcctgcaggtggcccctaatgtgaacttcatgcacaacctgttgcctatgcaaaacttgcaaccaaccgggcaacttgagtacaaggtacctagacatggaagagggctggctccagaagaaacaaacttgagcttcctttgagaggctatgaggcaccttccctaggacttaagggtttacttatagagaaagatgatttatcttgcaaagtagctcgggtgagcgggaagcgtcctctagtctctgtcatgacccatggctcccttaatttccatagatgagtggcttgcccctttctccccgccttcccctcatctcatggtccgtcctccccactctgttcctggcaggagcagtctctcctacagccgcccacgctacagctgttgaatggaatgggcccccttggccggagggcatcagatggaggagccaacatccaactgcatgcccagcagctgctgaagcgcccacggggaccctctccgcttgtcaccatgacaccagtgagtagcagcacagagcccaattcactgtctcagaggcttttgataaaaaggttgtgagcctggggttgggaacccagggccaacctacatgtctgaatttcctttttctccaaacttaggatgctccagcccattttcttcaggccagtagagttttccacactttatttttggcgaacttacttacttagccaagttatttctacattgaactccactcctggagagctttttcctcaatgggcgctcacaggtaccctggttaagtccagctgcactcctgccagcttggggcaggtagcagcctaactcagagccttctcccaggcaacctttccctgccagaaggccaaagtgcccttaaattaattggtttctagactggcttccaaaattgccttttcactaatgctttctccattgataaacacacctcacatgtttggcataacctggatcacttgatgatttgctcccacagctttagccgagtcagttatcttagtcacatgtccttcatatgatagtcacattcagagattttttttctcccttgggttctgtttattttcctgtcataggtcattcattcattcatttattcattcaatctcatagtaccataagattgggtagtaaatatatccatcacccttggagatgttgtaagggcagtgctgctttgaggacccttttccctcctttaatccatcatgggttaatcccttgtaaaatatagtaaaagtgaaacattagaacagtgaaaatttaaacacatataaaatacaaggcattttttattgagttcaacagacaaaattactctgttaaattgctaaaagtgtctctttatttatttttttaaattgctaaaagtttctgaaagccttttgttgatttctgtacttaccttatcatgaattggtaacaaaacagtttgtgggcatgggtccatgggccacactttcagtaatgaaagaattatatatcatagcccttgccatcactgacaagatcaacatatgtgaagtatttgactaatagtacaagatcatatgtgattaagtaccacagtaataacatggaaaattaggtggcagaggcattcagagatgggcaagacaggtttggaaggatcatggtcagctttatgggacgtggggtgacttactgtgtctactgtaactgtttttgccaaggtcgctaacaagttcttgttgataaattcagtggacatttttaaccttttatctttttggacgtcccaactgtattaatcactgttgacttcttttttccttgaaatattttctgttcttggtgtctgtggcaccacattccctgtgttttcccccacctctccttttcacatttcctttctgcttgttccttgaggttggcaaaacccagagttttatcctaggccctattcccatgtcctttgatgtactctctctggatgagtttgtccactcctgtaatttcagttactctctgattctccagcccagaatgctcctctgagttctacacatacgtgtacatgactgcctatgggatagatttagttggttattccacaagtattcacaactttaattcagcatgtcccaaatgaacttaccatgactctgtaaaacctgctcctcctcttgggtgacagtgaatggcactgtcattctccgggttacacaagctagggatgtgaattttatctttaactcttgtctttcttatttgccatatcaagtcagttgtccagtgcctgtgaatgaaacatcctctccactttcctttccttaactcaggtcactgtcatccattgtgtagatgaacaccacggcatcctaactgacttctttgcttccagtcatgtcccctgatccctgccaccagcccttttcacactgcagctagagtaagctggcttttgcaaatataaatctttataacatcatgcccctgcttaaaatcctttagtgattcaccactgttcttcctcaaacttcttagtgtgttattcaagaccatttgtcactggccacagcgttcctctcctgcctcatctacagccacttcctgcctcaccctgttcactccacccttgtagaactgtgggaagggatccaggaaccctgggagctttccgacaaaattattccaggagtgttttgttttgttttgttttgtaattagccattttgtaaaatactcttttataataattgaagtgtgatttttgttctagtgactggggcatggtgatgatgtgggcacccaggctatgggtagctagcaaggatgcagatgggaaagtcacagtgatacaagcattgtggtggttctcatttcactcacatgttttggcgagtaacaactattttaaagcagtgaattgatactacacaattgtatcttatgtaccaaaatgtaatttcagtaattcactatgctttcctggagttaagacatttaaactccggaaatcacattaatatgaaacaacaggtcaagtcctagacatttcaggtaaacaatcttctactgtattttcgggtcctcaaacacctacaggccttctcttttcttctgcctggaaacctgtaactcctgtccctctttgcctgaccagctcctgtgcatccttcaggttcctgctaggtgctacctcctccaggatgccttccttaattcccaaacacccccattagaagacttgatcatgctattttgtaattgtttacttgtctctatcctctactagactgtaaaatgagggcaaggtctatgtctgtaaattcacattttatcctgtaacagtaagcatttggctatttgttagattaataaatgaatgaatgaagataaataagaggaagaaattctaattagtattacctaagcaaggtaaaaatggaaaaataggtatatgaaaatcctgtataacccaggagtctagaaaagttctgtaaataagaaagttaacagaaagtcctgccccaagcccagttactagagtaagaggcatgacagaataagctgccaccttgagcttttccttcctgtctctcttcaggcagtgccagcagttacccctgtggacgaggagagctcagacggggagccagaccaggaagctgtgcagaggtaatgtgacatctggcagtgcttgcagaagcccctgggcaggctcccctgcaaccagcgaaaggtcacctctgcccaaggaggtggtagagtgcagcttcaacatttgtgtggtctctttgctcaagccagatggcatgttccaccccacatggaagtaacagaagactacccagaaaatgtcatttctgtaagcaccattggaagtcccctaagtgacagcaataaccataagaactttttctttcctccctccttcttccttgtcccctgccttcatattgcaactctgatagtattcacaaggcacaaagcctgctcgtacctgccaagaactgtttactgaaaaggaattggagatgtgggatgacagtgatcctagctagtctggccatggacctctggcatggacttttcctttccaggagaatgaatacctcttgtactgtttgctgtgtgcttcttccacccccttgtaccaacaaagagatattgaaaaagagaatatgggattcgggccagggacagatgcaaatatccattgtttacagaaccttgttgagagatgcctaactcacagagaacggcagtgaccatcaggcatgctgtactgttcatttggcctcagttccgttagccctggtccttagctccatgcatgcccccttgtgggagttgattttcttattatccggggagggggtttcaccagaatccagcatgtattttcccagaaatacaggtgttcttcaagattatatgttttttcctttgagggaagttgaaataaaatggttttcatgggcttttggggaactttgggtgtctttatccaatggttattaaaacattaatggcttactctttggcaagttcacataacactgattactctacagtctgttaactgattttagctgaaaggggcaagatagttaagaatgaaatgagaccattttttaagaacctgccagttgctggctaggactctcatcctatccccagtagctctgtgtgagagctgctattcagaaagcagctggtcctatgtggaaagaaaaccatggcaaacaggggtgttggcaggtgggccagctccttctacagcttggccaatagaaggaaaattctggtaacttttttttttccttgatgctgttgtttctatagtttgctgataagagggtatataaggttacaaatgggccctactgggtcatgaagaaatgagaaatcaggaaatttactgcctttctaccttaaaagagacagcaatattttatcttctttgtcttagactttccttcctccaggtctaccttctttcttctttagaccaacatttcaagggtataatgcccatcagttttgatgtaataaaaaaggtgtagtgcctcttttattcatgcctccagaagagcagcagcggtggaggaagtcatccaccagacaaagagggacaatatcttattgatggtattaactaagtgctgggtctgaaagatcttccgaataaaagccatcagtttgggaactcttcgtcttgtgagactcttctgtttttattttttgccttgctttttccctccctaactaaacatttcatgtggttttatttcttcatcctccacagaatgttggttccccaaggacaacatcagtttttcttctctgatgattgagttatagtcaccaagcgagagggaaagggtggttttggaattcatttatcctcaaatggaaggatcagttttctgtgacctgtagtgaagaaagtctcaaacctggggcctgtgagatcgagagacatgcacagagtccttctgaatatctccccaggttcatctctaggaatagtccttagggctcatttcctctgacttgtattttggaaatttggagggaaaagatgaataaattaacatggagaaaataaattcttctaccgagtagaatgaagcaaggaaaagtgatctcatctttgtgagctagatctactttctctcttctcttcaatggctattcttaggttcaaaattcagccacttcattgtcaagccaacttctgttggccagttagacgtgtctcacttccatccaggcagggatctgtttgccatcaagccttcgtgagctctggcactatttcattgagtgctttggattaacttctaatgcttcttgtggaggaatattcctgtctgtcttttttactatgaaatgtgctcctgcttgttgcaggtacttggcaaataggtccaaaagacatacactggccatgaccaaccctacagctgagatcccaccggacctacaacggcagctaggacagcagcctttccgttcccgggtctggcctcctcacctggtacctgatcagcatcggtgagtagccacatgagctgtgcgagctccttgaggctcatcggacaggcacccttctgattagtctcacagcgacggtgactagcatcgtggctttaaatagaagccagctgtcatcctgaactcacatcttctcagctccttgcagtaagcaatgcacagggcaaaggttttttactgcgccctggagcaatgcgagattcctctctcccattaccttgcagacctgtttattgtctgcatttgattcccatgattctagatgttgattcatagataaaattgaacttgagacctgcaagaaagtgaaactctcagaaggccacctggaaacaggaagatttttagccatatcgatagacttgacctttaataatccatcaccttcaaaagaatgagcatttcatatcgtgttaccattgaaccgccagcctggaaatgaagacaaagccccttctgaatagtagagcagagatcctcttgagcgatgtatttaagaggtcattctttcaatattctgatggcaaaaatcttttgctaggttcggttatggttataatccattctcttgaagaaataaaagcaagtttaaccttcctgaccaagaaaacttcattgactccaagtaagcctggaagcagctgcggaatgacactttgctagttgaagaagatgattatcttctgtgactatcttgatgactaaaaatctcagtcttggccactccgaagctatccccaagctcatggcccacacgttcaaagccaccaccagttactagagcgtattttatttctgtcttttggggaggacactgaaaagcagccttgggaaggttgaaaagcaatcagattccaaggaaactaggtttatatatgtggtgttatgaaatcttgcagccagcttgcactggcaagcttgacacattttttttactgaggctggttacccatttggcatcaacataatcagcagaggcaagtgaactctgagcagagtgggacataattagtgccacgttggaaccctaaaagaaggaagataagctttcataaatgactatgagtaacttggtaaaaatggtctgtcaggagtagcaagaatgacaattctcaaataaaactctgatggcacagaaagacaggctttttctaatgaaagtctctcaggacttacagtgttcgtacacactaaagagcactttgaggccaggcacggtggttcacgcctgcaatcccagcactttgggaggccgaggcgggtggatcacaaggtcaggagttcgagaccagcctggccaatatggtgaaaccccatctctactaaaaatacaaaaattagccgggtgtggcggtgggcgtctgtagtcccagctactcgggaagctaaggcaggagaattgcttgaacccgggaggcagacgttgcagtgagccgagatcatgccactgcactccagcctgggcaacagagtgagactccgtctcaataaataaataaataaagagcactttgagtgattactggagacctgccttctcctcccctatacgtttcctgtgatttctcataacttcaagctctacactggtatctaatacaccctttattccttcttttctccttgtctccttcttcccttcctccacagcctgacacttaatgtttcagcccttgtctgagtctgttgtttagctgaagtcctttaggtatccttgttgaatgctaggtgttcctcaggaggtcttcttatgaggggaacatgaagatcgtcacatttccagagtcaggctttatcacagaccctatattctgttgacatttgttactcaaggaggtccacactggaccacagctctgtctgtgtgatatccaccctgcctagagtcattgtcaaggccttgcctgctggaaatctatctgctgtctgttttcatgtgaacctttttggtgttttgagggttgcctgtggccaagcctatttgaattggaagaaaatgatgttttatgagtggcaaattgcataagatggggcatttgtgcaaacccagcatgtcttgatgggatcactatacaaatatgcagcaaaagagattaaagccagtcttcaggggaaatgagaaactttccaaggctataaaacatggaatacgggtggcctgcatgggttcttgaattcctttcattttctggaggaaatgattaaagaacagtatatatagctatccttctggggtagaagagatgaagttcaacatggaaacagaagagtggtctaatcaaccttttcatttctggaaatgtgtaatttaaggttaaaaatgttttaaaaagtgtaactaaaaaatttttttaaactaacacaagatagattttatccaggtgggaaaccaagtccctccttgaagagtatagtgtgggagtatcagcctaatgcgaggccatcctgaatttgagtgtgattgcaaataaaaataaaatcaagcacaattgatacttatcagtgcttctcaaatgagcaactgcatcagaaccgttcctctgaggttactgtgctggactgacctgggtatcagtctcttcacaacctgagcttctgaaaaagtcatgaaatacctggacctgggattttctgtgatgggagagaattatttttgtgcagaaagactgtattgctacttgaagaacatggctttctgaggggatcagaaacatgtccatttcagaaaacattgaaagcataggaatcaaattttaggagaaaatagtacttacttgcttctacttcaacctgaagtagaaacagaaatgacaagttataaggaaatgcttctcaacacagccttcatgatccctgttcctggattgtggcccgccaaattcatttgttttttgtgttgctgaaccaaatacatgttcgtgctcatttcattagctcactgctgggtcaagcctcaggtagagtctgaaacaaaagccatcattagcaaagacagggtaaaaggctttcacctgctgccagaactctctggatacctctgcacggtcattagattcctcctggtcccgcgctgtctgcattgtatttgaactcgcttgttaacctgcttcctgagctgtggttctgcttcagtcccaaatgaatcactggcaaggtagcacatcatttcatccaaagttcagtgtaatggcatctctgccctggacatgaaaccctgatcctttccatctgctactggaatgctgctgccttggcagtcttttatctgcttacctcagcccataaacatctctttctgatcatcaggtcacaagagtaggtgttagcttctaaccccgatgctgtcttaggcattccttatcaatagcttgttctttctttctgtaagattctggctgtgttccagttgagcagtggggtctttgaaggtaatccatatgattcctctttcattaggaggttgggtgagtgctgctgctctgagaagttgattttcacagtaggtgaccttatttgttgaccaggtacgtgcaggatctcaaggcccacattccttaagaatttgttgtctccatcccaggatcagaagtcttcattttcccccaccccaatcgccaccttctattttctgtcacagaacctatgagttctaggccagacctttgaccacaaaactgactgttgtttccctctggccatacggagatcattgctcagggaaaactttggctcaaatggtgaatttaaggtttctaaaggcactagatagacatatgattataaaagcaagagcttctgtacagtctggcctggaggatattgagaagcttttctctctggcctagtgtatttataagaactggatgtacttgatctcgggacctcaccaggcttggaaagtaagccaaccgaaggtaagtagaaatggaagatgtacacctggagccctctaaagggaagcaggctagggaaacgactgatgtctggaaatggcatgaaagtggcataatatgcagggctacctgggcagccagccgtctttatgttcatctggaacagcagtccctgtgtgatttggtcaaagcccctgagtcctagcctctaaccttctcttcccatatattcagctctacctacaaggactccaacactctgcacctccctacggagcgtttctcccctgtgcgccggttctcagatggggctgcgagcatccaggccttcaaagctcacctggaaaaaatgggcaacaacagcagcatcaaacagctgcagcaggtaatggaagaggtggcaggcatccctggaggagcatgggtgacagaggccaggattgcaggaggactggggtggtaaacgtaccccttttatgtcagcaacattgcagttttataggttaaaaaagtatagctttctgggccgggcgcagtggatcccgcctataatcccagcactttgggaggccaacgtgggaggattgcttgagccctgaagttctagaccagcctaggcaacgtggcaaaccctttctcccccaaaagattaaaaattagcatagtcccagctactcctgaggctgagatgggaggatcacttgaacctgggaggtagaggttgtagtaagctaagatcacacccctgcactccatcctggcaacagaacgagactctgtcttaaaagaaaaagaaagtatagctttctaatgcactttctttactttgtgttatgtacagccctccccaggatcaaacttccttcccctgtgaagggactaaatttttctcctgtctctagttcattggaaaggaatttctgggcttgggtttctgtgggaaccaccagagaaggtgctactttttttttttttttttgagaccaagtcttgctctgtcacccaggctggagtgcagtggcacaatctcagctcactgcatcgtccgcctcctgggttctagagattctcctgcctcagcatcctgggtagctgggactacaggcgtgcaccaccatgccagctaatttttgtatttttagtagagacagggtttcaccatgttgaccaggctatgtctcgaacttctgacctcaggtgatccgcccgtctcggcctcccaaagtgctaggattacaggcgtgagccaccttgcgcgcctggcactctgcgcatgatttaggatgctgggtcttgattaaacctgctgtacattgttaccacctggcattctctccaggtggtatggaacggcactctcagaggaaggaaatgtacctctatatgtttctgtactataaagattctataaagagccaatttcctttctgccttcctgatgaccaagcttccaatggcgtgtgctttgtacacagatttcacattggacacttgtactcatacaaaggccatccttgatgttttccattcattcatacagaacaggatgtgaatctatttagtgcaccagatacttaggtaaatgagttaattgctcatcaaggacactgttctcttgcggctctttctgcccatgagagcttggaggcagatctgcatctgctgaaatcactgcatgaggcgggtctggctgcatcccatctgtattaactactttcccttcaggagtgtgagcagctgcagaagatgtacggggggcagattgatgaaagaaccctggagaagacccagcagcagcatatgttataccagcaggagcagcaccatcaaattctccagcaacaaattcaagtaggccctcactctttgctttctccaacttgtttggagtttgctttcaggctgatttgcctgtgcattttggaggagaccactcagtgcaaagtggatttgaggtctgtttatggttgacatgtttgagtaaaggtaatcagaccttctggtgaacaacaaaagcataaatctgagacacagatagttctttctgtttcttcccttcctgagaatagctctgagtaatcttcaagctcacaataatttttttcctttccccatatatgttttaggactctatctgtcctcctcagccatctccacctcttcaggctgcatgtgaaaatcagccagccctccttacccatcagctccagaggtatgagtcattttgtgttgtgcctaagccattgtctcgatagcctggtacccttggcttgactcactgggagatatggactgacttgagcattcatcttgcaagaatctatttgaaaaggagagaaaccactgtaaatttcaggagccttcttgaaatcccaacttcctgtgccacttcatttccttagccccatgagcaaagtaatctgatatctaatacaggagccagacataggcccacaatgaactctgccattttggctgagttcttttcaaacaagatgtagataggttttaaatacactgtggtggatggcttatgtatatttttctaacatgaggcttatcaaagtaaaaaaaaatagtttccactgatatatgttgtatggctgaaacttaagattgtactgtcaccttaggaagcttctttgtgtatctcttttgttatttttaaggttaaggattcagccttcaagcccaccccccaaccaccccaacaaccatctcttcaggcagcccagtaatagtcctccccccatgagcagtgccatgatccagcctcacggtgagtggagaggttcagaccaaacagttcattttatgccacatgggaaaaaatgatggtctcagttttgagcaccataaaccatttgaaaggcagaataacatagtattcaggggtatggactctagagccaagctgctttggtttgcatcctggttccatcagtttcttagctgtaaacccttgggtaagttaacttgacttcttgaattagtccatttcacactgctctaaagaactgactgagactgggtaattgataaaggaaagaggtttaattgactcacagttccacatggctggggaggcctcagaaaacttacaaccatggcagaaggagaagcaaggctcatcttccatggtggcaggagagagattgcacaggggaaagcgccagaaacttatcagacaaccagatctcaagaattccctcattatcatgagaacagcatggaggaaactgccccgtgatccagtcgcctcccaccaggtccctcccttgacacatggggactacacttcaagatgtgggtacacacagagccaaaccatattacttctcaaatgtcaactgaggataattatggtacagtatgtagatatacgtaaaacacttggaacagtctctggcacaaaatagttctcaataaaggtttactattattaatatttttaacaaaacctccagccctaccaaataaaaagcagctaccagaaccttccttatagacatgcctccgtttggctgtctactatacacgtgggcccctctcttgtgggtgtacagatgggagtgaagataagtataatgtgactgtgagtcttcagaggtcagccgtcttaggatctcttgagtaacactccacgagctacgtccctagtcagtctccctaggatccttgagaagagtctgaattggcctctaggctcttcctacttaaagtggggtcccccagccaccaatattgggagaaaaagtaagatctcaggtcgtattccagacctgttagagtctgttttttttttttttgagatggagtctccccctgtcacccaggctggagtgcagtggtatgatctcggctcactgcaacctccacctccgggttcaaatgattctcctgcctcagcctcccaagtagctgggattacaggcgcccgccaccacacccagctaatttttgtatttttagtagagacagggtttcgccatggtggccaggctggtctcgaactcctgacctcatgatccgcccacctcggcctcccaagtgctgggattacaggtgtgagccaccacgcccggcctagagtctgcatttttaaccagatgccaggccatttgtgtgcatgtgaaagttcaagaagcactgcctagatccgagttaccccatgtaatccatggaccagcttttaagggaacttgttggaaacacaaattcttaggggcccatcctgacctactgaatcagagtttgaaacagaattatatagataggacccaggaatcttctgtttaacaagttctccagacttgtcctatgctcagtgcagtttgagaagcactgttctagctggtatgtcgtctgagtattctcattagctctcattacttctggctggctggtggcctgggcacttggtcactctgaggttcctttctctccaggggctgcatcttcttcccagtttcaaggcttaccttcccgcagtgcaatctttcagcagcaacctgagaactgttcctctcctcccaacgtggcactaacctgcttgggtatgcagcagcctgctcagtcacagcaggtcaccatccaagtccaagagcctgttgacatgctcagcaacatgccaggcacagctgcaggctccagtgggcgcggcatctccatcagccccagtgctggtcagatgcagatgcagcaccgtaccaacctgatggccaccctcagctatgggcaccgtcccttgtccaagcagctgagtgctgacagtgcagaggctcacaggtaagaccgcctaacgtcacccagccatctatgcatgggatccaggtgggaggaagccccttagcagagtgagagaaaaggagggaaggagaatgggtctgactaggctgtgctcttgtttcacgctttctaaaatcaggatgctgggtttggaatgaacttgtcagctttttattgacccagggttaaaattctaatgagactgaggtggaaaatgggaaagctaccttattatttgctaccttattatttgcttgcaaagaagaaaatggcctgttagaggaatgtataaaaattccagttccccttttcttgaagggagcatcttgaagttgcttccttcaaaatgagctagatctattacccacgcagtgccctcagtcccttggaggttactggacaagccagtaatggaataaatagggacaatgcatacatctgccacttctctgtcacaccacagttctctgtaccagtgggttctccctactgaggaggaggagctgttcccaggaagtctagtacttgttacatggatgtctggtactcccttttgtgtctgcagcttgaacgtgaatcggttctcccctgctaactacgaccaggcgcatttacacccccatctgttttcggaccagtcccggggttcccccagcagctacagcccttcaacaggagtggggttctctccaacccaagccctgaaagtccctccacttgaccaattccccaccttccctcccagtgcacatcagcagccgccacactataccacgtcggcactacagcaggccctgctgtctcccacgccgccagactatacaagacaccagcaggtaccccacatccttcaaggactgctttctccccggcattcgctcaccggccactcggacatccggctgcccccaacagagtttgcacagctcattaaaaggcagcagcaacaacggcagcagcagcagcaacagcagcaacagcaagaataccaggaactgttcaggcacatgaaccaaggggatgcggggagtctggctcccagccttgggggacagagcatgacagagcgccaggctttatcttatcaaaatgctgactcttatcaccatcacaccagcccccagcatctgctacaaatcagggcacaagaatgtgtctcacaggcttcctcacccaccccgccccacgggtatgctcaccagccggcactgatgcattcagagagcatggaggaggactgctcgtgtgagggggccaaggatggcttccaagacagtaagagttcaagtacattgaccaaaggttgccatgacagccctctgctcttgagtaccggtggacctggggaccctgaatctttgctaggaactgtgagtcatgcccaagaattggggatacatccctatggtcatcagccaactgctgcattcagtaaaaataaggtgcccagcagaggtaagtgtctcctcacagtggaagtcctgggccagtctgccctaatcaactgactcagtaatgttatcttttttcagctagtattctgtgttcctaagaaaaaaagaatttctgagcttcacgaccttcttggggagaagcatgtaggaagtgggtattggtgggcaaggggtccattttcaaaatcaaaggaccatgatacaaaattaacacttagtcaataagatagatgatccatttcccttattcataccacagtttcttggaatccagaaattcctgactgccatccaaacagctaactttaaacttgtgcaatagaaaaaaagtcagcccaacataatttagtgtaaatagtgtgggaacaagagtcagagcaccttaattctgctcttgcagctatcataaatacgataactttgtcatttaatccctctgattctgattttcctcatctgtgaagaaggtgttggaggaacaatggagtatcttacggtgtatctgtggagatgaaaacatgtatatatgtgtttgtttctacataatgtttgcatgagagagagaggcacattcagatcatctgaaatgtttgagttcagtgcataaatgtgaggtattattactctggtcgttttattagtgagctaaatgcagaatattacagcatcataagggcccccattatcatttcattttgtaccactttataattaatgagtatattcattatcattctgaaggagatcaggattgcaattagtaagttatacttagaaaatatagttccattagcatcacggcattcatcctagacaaaatcaggaatcttgcaatttaccactcctcaccattgccatccaagggaataaaaagcaatttatctgtaaactgtacaaccctgagactgagcagtttcttccatccttccctccccggaactacctgcatctcctgccctgtcatttaaagtcagtgctgaaaactcagccccagggggaattcggtcctgcagcacagagcagtagagaaggccttgctgtaaagcggtgtctgtgaaaacgccttggtggtgccaggttgtactcattatgcgctcttaggggggaattgttgcctgaaatgccaattcaatcctgaccttttgaacagatgggtgtcatccagctgagagattggctccagtgagatgtactgtgttcacctgtggctgctgtattcttagtagacataggagggtgggagctttcagaaccagatcataggtggaatggttaacagacctgagggtgtttaggattgggaggaaaaactaagagaaacatcacgcttgttagatggaagaagggattagatttttctgggttcatattatggggcagaaccaagatcaagatagaagttgcagcaaatttcaacaccctgtggaagacctttataagaactctccagaacaggctgccttagcagcctgggagctttctaacagaggtgggataatggtatggggatgttgtggaaaagattcccctgcaaatggaagcttccagcagattagcacactatagttggcatgaaaaggagatgagctcacgtttctttttttttttttttttgagacggagtcttgctctgtcacccaggctggagtgcagtggtgcgatctcagctcactgcaagctctgcctacaatgctcacgccattctcctgcctcagcctcccgagtagctgggactacatgtgcccgccaccacgcccggctaattttttgtatttttagtagagacagggtttcaccgtgttagccaggatggtctcgatctcctgacctcgtgatccgcacgccttggcctcccaaagtgctgggattacaggcatgagccaccgcgcccggctgagctcacatgtgccaggcaccaaatgctgttcacatacggattcatttaatccttacaacaaccctacaaccctagaataaccaactcttattcccatttaccagtgaaacagcggaggcacagagattaagtaacttgtccccaaagtcaagaggtagtcaggggcagctgaacataagagtactcacactagctgtcactgacacgagagatgctcaccgagcaagtcccgggtgtgcagggcactgaggaaggagcatagctgcagcaaacagtgctgctgccctccacccctgccccaggctgagttaccgtgtactttcaatacttcctgaaatgtttttcttcaaaaattattttctctagtttctctttaccttccttcctgtgtgacttgtgtgtgtagaaagtctggagagcataattccccattgtcccctgattgtcagaggaccccttcttcggcaggcacgctagtctgttgagtacccactgttggtgcaagtgctgtgggcgcaccagaggagggagagattacttcaatccaaggaacaacgtaggtttccagcaataagtagcctgtgggttgggtcctggtggatgaagaaggtttgccatttggatctagaggagaagcaagagaaaagaacaatgggtgagactgtctcaaggaattttccaaggacagcagcaggcttggctggtttgaagtacagtgtacatgaaggcattagtagaagctaaggacagaggttttctaaaatgcatcgtctagattcagctgtactgtgaaaaaaactcaagttttttttttttttttttttttttttggcagagtctcacactgtcacccatgctggagtgcagtggcacgatctcggctcactgcaacctacccctcctgggttcaagcgattctcctgcctcagcctcctaagtagctaggattacaggtgtgcactaccgcacccggctaatttttttttgtagagacggggtttcaccatgttggccaggctggtcttgaactcctgacttcaagtgatccaaccacctcggcctcacaaagtgctgggattacaggcatgagccaccatgcctggctttcaggtttcttttaaaaactccagagcttacatttttactttactgaaaaaatcatcagataatttgctgttcacttctgtcacgaaaggcttataatgctgtgcccccaccactctgcaggcaagtgggggagctcactcttctcaacctttttgccaggaaggaatgcctgctgtttcttttaatggtccctccatctcaactgtgttgcacaagactctactgtaggtgctgtgagaatgcagagatgaaaggataacctgtcctcagggagcttctactctactaggggatgtaaaacaagctcataaacagctttgctatgaagtgctaggtactgagtgctgcaagaagtatcactgagaagagcagagctagtgtgatcttcttagcatttcttaagggtagatgaacagggattgttggtgttatttagttactttttgagtcagggtcttgctctgtcacctaggctagagtgcagtggtgcaaccacggttcactgcagcctcgacctcctgggctcaagcagtcctcccacctcaacctcctgagcagctgggactacaggcgcgtgccactacacccagctaattttttttttcctttggtatagatggggtcttgctatgtcgccggggctgatcttgaactcctgggctcaaacaatcctcccttcttggcctcccaaaatgctggtattacaggcatgagccaccacacccagccatattggtattagtaaaggaaaattagatgccatcatatcagtgtccatggttacctatttccttgatggcgatttgccaccagccagtatgaggccaggcactgtgagagcactaagcaggcagcatgccaaaggtttcttcccaatttgtagaagtgtcaggatttcacatgccccatgctgtccgtaatctccctgcctgccaccctagaaggaaaaacaaggtttgtctttcttctatagtggtacacacacttgatctttttgactttgcaaataaacacagcagcataaccaatctacaccatgagattaccaactggaactcacaaagaaaaccacatcctcttctctgagctcagtcagcctcagctttattactcaggcctcatagagcagtaaaatgctgacagagtgggaggggttaccccagaacctttaaggggagtatgcagtcacgttattgctcccattttctctcaaaacccagtaagtgagtcaggacgagtcaacattgacagattcaatagagaattgtgcaggttgccccaaagttccccgggaaggtgggtggcgtgcattgtgtccatttgtgcacttttccccttgtgtgatcggacgatcatcccacctctgcactctcttagctttagtttgataaatattcgagcatgtagctcttgggaaccatctttcctccatgactttggtagctgctgaattggcataaagggttgccaaagatttgatcctgaatgtcatgttccttgggcagtgggttagtctgtttgtaccccccaaaatggtcgatagggtcttatttatagagtgtcacaaaggacttctagactcagggtcagcattcttaccaaaaatcagacttgacttatttggtcttttacagttgattaaagactctttcacatgtgttgtcttttcgagcccccaaacaaccgtcatttttcagatcaggaaccttgaggagaagctgaaagatttgccaacactttgctggtgagggagctgggtcctgacttcaagttttctgatcccctggtcatgtattttttcctttacgcctccttgcccactctgcaccctccaagcacagctgccaagtgaaagatgctagcccttccaggtctttgacctactgatgatactgaaacttgagcagacagagccctggggtatcccctgactcctattaatactctttttcatctggcttttaactgacatttgtctgtcctgaatcagaggcttctcctggaaattaaagtttccctgagtcatttgttcatttacatatgggtatattgtccctcataattctgcaagcagggttctgtgattaaatcaatttccttgtttgtttttgtcagctgactcagcacgtccttatgcactcagaaataacatctctaaactgaatataaatcatgctagactttattgagcctttacagtgtagtaacctctatgaagcactccacacccatggagtcagtccagttgtacagataactaagacccagcaaagcaagataacttgcccgagctcctgctcctcaggaagcagctaagccaggattcacggccaactcttcctgaccccagaacttgtgctcatgacccttgtgctcaactccagcttggctgagggatgagctctgggctgggagtcaggaaggccccctacatgatttgtcaggtggttgcttgctctgtcttggtgcctacaggcatcagacctgaaggcggggaagacagcagacaaggcagagcccaaaggagggtgggtgttttggtttgcagaggccccattctcagggataaaaacaagtctgagagagggaaggaaaagagccttaaaagacacagcaaacaaaccaaaacactgaggcctccagaagaggcaggaaggctccaaccaggactatatacattttgttagctttgctgtttcctcatggttagtaatgatgttttaaaaatctttaaacaggagagcgctcatgtttgtccttgcggagagcaaagagatgcaactgatgagatttgcatccaactatataatcaggcttaaaggaaaaaagcaccccgaggaattgagtggatgatgttagttatcaaagaagacaatataggtttttgaaaaagtaagaagcggctgctcgcattgcttcttggcaaagcagacagaatcaccatttcctcactcccacacaaccatgttgccccacttcctgccagtggtttttggttggccctggcgccaacatgcgagcagtgcccactgagaggaattgggcagagtgggtaggacgggcgggctaatcccacagagcaagtcctggtgtaggttttcttttatcttctctctgctggcttttagctttctgtagcaaaatagttggcttctggctgttccttttacctctttgctcagagaactttcaaaagatttctcacttgccatcatctttggtagctgggaagctccctcctctaatttttctccagaatgtcttgcattactagcaatgggcatgtcagttagctcccctccctttccatcctgcctctgcccctaagtcccagcctaaccttaatcattatagaaaaccattgaaatacagagacctgaaatcctttacccaacattcaagaagtatgctttactttcattatttaaatagatcattggaatggcacagttagcattacagctgtgtttgctattaagagcttttgttttaaacttagtcccaccaagagtcagttcatccaagataagctcagtagtttccaagaagctttaactcagaaaaccaaccaagcaaacacaacttattttcaagtcccaggcttttaaagactgaagtcaaaagtgctaccaggaggatcctgtcaacataggtgtggctttgatagtcttcttgactatccttgatcaagaagaagtactcattcctttttctctccaattctagtccatagaatggtatgctctgacaggatagtaacccatattaagagagtatttatttttattattcttttttgagatagagtctcactctgttgcccaggctggagtgcagtggcatggtcttggctcactgcaatctctgccttctgagttcaagcaattcccctgcctcagcctcctgagtagctgggactacaggtgcacaccaccacacccagctaatttttgtaattttagtagaggtggggtttcaccatgttggccaggctggtctcaaactcctgacctcaggtgatccacccgccccggcctcccaaaatgctgggattacacgcacccggcctaaagagcatttactgacatcagtgaaagagatcataatactgggtataggacaatgttctagaacactgaagattcacagacatacatgagatatagttcttgcctgcaaagaatttatagtctaatgtgaatgattaagtacataattgaacatggtaccaaggataatgttagagcaatcagagacaaagtcttttgaagtttaaaggaagagatgatctatttctgtttgaaaggaaaagtttaataaaaacaatagcatatgataatggatgtagaatgatgagttgctttggattggcaggagtgaaggcagaagaatcagttatttgcagatagaaggaacagtgagggcaaatgcatagaattgtgcatagatggggaacagttaagtggtcccatttgactagagcttagaatgtatggagaggggaatatgagacactgattggaagatagcccagggcagtgttgtaaaatgaaagtgaatggactacagaacggttggtctttgtagggtagtagtaggggattggttatgaggctagcataataatccaggcaagaggtaatcaggtttccatgagattggcaacaaagggactgaagtgaccagcattgcagagttagattcagcaccaggagtaaggaatcaatagtggccccaagagcttatgcctggaagatttggaaaatgaggcatcaaaacgacaatgtctgaaggagtagcaggttatgggggaagtggatgggtttggaattggacatggtaagtgttacatgctggttagatatccagggaaagatacctagtaagtagctggaagtatggatctggggcttaaaggagcacttcagtaattctttacataaaggcagtacagccatgaaaatagatgatgttgccagagtaagtgtggggagagagaaggtcaaggacaaaaatgtggagagtacttgcttagaaagggtggaggggccatcaaaggagtcagaagcagcagttagagaagtagaaagaggagagtagcagcgtggtacactgaggtcaccgggggaggagagaggacgcagccagccacagaacagatgcatcctctagggctagagggtcctgaaagctccgagagtaattctcatgtgcatttaggtttgggaatagatcactgttaattcaacagagaaatgaaagaagagaaggttcggtggggtccagccatgccctgttacgtggaattttttccctaagggtgtggtcccctcccctacagctcgtcttttggagggctggtccaggctcctctaagccatgacgccggctgaggatcagcggttggtgtacatgatctcctcagccttgcccattgtcccttgcaagacatttcttggatgggagtttccagtgctgggagaagttccgccccactgactctattctgctgtgtctcctcagagcctgtcatagggaactgcatggatagaagttctccaggacaagcagtggagctgccggatcacaatgggctcgggtacccagcacgcccctccgtccatgagcaccacaggccccgggccctccagagacaccacacgatccagaacagcgacgatgcttatgtatgttggtcccacctgctgcacagaggtggatcctcccagtcccagccttgaaacagagtatagtgatgtggggtagcctctcttggccgctctcctcagtcagcattcagcctttctggaaacggtggggagcatttctttttttttcttttttgagatggagtctcactctgtcgcccaggcgggaggacagtggcgcgatatcagctcactgcaacttctacctccccagttcaagtgacttttgtgcctcagcttcctgagtagctgggactacaggtgcctgccaccacacctggctaatttttgtatttttagtaggcatggggttttaccatgttggctaggctggtctcgaattcctgagctcaggcaattcgcctaccttaagagcattttctttgagtcaccctaacagaccaaaccttaattcaagtagaatctatgctccaaattttagaccaaagaatcagaaatagttgccatctgttccctgtagttttggttattaaacctcttctcagtctaaactcaggccccagcaaatgagcccataggcttctggttatttttcagcagctacattgagcttactcagatcaggggagctggtgggcctcagcaaagttttgttttcctagggtggtgctagtctagtagctagccacatgtggctattcaaatctaaaccaattaaaattaaaaacaatttaaaattcagttcctcagtcacaccagttacactttattttttattattattattttttgagacagagtcttgctctgtcacccaggttggagtgcagtggcgcaatctcggctcactgcaagctccgcctcccgggttcacgccattctcctgcctcaacctcccgagtagctgggactacaggcgcccgccacccttttttgtatttttagtagagctaaatttttttagcccagctaatttttcgtatttttagtagagacggggtttcaccgtgttagccaggatggtctcgatctcctgacctcatgatccaccagcctcagcctcccaaagtgctgggattacaggcatgagccaccgtgcccagcccagtcacactttaagtgctcagtagccacttgtggctactggttaccatattggacaggacagagaacatttccatcactgcagagtgtgactggacggtgctgtcctaagacaaagtcccagtggagatggggataggtcagaaacctggttttagaaggccatgtaggtatcaagatgtcaccaccagctgagatttgccacatccgccccaccctcagcccccccactgggcagagccaagcagcttcccacactgtcgctgtggagcaccccctttgggtggtgctttagaggaaggagtctggagtggggccccgggctgtcttttgcctgggctccttcagaaggaccagctgtctctaggggttgcctgagagtggtgtcttgtgtgcttatttcttctcttaactgttttctgcaggtacagctggataacttgccaggaatgagtctcgtggctgggaaagcacttagctctgcccggatgtcggatgcagttctcagtcagtcttcgctcatgggcagccagcagtttcaggatggggaaaatgagggtgaggagccttatgcatggggcactccagagaagttcctggaggggcctccctccatcttccgtaactgctcctctcttcgtaggaagagctcatggggaggtagagccacagcatcccacaggttctggacacagcccctttccccactggtcttccctgagtgtgggtgtgtaaaggaggtgtggcttctggccagatggcacagggctctcccattcctgtctctcatctctgtgatgatatgccttcaatcactttttccagttctgcttagagggcatcaggtcctaatggcacatttctacctcttcttggagccagtcaagggagggtgtcataacaaataataggcgtaggccttgggcggggcaggtctgccaccagtcccaaggctgtccttttcaggctctgcaggtgaggcacttggctttctggaccccgagatcctcatctgtaaagtggcaaaaacgatagagcctttatcctacattgtgccctgagggctggctggcttagtgagtatcaagtgcttagcacagtgtctggaagacagacagtgcccaggaatgggtgcctgcaggcagtaaaattattctccctttcactctttaagaggtgatcctttctgaaggagtcctctatcttctctcacactacagtagttgatcttacctaaggatgggaaagggtaaaggaaaagggaaaaaagcagaacaggtagaggagaatataggaagaatcttggcccccgcccatcgtcactcaacaccttgagggcctgctgtgagctagaattcagggctgggagtcaggctgtgggatgctcgacaggttgccttcaattcctcctctctctcccccttgctctcctagtcccccagttccctgccaacctcatacgttctttttggtcttgcagaatgtggggcaagcctgggaggtcatgagcacccagacctgagtgatggcagccagcatttaaactcctcttgctatccatctacgtgtattacagacattctgctcagctacaagcaccccgaagtctccttcagcatggagcaggcaggcgtgtaacaagaaacagagagtgagtgtcaccctggccagagccaaaccagccctgtggcccagtgcctgctcccaatcccatcaggagcttcagcccatgtgttgtggtggccagtgcagtcgacagtaccacgcctcccctcgtggccttcacagtttcttgcttttcattaacgacgctgctagttttagggcgcgaggtaggggtgggggtgtgcagaagaaatgctaaacacagtctcttggttcggttatgggaataagacacaagactcgccgtgtgttacaggtgctctagccttcatagcgacagaagtgagctacggctccagaggatgcaggtgacctccggtcagcataatgaggaaaggaggaagtccttaaactcagtcctaaaagacaaaacctggcaggaaaatatgtccagccatattttttaaggccatacagaagcaagtggcaggatattccagattagggaaatgtgtgatgagaggcccatggtagaaagaatggggaaattggcttgtttggctggagtaatgcaaagagtacacagcaggcaccattggttgtatctggaaaatccttgacagaagaggcctgatgaaagggaagccacttggcaaatccacatcagagcctcagtatggcaagctacctgaacacctgagggaaagtaaacccgttgcattttttaaaaggttttaaatggaatatttgagcctttctcttttcaaactaattctcctctgtgtctgctttattccaggttttgtgtacagcttgggaatgaaaaggttgattgt

SEQ ID NO: 15805 - DNA, 254994 bp, Homo sapiens
cggagctggcggggctgccggggccgggactgggggagccgggcccgcgggccgcctgctgcctccgcccgcgccggggtccccagccgcccccgctgccgtgtcccctgcggccggccagccgcgtcccccagccccggcctcccgcggacccatgcccgcccgtatcggctactacgagatcgaccgcaccatcggcaagggcaacttcgcggtggtcaagcgggccacgcacctcgtcaccaaggccaaggtaccggcgcaggggccaggcggcagtcggagcgtggcggggccgggagaggtccgcgccccccagccggggggtcggggcggcgagcgcggcgcgtggtgggagcgttgggggccgggaggcgggagggagccagccgcggcggggcgggcgcggagctagggacacctgggactcgagacggcggaactccaagcagggggccgagggcacagagcaccggcgcccaggagccgggcgcggggaggggtcctcggggctgagggcaggcgggtaaaggggatgattggaaagaaggggtcggaactccccgagggccgggagactgtaagcccagaagactctggaaccagcagctagggaatcataagggaatgagggcaggggcatatgaaatgtggacccggaggatggggaaaaacaagggtgaagtggcagacccgggcttgtaaggggacccaggacggctggggcacggactgggaatgtgcacgtctgcagggcgctgggaggtcccaggatcctggtgccttaagacagagacaggaatccgcatttgatcatctaagactgatagatggtgcgaaggggatcccgaggagacacgattagtggaggaggcaatgaggaaaatggggaaataagggggaaattgctttgcttgtccacaggaaggggcccagggaatgggggagtgaggtgggggtgggggctgtcccaggtttatgatggcactaggtagtcaggggttaaacaatttgggagagctgattgctggttatttttagttgttggagggtcgggaattgtgggctttgtagaacccagggtgggcttttactggttggggggaagcttgtgattgaagaacccagacaccgggagattacactcatcgagcccttagttctcaaagggatttgaggcgctataggagtgaaattggccaaggtcaattaggaagctatatatgtatgcatgtaaaattctttgaggaaatatggtagcactttcatgtagccttcgttgggaggactggaatctaagacatcaggaggaatcttttggttttggtggaacccgcaaagcccatttttactctaaaattttctttgctcaatatcttacttgaatgaatacttttaatgtagtcattcattatgtttagaactgcagcttgtgttttccctcagcctgaggaatgaagaacccttacagctgctgccgcctcctaccaaagccacatcaattcccctcacctcctcagcctagcctctggttgtcatgacctaccttgtttttgcttttttggcagtggcttgttttctgaagccagtgacttatctaggccttctctcctgatcacttgcaacctgaagttccttccccaccatctttctgcctgaggctacaaggggcccttcttaccagggtgtcagggtgggtggctgtggcgaattgattggtcagtttcacttcctctggagggccctcttcagcctttttgtccgtttttatcacagggcctccagtctgcaggtcagagctgaatgagataccaaagtccagggctccctcagaccctgaggggaagtcaggggaagtcgattgagccaagactttggtgtgctcctcacttgccaccccagcccctcaccgtgtttccagtctagttgactattagccaaggcaaacttacatttacaaacaatatgccttgttccttgttttgctatttctttcctttttttctgcctattttctgtgtaatcactttgtgctcctgtggttattttgctctgacctctgggggatagtctccatgaacttaattggttgcctggtttatggtttcatgatttaaagaattttgaatcttccagcccttggatacaccaaaatattgataaaatctgttacagacagggttgaatgttttcgtaaatgtaattgcaaacagttgattcttggctttaatataaaagagacatttctatcttcagtagtcagcaaagccagtgcctaattatggctggtctgcccgctttctaattttcatgtgtgtgtatatgtgcgtgcgtgtgtttttcatagtttttctctgagaccttggtatcctttaggactgcagcattttaaacactggcttgtttacaaacgggtgtcactgtttatgttggtttttatctttgatcatttgtggtatgcagttgtgcaattcctatgtatggaaatattcaaagtcttgaatgagactgaaatggcttggacaatgagttgcatgtgtgaaggagccacaccagcattcatttgtgtttctgtagcagtgtgcaatttcctagttacagttacaagtgctatatcttttgctgcttaaattactctgactacatgagtgaagcttaattcacaaggagttgtcacgtgctctgggtgaactaggagcatattttggcctgctccatgcttctctgaatccactttggaaggggttctcaaatgcggacagcttagatgtgcctaacagctgtcgacatacagtacgatggcctattaaggttatggtttggttatataacaatggtgaaggtgcataggtactagaagttgccgaagctgctgcttcagttaactcaggttgattttttttctccccatgcactgcagcctttatcttacttctgcagaggggtcatttggaaacagagagttatttttttcccccatctgtctccagaatgtgtcatttgttgttttgtcttttagaggtgtgtgatttttttttccccttgtaggaaatggtctgggttttcttataaccatatataacagtcagacagaggtaattcagatgatacttgtgttggctgaaggaggttaggtaataggtattttctgaacattagaaataattatgatccccctcctttttttttttttttttttttttaaacacacatgacccattccaagaactaagagactaaagtaaacctcatttattgagtaggatactgcactccatccaatactgcgtggttaagctggccctttcccaaattctgttaactctcaaaccgtctagagtgggatcctgggatgaataaaatcagtagagaaaagtgaagcttttcctatttggttgttggttacttttgcagcacggcattcatgagctcagacttcatattggcagcactgcagtgcttagagcggcactgcagaacagttaccaggagagaatgttcagctgtgacatactttggttagtagctcaccctggctgtctttgtcctacctgctttgatttccttttctttggaagagccttacttagcctgaggttctctggctctgtttttttttttggtaggaaactataaagtattacagatatttttaaaaaagaatgttttctgctctcaaattgcaggtagtctgttgcctgtgcctaattataccttcactagttggatgattgggaacaaagagtagatagattttgtatgcattttttttccttttttaaaatattggggcagggtcttactctgtcacccaggctagagtgcagtgacactgccagagttcactgtaacctccaactcccaggctcaagagatcctcctgcctcagcttcctaagtagctgggactacaggcttataccaccacaccaggttaatttttaaattttttttgtagagatgggggtctcattatgttgcccaggctggtcttgaacttctggactcaagtgatcctcctgcttcagcctcccaaagtgctgggattacaggcatgagtctgtaacccaaatgcttggcccatatgcattttttaaagtatgcatgactataaaagcctttggccaaatacgtttaaactatatttcaacaaatatatatcacttgcctgttattggtttgtggtaagagttccagctttggataaagcaacctgagtttgaatcttttgctgcttaatagttggatatttttaggctgtgagaagttatttaacttctgtgtgcttgggtttcctcatctgtaaagtgggatgacagtagtacttacctcacaagtttaggtgttatgaagattaaagaagatagtgtatgtaaagctcttagagcagcatggtgccctaatagcatgacgtaaatattaccatcatcatcatcgttatcagatgttttagtaacataataatattatggacataataatagtcctcctttttttgcttctcaccccttgggcacgattcatgaatgtatatgccattagttttgtgtaggtagatgccatcctgacgatagactttcctggtaaaaaaaaagtttgctactattgcaggtgccactttgagatagttggatttaatttgtatagggtacaggctggctaatctcatgaaatcagcattttaaaacataaattttcattagttaaacttttttttttttttttaaatagcaatgtgacttatctaatgaaaactgtgaccaacactggcttttgctttgggctgccttgaattttcagtgtgttttgtgtaactaatttttgttatgttgatgatggaacagagttgagtgcagtcttttctccagaggtccacttaaattaggtttaagtgaaatatttaagaaatgtttctgcaagcttaaggacacatttgcccttgcgtgcacaagcaaaggccttagacggccaaggtcagaattcttaactttaaatattacacagagaagacattttgccctatgacccctttccaaatattgactagccagacacatcggtgtggtttagtgcaaactcatttccatgaggagaacaagtcaaagtgggctaaaagcattattttcacctctaaagaagagtttaacgaagcacatgagatgatgctttcacccattagaaaactgaaaacaagattcatttggtaagtaggagagaattatgtcaaaaagaaattgaaagcagaatttacattagatacatttgaggaagatagccccatccctagacaatctagaagtgactattgaaagatgattatgttcagtttgatacagtggtgatggggttgctaaacgtttttgaaattttgtaaagagctaagactgattgagactagtctctccagagtcaaaataccagtattccattttctacatcaaagatgtttattttaacattttgactttggtgccagctccctagaaagtcatagatctcgctcaagccagaggtgcccagactagttatttctgtgccagaagtgctgttttcatttttcaggcttcagtctggctaatgttttctagttcatcgcgtaaaagagaacaaaatggatgctttgaaaagaaaaagaaatgctttctactcaccagagccactgtaactgtaaaacaacacctaagacatctgcatagagatggaacctttcccttaatcatttattcattcaacacatttattgaatgaaaattttttgtcaggttccattctagggtctggagtgcaccaatgaacaagggagacaaaaagcatctgcctttctggagctttctagtagaaggagacagacaagggacatgtaaaaaaattaaaaatttcatataggaatgaataccaggaagaaaataaacggactagagaatccctggggggggctgctgcctcagatagagtggtcagggaagacctttctttccaagatgatgatatttgagctgagacctgagtgatgagaaaaagccaacctgggaagatttggaagacagaagattccttacagaaggaatggcatgtgcaaaggccatggggcagaagtgagtttggtttggtcaaagattagacacaaggtcatgatgccatggtaccttagcaaacaagtggaaggatgggaaaagatgaggccagacatgtaggaggggccagatcatctgggtcttatggccattttatggaattgggtgtgacacgggggtgacatcagagagtatcaagcagaacactaatatcacctaatttatgtttttaaaacgtggctggatgtggtggctcatgcctgtaattccagtgctttgggggggcatgaggcaggaggatcacttgaggccaggagttcaagaccagcctgggcaacatagtgagatcccatctctacaaacaatttaaaaattagctgggtgtggtggtgcgcacctgtagcctcagctacttgggaggtggaggcgggaggatcacttgatcctgggagtctgaggctgtggtgaactatggacacaccattgtatcccagcctgggtgacagagtgaaaccctgtctcaggaaaacaaaccaaaagaaaaacagcaactcatgctggttattttatggttaagagcaagaatccttttctgatgcatttcttggcacaagggaggagttcagttttaacaacttatattctttctcactgtagaggaatattgacataaattgcacataaattaagcatgatcaactaacaagtatttgttgatttattgggcatgaaaaagaccttagagaggttctattctagttctgtcttctccacagtctggaaagacagacttaacagaatttataatctcaggttttgcctggcatggtggctcacgcctgtaattccagcactttgggaggctgaggcaggtggatcacctgaggtcaggagttcgagaccagcctggctaacatggcgaaaccctgtttttactaaaaatacaaaaaattagccaggcgtggtggtacatgcctgtaatcccagctacttgggaggctgaggcaggagaattgcttgaacccaggaggcagaggttgcagtgagccgagatcgtgccgtcgcactccagcctgggcaacaagagtgaaactccgtctcaaaaaaaaaaaaaaaaaaaaagaaaaaaaaaacctcaggattttacggacttttaaagtcatttagaccaattatccattagattcatggctcatctctctcctcactcccattttcccggagtcttataggtagttagtgggggagctggagttagaatccagttatcactactcctacttaattctaccctgacttctctaatcacagaaaacagtgcccttgccttctgagcacttgcttttttactggggaagcgagatacacctataccaattaaagtctaagatatttatcctttctataagacaaaccaaaagcgagatgtcatgatgagaggaaacatttccgagtagagaggaagagtaaatattccaaccctgtatttcacctgtcctttggcattataccactctgtcacctttgccactaacttttagtaccctatgggtccactgctttgcctttaaatctgctagtcagatgccccttggcatgactgagatatgaagaaaatgaaaagggaaagaagtaaacacagcatgcaatgaccgtaaaagtagtctgccttacgtagttttctcatgtcattatatctagctaactcctagggaatattggtaattatacatttgttctgctgggctggtctgatctacctttgagggtatgtttcttagatgggctcctcacttactaaatgactaacactttccagggatggtgacatcttataactcattaagagaactggtcatctagatatataccttgatgacacaggtgagggtcaagagaaccatttatatcaagggttcctcttttttttttttttcattatcctaagtaaacacaagaaggaattcttcttaatatagttctagtttctggtctgtgggctatggctgttctccagatgaatgatctcacctatcaggtaggtgagtccctggttcctcctaatagcgagtagcttggtccctttctgggataataatgtagtcatacagtcccgtggatgactgataacatcaagagggtgaaaattatatacattcaaatgggcttttatcctaatctaataaaatattgctaaataaatggcgtaggcaatgtccttgagaagtctcaacagtcttgaatgaattagcttgaaagacttcttttggatctgttcagaatagaattgcggaagcgagtacggaactgttggatgagccatcagtaagttatgttaggaacatatttgtgtttagcaggtgtgtgatccgtggtagacaaggagcctctggacactgatggtattttatctcagacttaggcttttcaaagaggtaggaatcagattgtgaatacttagccacatttcccagaagttgaaacggaaagagaagcagactcattgcctgttgaagcttgtctgtgtgggctgagctcactcagttggatactttcggccagttattttaaactaaatttaggttttgatgaagttctgaaaaattatcaaatttctgtctagtttcagctccagcgcatgtttaccagcagtatactttacttttcatagctccccccagaattgaatgtgaaaatgtaggttagttgcccacatttcttgagacggaattttttggagaagaaattttttattccatccatccatccaataaacgtgcaaaattatcagaaatagaaatggatgatatatggcccaaaattcaaaaggtacaaaggagcattcagtgaaatgaagtcttcttgccaccccaatacctgagtcacacagtttcttagtcttttttttttttttttgagacggagtctcactctgttgcccaggctggagtgcagtggcgcgatcttggctcactgcaagctccacctctcgggttcacgccgttctcctgtctcagcctccagagtagttgggactacaggcgcctgccgccacgcccagctaattttttgtatttttagtagagacggcgtttcaccatgtgttagccaggctggtctcgatttcctgacctcgtgatctgcccgcctcagcctcccaaagtgctgggattacaggcgtgagccaccgcgcccggccagcttcttactcttataaacatttattaagggcatctctggattagtccaagtgctagatgccgtttattttctgacagtgctttgacatacttgaaatttccaagcataattttacttaaaagtaaaaaaagaaaatacctggccagatgcagtggttcacgcctgtaatcccagcactttgggaggctgaggcaggaggatcacttgagccccagagttggagaccagcctgggcaacatagtgagaccttatctctgcaaataataataataaaaataaccaggggtgtggtggtgcatgcctgtggtcccagctactcaggaggctgaggtgggaggatcgcttgagcccaggaggtcaaggtttctgtgagctatgatcgcaccactgaactccagcctgggcaacagagccagagcacttctcaaataaaaaaggaccaaagaaaaatacctaacctaacttatactgctcattaggatggcacagtgtgataatctaatgtaagccctgtgggggccggaattttaatctgttattcactgctgtattccttatgtttcgtgcaatgtctgcagatattcattgagtacatgaatataaggattaaaaataagagctgagtttgtttttatacccttaatacatcttttgacttttactattggaatttcctatctatagttaagatgttaaagaaaagtaattttctacctttttctcacaaatctccgagtaaggagatttcacagcttttctgggctagtaattgatttttggcatatctcaaacttttactattaggaagatcagtgtatctaaagtaagtcttgcaatttgaattcaaatcccttagttttttgttttttgtttttatatttttgagatagggtttcgctttgtcacctaaggctggagtgcagtgatgtgatcatggctctctgcagcctccacctcctaggttcaagtcatccttctacttcagcctcctgagtacctgggactacaggtgcatgccaccatgcccagctaattttaaaaaattttatttttagtagagatgggggtcttgctatgttgctaggctggtcttgaactcctgggctcaaatgatcctccctctttggcttcccgaagtgttgggattacgggtgtgagccatcacgcctggccaacatcagttttactttaccataacattgctgttattttttgaatcttttttataattttatttctagtttttcactttacaaattttctgtgataaccattgttgtgcacaagtctttgatgtacttctgattttttgctccggatatattgttgaaagggaaattaccgtgccaaagggaacacatgcttgtacggcacctaatatgtatattgccacattgctttccagaaaggctgcactagaattaacctcctgagcagtgtatgagcaggcttggctcactgcaagccacactggctctctttatcttatctgtctccccatctgcctttgttggcttgggggtgtagggcttttaagtctctactacacctctaaacctagtcccatagatatagtacaagtcaggagaaggttatagcagctgtgtaatccatctttccctgtaccaaacctggaagaggaatgacaagaattcaagtgtaaatctaacctttttttgaggcagagtcttgctctgtcacccaggctggagtgcaatggtgcgatctcggctcactgcaacctccgcctcctgggttcaagcgattctcttgcctcagcttccctagtagctgggattacaggtgcccatagccacgcctggctaatttttgtatttttagtagagatgggtttcaccatgttggccaggctggtcttgaactcctgacctcaagtaatccaccccccgcccccagcctctcagagtggtggtattacaggcatgagccaccgcacccggccaagtctcaccttttacttgctttttataaatcatcattctctcctgatctttgataaagggacaaaaacccaaactggagaaattgctgaagggaagaagaaaggttaatgagaaacagactcttgatcacccaaaccattgattttttttttttttttttttgagatggagtctcgctctgttgtccaggctggagtacaatggcgtgatcttggctcactgcaacctctgcctctccggttcaagtgattcccctgcctcagcctcctcagtagctaggattacaggcacgtgccaccacacctggctaatttttgtatttttagtagagacggggtttcaccgtgttagtcaggctgctctccaactcctgactttgtgatccacctgcctcgacctcccaaagtgctgggattacaggagtgagccattgcaccttgcctctccactgactttttttttttttgagacggagtctcactctgtcacccaggctggagtgcagtggcgcagtctctgctcactgcaacctctgcctcctgggttcaagagattctcctgcctcagcctcccaggtagctgggactacgggcgcccaccaccacacccggctaatttttttgtatttttagtagagacggggtttcaccatgctggccagggtggtcttgaactcctacctcgtgatccactcgcctcggcctcccagagtgctgggattataggcgtgagccactgcacccagcctaccattgatttttaaataactattttttggtaaaccagcgtgagaatttcagagattaataaaagttgtaaattgctcctccctcgttttaatggtgaaaagatagtcaaggagattgtgaaggagaaagttatatgaataaatatggtaatgcagcagtcctatcatgtttaaatttgctgtgtgcattgtactttatgggttaagagattttcaagggtaattgggccatataggatattgtgcttagtatgttgtggggttatgactgtggaattatctgtgttttggacatttggtggtaactgcttttcttttatctccaatagaagccctcctatacagtaagttttggttatgatgtgcttagttaattgaggggaaaaactgataaagcaggaaaatcagaaatatatattcatgcattaatctttttttggtttttcttttttatgtagacggagtcttgctctgtcgcccaggctggaagtgcagtggcatgatctcggctcactgcaacctctgcctcctgagtagctgggactataggcacatgccaccatgcccggccaatttttgtattttttgtagagatggggtttcgccatgttggccaggatggtctcgaattcctgagctcaggcagttcgcctgcttcggtctcctaaagtgctaggcttacaggcatgagccaccatgcctggctcatgcattactcttttaaaaagtatgtattgtggaaaatttcaaacataaatgaaagtagagggaataatataatgaacccctatgtgcctgtcgcctagtttaaacagttgtcatcttgtgaccaatcttgcatttatacctttcccacttccccgcttttttcctggattttgaagcatatcccagaatcctttcatttcatcggtagatattttggcatgtatctctaaatagatgaagattctttaaacaaacaaacaaaaccaaaccccagggctgggtatggtggttcatgcctgccatcccagcactttgggaggtctaggtaggtggatcgcttgaggctagctagttcaaaaccagcctgagcagcacggtagtagtgaggccccatctctaccaaaaaataaaaataagtgagcggtggatggtggtaagtggctgtagttctagctacttgggaggttgagctgggaggattgcttgagcccaggagttccagattacagtgcagtaaactatggttgcgccactgcattccagcctgtgtgacagagaccctgtctctaaaaaggaaagaaagaaaagagagagaaaagaaagaaagaaagattgattagcacataggttaatatcaaaatatcttaacctatgttaacaaacattaatgttttttgttaatattaaatattaatgtttgttaacataggttaatattttgttaacctgttgatgcagggccaaggctttttctttgtgtgccctagttggagttccttaattttgtttccattaaatacacccataattcattatctataatttccagttttgtttgctttttaaagcagaacatgaatttaatggcatttgtgaagcaatattagtacagcatccctcttgatttttatgactccttcccagtcttttatactcatctcattcacgtctaatttactatgtctttttaagcatttgatgaagttttcatagaaacgtatctccttaatttttcatcagtttacattctatttaattaaattacataactgtaataatgagcaactggtataaataggtttgggaaaaaaacagttaattattggtaagaatataacttaataacgggaggctgggcccggcgcggtggctcatgcctgtaattgcagcactttgggaggcccaggcaggcggatcacctgaggtcaggagttccagaccagcctggccaacctggtgaaaccctgtctctactaaaaatacaaaaattagctgggtgtgttggtgcatgcctgtaatcctagctactcgagaggtctgaggcaggagaattgcttgaacctgggaggcagaggttgcagtgagccaagatcctgccactgtactgcagcctgggccacagagcgagactccatctcaaacaaaccaaccacaaaaaaaccaaaaaacttaataatgggagcagcagaagcttataagagtaagagacagctgttattagttggggccagtttgcatgttgggggcattggttgctttactgagacaaggagaagcattgattattttggcaggttggttgagtgaaggtgggctaagagagcttctgcgttaatttaaaatgataaagaagtcaaagctgttagaaatttgaggacaagttattttatagaatcttttattatttatagtgtgtacttcgaggtggtatttttgtccacttatgttagaatttgtgtgaactgagctgaatttggtaatgagtcagtggtattaaaaacttggtgaagaaactggccaaactctttagtttaagaggtttatatctgttcactgctagtgtagtgttctgtggaacaagttgacattttcttgtagtaagttgttttctgtttctggcggaagcaatcttggttcatatgctgcaagaaacagaactgtttttattgtggaagacaggagcagagctgtgtgtttcttattaggatgagttggacacctgcaggatttcttctctctttctgcttcttgcctcctgttgtcttttccttctgttagaatgttctaatattgcataagcagcattccgacaatagttgaatttttttggtacttcatttttttaaactctcaaaataatgtttttagtgattgtatgttcttggcttactttccatttctacatcaacagggatattgttattctagtcaaatggggtagttgtattctggcaatgatctttgggtccaagtcagctgcagaaacaacactttcatatattatacctaaatatcttacatgtgtatggtaattctgggaggtaattaaatgttgggatggtactttaggatctctttaaaggatttcacagttctcaggaataaaataacttgtttgaagcatgttactcattggcctttgaccatgcaaaagggtagccagtgattttagcctactgcctcttccgatctcattttcctcctttcttttgaggcagcagctgcatccagtgccctgctctaattgagctcttagtaaaaggggtattgttataccaagtcacaacctcgtatagcagtgaggttacatcaatggttgttagatttttaggccacgcatccattttggagtcacattaaattttgaaaaccaaaatttagttgcattacctaaatttctcttccttttcttatcctgataccaggataagaataggttttctgtttttccagctctttgtggaacctttttggcccatcagagttgcttgcgacaatctgtagttaaagaactgagactggtgcgggaatcgggatgtttctggttccagtttttactagccagcagtttgactttgggcaaattacttaacctcagggggcttccagtttctctttaatttataattttttcaactgctttattgaggtacatttcacagaccatacagttcacccaattttttttaagtgtattcatggagctgtgcgaccatcactataatacattttagaacattttcattatccttaaaagaagcatggtacccattagcagtcactgcttatttcttcaacctctcttctcagccctaagcaaccacaaattaatttttatcgatttacgtcatctggacacttcatataaatagaattatgcagtgggtgtcctgttgtattttacttctttcacttggtgtaatgccttcaaggttcatgcatgttcttacatatgttggaatctcattatttttttatggctgaataatattatgttgtatggatacgccacatttttaaaatcaattcatgaattggtgggcattgtttctacttattggcgattatgaataatatggtcttgaacatttgtgtacaaatttctgtgtgatcatgttttcatttttttcttgggcatatacctaggagtggaatcgcttggtcatgtggtgactccttgtttaaggttttgagcaacttccaaactgttttccacagtagctgccccattttatattcttacctgcaatgtatgagggtttctgttctgtctacatccaaaacttattttcttttttttgattttagccatcctagtggatgtgaagaagtattgcattgtggttttgatctacatttccctaatgaacaatggtagtgagcatcatttcatgtgccagttgatcatttgtatatttcctttggagaaatgtctattaacatcctttgcccatttttgaattggattatttgtctttttattgctgagttgtaagagttctttatgtttgggatacaagtcccttatcggatacatgatttacaaatattttctgccattctgtgggttgtcttttcagtttcttggtagtgttgtttgcagcacaagtgtctttaattttgattctctagtttcttaatttatatagttgtttaaactctgaaactatatgttttattgagattattttcctctgtgctcattctgtactttctcccatgttcatatagctctctctttcccgggacgttttctagcctcaaagactttatttttttgattaatttatttattttgagacggagtctcgctctgtcgcccacgctggagtgcagtggcgccatctcggctcactgcaagctccgcctcccaggttcatgccattctcctgcctcagcctcctgagtagctgggactacaggtacctgccatcacgcccggctaatcttttgtaatttttagtagagacggggtttcaccgtgttagccaggatggtcttgatctcctgaccttgtgatccgcctgcctcggccttccaaagtgctgtgattacaggtgtgagccactgcgcccggcctctagcctcaaagactttaaaaacatctgtctatgtatttgcctctctaatacatgtgtcttacaaaataatcaaaccttacaaaatgtataacaaagaaagtgaaagttcctcatctctccagagaaaacattaactatttataaccagattttttccccattcacatggtaaaaattttttttaattaaaaaagggaacataccacaatctagtttgccacttgttttttcatttaatagtatatctccaacattattccatgtcagtacactttgtccttgtctcaatcattttaatggctgcagagtattctattttatggatatactatactttacatagtagcctattgatagattttagggttgtttctagatattgttttatttttttgagacagagtttctctgtcacccatgctggagtgcaatggcatgatcttggctcactgcaacttctgcctcccagattcgagtgattctcccacctcagcctcccaagtagctgggattacaggtgcgcgccaccacacccagctaatttttgtatttttagtagagacggggtttcaccatgttggcttggctggtcacgaactcctggccttgagtgatccccctgcctcagcctcccaaagtgctgggattacaggtgtgagtcagcgtgcccagcccagattttattgttttaattacaaattttacgtaagttgtttctgcacatttatatttgcacacttgtgctagtggtttttttttctattccatttatttgctattgcagtatttactattcaaaacacgtagacttattttaaaaaataaaagaattttatttagtgtgacctagagtcaacgtctcaaaagttatgtattcttttccatcatgatatatacaatgttctgatcttcttttaaagccagagtcttcattttcttggtaattgtatagaataatttactagaagtggaatgcttggatcaaagtatgagtgcttaaaatcatgtaagatgttgccacatcaccctccaagtaaggccatgccaattcactcagcttgagagtgtatgacagtgatttttctgttctttttaaccctggcaaatagcctttttagggaattaatctgacaggtgaaaaaatgtcattttattatttgtagttacttattagtacattcgagcatcatttaatttgtctgttggttgtctttctgctttgtctacttttctgttgggcttttggctttttcttattcatcagttgtcatagctttattattattattaatgttttaaaaaaattgagttggagtctcactctgtcacccaggctggagtacagtggtgcaatcttggctctctgaaacctctgcctcccaaattcaaatggttctcatgtctcagcctcccaaaatgctgggattacaggcatgagctgctgtgcctggcctgtaatagctttttaatattagggaaattagttaccttataaaatatattactgatatttttctttgtcttttgactttgtgtgtgtgtctaatataaaatgaaaatgcttttatttttatagtcagatttttctgtttttttttctctttatggcttgctttttaaaattctaattatataaaaatatttacccatttttttcaactacttttatggttttgtttttaaatgtaaatctttgcttcatgtgaaatgcattttgatataaaccaaatgagataggggatgagttgtagaatttattagagttgtaaatttacatttatttttgtgattattaatggcttattcctacttgactgtaagtctcatgagggcaatgtattgtgttgttttgtttttcccttgctcttattttcagtgtctagcacaatgcttgccttgtaatacaccctccatttattgaataaatgagtctaggtttttctccaggtctctagcttctcctgacacaattaattgcataattgctcttttccttcttgatttaaaaagcaacactatcatttacaaaactccaatagatacttaggtacatttctgaattctaatccattgagtgtgctgtcttttcttgctttgatactgtacagctttaattatgatagctttatacaacttaaagtatatttgggaggccagctttaagcactcttaaatatattataccacagtttgggaagctctataatctcctttattaaactttttgctatacctttggaaacattcatttaacttaacaattaaacacttaatccattctgaaagtcagcctgcaaagcagaaatgatttttggggtgttatttggtgtaaagagtttttttttttttaggatatcatacttaattctggcatgacctctttagtgtcttttaaaaaactctcattttataactttgggcatttctagaaaagcaacatttttctcacagttttctaatgcaaaatacacagaggggtaggtggcagaaaaggtatcgagatgattgtgttggcaccccactgatgtcgaagcagatagtggaaaagacattacttaaaagtgttttgcagatttcgggttaaattaaaaatatgacaattttaatttaatttaattaaaaatatgacaattctcaggccgggtgtggtggctcacgcctataatcccagcactttgggaggccaaggcgggcggattgcctgaggtcaggagtttgagaccagtctggccaacatggtgaaaccccatctctactaaaaatacaaaaaaattagctgggcctgtaatcccagctacttgggaggctgaggcaggagacttgcttaaccagggaggtggaggttgcagtgagccaagatcatgccactgcactacagctgggtgacaaagcaagactccgtctcaaaaaaaaaaaaaaaaaaaaggtgttatgcagatttcagtttagccaccttgatcctcccaccttgtgcatgacacgttaccttcctgtggcatgcagtatttgactgattcattggatgtgacttgcattaagttcagataacattgctgaataatcactttcttattctttagtgtagcctcctttctctgtagaacatcagaaattcttaaactctgaaatacagcattctcttgggattttctgtaatgtctttctcatgtaggaaccaacttcagggtcttgtgagcatcagagaagtttaaggtctagggaactgagctaatggaacaaggcatgcctaatgtgataaaatccttgctttctttgcaattgaaattgtttattctaaataactgctaatttacaaatgtattttcacatgattacccattctgttctcaaagagcataataggggttttgtgactttcagactttcctgaaaaagcctaaccgtggattttagaattattaagctagaaaaatacacacatacacacacaggtttgtttgggacccttagtctccaccctggaattaagtgacactgaaaataactctggaataaaaggtttttatgtagcagaatagttgacttacaggggttcttccctttgcacattttctctgggtagaaaatgagcttgtttttcttttagttgtattacaattttttttttcctcaatgctagtcttaactgagagatttttaggcagttaactctcccagcacagcaataagcagcttattagtagatattatctcttgttgatttgttacccttgagatttactgtgcttgcaaaacacctgtctgtatttgagctttgctaggtagttggcttttgtgtttgactgaagattttttccaaagaaagcaaatagctattaggaaaagaaagagtcagcaaatttctgtatgctttcatggaagagatttcccaattagaaagcttttgtaggcttaaccttttgccctaaagtaacccaacatttcattatgtattccattgaggttttggagctcggcaccagaaagcgaggaccaaggttgaatgtgaaaggaatattcagaggatgaagctcatagtcaacaaagtgctgcttcataggctaggtccaaaaataacctgcttgccatagggagcaagaatggaggtagcattagctgctgttttgagcagtgtttcatgtcctgtcatgtcattccagaatggttttttggttttgtttagagacagggtcttgctctgttgaccaggccagagtgcagtgtggtgtgattgtagctcacagtcacctcaaactcctgggctcaagtgatcctcccatctcagtttcctgaatagctaggactacagacacacaccattgcacttggctagtggttttatttttagtatagacagtgtctcggtttgttgcctaggctggtctcaaactcctggcctgaagcagttatcctaccttggccttccaaagcactggaattataggcatgagcagccacacctggtctcattccagaataattaaaattatgtttaaggcagccgggtgcagtggctcatgcctgtaatctcagtactttgggaggccgaggcgggtggatcatgaggtcaggagttcaagaccagcctggccaatatggtgaaaccccgtctctactaaaaatacaaaataaaaatacaaaaattagccgggtatggtaattagcgggtgcctgtaatcccagctacttgggagtctgaggcagagaattgcttgaacccgggaggtggaggttgcagtgagccaagatcgcgccactgcactgcagcctgggtgacagagtgagactccatctcgaaaaaaaaaaaattgtgtttaaggcaatatcatttaaaattttattttgggagaatgttgccttggtaaattggtaaataacagttgttctgaaaggtttcggaagaatgcctttctgctaaattgaagaaattaacataatttactcttctgtaaatagggggatggtctgcattgtgctcatttaatcattggagttcaaattaatgatttgctggggtcctgtggtgaatcttgagtgattaagagggagaactcagtccttggttcagaaaagttagcattggaatggatcctcaacaggccctgaaggtaggaagtgttctgatttagagagctcttccaaggcttgtgatggaaccctgcaacggtaagttttacgagtatcagtaactggccgggtgcagtggctcacacctgtaatcccagcactttgggaggctgtggtgggtggatcacctaagatcaggagttggagaccagcctggccaacatggtgaaaccccgtctctactaaatatgcaaaaattagccagccatggtggcaggcgcctgtaatcccagctactagagaggctgaggcaggagaattgcttgaacccaggaggtggaggttgcagtgagccgagatcgtgcattgcactccagcctgggcaacaagagcaaaaaactgtctcaaaaaaaaaaaaaaaaaaaaaaaaaagccaggcttggtggctcacgcctataatcccagcactttgggagccaatgtgggcagatcataaggtcaggagatcgagaccatcttggctaacactgtgaaaccccatctctactaaaaataaaaaaaaaattagccaggtgtggtggcgggcacctgtagtcccagctccttgggaggctgaagcaggagaatggcgtgaacctgggaggcggagcttgcagtgagccgagatcgtgccactgcactccagcctgggcagcagagctgagattcctcaaaaaaaaaaaaaaagaaaaaaaaataatcaataacatagaatgtggatatacatagcacatagatacgtatagcaagtcaggaagtttgcctagaaggaataaattaactcttgttacttggtgagatcatggaagggaatgtaatttgttttaggtggtggtaattgtgagtttgaggctggcccaggaaatgagttgtcagatatgctgtcatcctcattaatggttcagcttatttctcaggtttatagttgtatgaggagatgctatgcctaccccatttagggaactattaggttcaaaatcataaaagctaaagaagagtgaaatacagtgaaaagtatcctgttcacacataccccatgatcatccagatttcccttcccaggggcagttgatattatctgtgtcttatatgtcttgagatagtttatgtgtatagaagtaaatgtaaatatctactacttatttcctcttttaacacaaattatagtaaataatatacaatagtctgcatcttacttttttcactctcgtatctaatgttaaaaaagctacgtggtattccaatgaaaggatgtattatatatattttttagatatttcatttgagttgttttttttttttgttttgagacggagtctctctctgtcacccaggctggagtgcaatggcgcgatcttgactcactgcaacctccacctccctggttcaagcaatttccctgcctcagtcccctcagtagctgggattacaggctcatgccaccacacctggctaatttttttttgtatttttagtagagacagggtttcaccatgttggctagactggtcccaaactcctgacctcagggaatcctcctgcctgggcctcccaaagtgctgggattacaggcgtgagccaccacgcctggccttgagttgtttctaagctgttgctaataaaacaatgctagaggatttaaaaaaatatgttagggttttatattgacaagtaaatattgtcataatagaaacttgctatacttataataataatacatctatagaacatgttcataaatgtctatttgagccttcctgtaaggtaagtacaacattttatcacttcataactagtaaagtggcagaagtagaggtagaaccaaggtcttctgactcctatttgagtatctgtctactttacccaaaatacatatactgttgtggggctgtagggaagtgggggtgggaaaataagaggaagtagacctaggtggggcaagcttgagatagggatgtatctgtcattctagaaattgggatcctgtttgctaggagtaagtggaactggacatcagcctgttacagggacataaaggcacttaggcactggcagagcactatggtttgattgccatcttggagtacagtagtatggtaagccaaagagtggtagttctggagaagctggggactgtcagagctccctagaatagactgagagtgaaacagcattcacgatttgctaaggaggctgggctactaggaaggataaggtaggagcccaggagttcagggctgcagtgaattatgattgtgccactgcattctagccttggcaacagagcaagaccctgtctcttaaaaatattggtcaagaccataaaacaagaacataggccatagtgaaaacataaaattttcttagcagctgtggtagcaaacatgttaatggtaaggagataactgtaatgttagtcaattttggcttaagactgaggactgagaaacagccttcttcctccggaggagcagttaagtcatcttacaactgggagtagagagacaaggacgtgtgaagctgattcatgctttcattatatagttaatactatttggaaacctgtgtgtaggtctggtcaatagacttccatcttaattgctgtatgctaagtgcctcctatgttctgtatacttcatataattcttgctagccttcaacagctttttacaaagtaactattgttttacctaatttctattgagaaaaatgagcttcacttaggtaacttgtccaaagttctttaccttgtaagtggtagagctgagatttataagtaggtctatatgactccagggctcttgttctttccacgataccaggtattaggcatcaaaattggacagtagaattctaatcacagctgtacataaccagaaagtatgagtatggatgagtgttagcatgtaaccagacaacttgtctgttatggatgatttgggctgaaagagtagaaggaatgctaaggaaaatgagcattggagatgttgagagctcgcaaactcatgatgaatgtgtatataatttaagtaatgcacttgctgtgcatatgtagagccttaagataaaatttccaatgctcccttccctcattaggtttttctttctaaagtccttctatattgagattatatagctgccactaaagactgtagctggtagtagccaggacctggaactttttggcaagagggtgttatctggaggatccaagtatactgagatcaacataatcatgaattcttctcccactgtaaagtttgaggaggtaagaatctccttgacttagcaaatttgggcttataaatgctaggtccaactagactttactggcctcaatcccttagcattatcctgcaaaatactgatgtatactttttggataatacctttgatctactttcagccaccattgtagggaattgttagtatgagaggttgacattttggttaaataatcacttggaaactgtgactcagcattagtcactggctttctgctgggttacattctcttgtctcttgccttaattgtggtaagcctcagccatttgattacacaactaccaaagaggatgaccttagtgataacccattcacattttcagatagtaaaaatattagggacaaaatctttcatatgtattagcgagtggtatgggttcgcctctggagaaatgttagcacattttccaggtttgcccgatgatattaaaagatgaatagctatcttagtgaaaatagctgtttacacttttagttagtagtttttaaaagtggaaatgtaacaatatgctttttggacacagtcatgttattttatttttatttttatttttattttttttgagacggagttttgctcttgtgcaggctggagtgccgtggcatgatctgggctcactgcaatttctgcctccctggttcaagcgattctcctacctcagcctcgctggtagctgggattacaggcacatgccaccaggcctggctaatttttgtattttttgtggagatggggttttgccatgttggccaggctggtctcgaactcctgacctctggtgatctgcccaccttggcctcccaaagtgctgggattacaggtgtgagccaccacgcctggctgtggatatagtcattttagtatttgagattaaatattaaacctcatttggcgaactttaaaaccatcagtgatttgagttaattctacctgttttaccttatttttcaccagtgtgtgtttcctcactgcctcattatattgccacatttaatctttcattaaaacaaacaaacaaacacaactcttggctgggtgtggtggctcacacctgtaatcccggtactttggaaggctgaggtgggaggattccttgagttctagaccagcctggtcaacatagggagattctctctctcctgaaaaaaaaaaaaaaaaaaaaaaattaaccaagcatggtggcacacatctgtagtcccagctactcaataggcaaagtgagaggattgcttgagcctgggaggttgaggctgcagtgaacatgatcaaaccactgcattccagcctggaggacagagcgagaccctgtcttacaaaacaaaacaacaactcttggaatttctcttttcccctcccttcttcttccccttcttccttctatttatccttctgtttcatctacaaatatttgagtgtcactgtgttctaggcactgtgccagacattgggattcgttggtaagcaagagagagaggcatggcctctgtccttatgagcttgcagtttatcctagtgttacttatctagtctgccctgccttcaaggttcagtggaagcccgatcttcatgtagtcctttgacttctttggcccttgcaaacctatccctttgacctatgctactttaaatctgattcatacaatttagcatttattgatataatttcttatactgtgggctaattgtttaaatatcttgttttactggctagagtatagttccttaaggacagagactgtcatgttattttttttttttttgcaatactgagcccaaaggttttgatttcagtctgccctgctgaatgttgaagttactagtagctcttgggacttagaagtagtgatgagataatgccttgctttttagtttattttctattttgttttattttatgtttcttttttgaaatggtattgggctggccgcagtggctcacgcttgtaatctcagcactttgggaggccgacgtgggtggatcacctggccaacatggtgaaaccccgtctctactaaaaagacaaaaagttagccaggtgtggtggcgggggcctgtaatcccagctactagggaggctgagacaggagaattgctcgaacccgggaggcggaggttgtggtgagctgagatcgcaccattgtactccagtgtgggcaacacgagtgaaacttcgtcacaaaaaaaaaaaaaaaaagaaaaagggccgggcgcagtggctcacacctgtaaccccagcactttggaaggcagaggcgggtggatcacctgaggtcaggagttcgagaccagcctggccaacatggcgaaaccctgtctctactaaaaatacaaaaattagctcgtgtgatggcgggcgcctgtcatcccaactactgaggaggctgaggcaggagaatctcttgaacccaggagatggaggttgcagtgagccgagatcgtgccattgcactccagcctgggcgacaagagtgaaactctgtctcaaaaaagaaaaaaaaaaaaaggtattgttcagtcatccaggctggagtaaagtggcacaatcatggctcactgcagccttgaattactgggctcaagtgatcttcttatcttagcttcctgagtagctgggattacaggcagtagcgaccatgcctggtagattatccctttaaaaaaattccttctagttgtttgcctaatatttgttatctgcttctgttaatctgtgctaaaaatgagtggaaatgaccttactgattcactatttgcatttatattgttttctagtgaaggggttgtatttgaggttaccattgcatagcttctcatctagttctccttgtgacattataatgagggatgcatttcatgactaaggaatagagctaagctaatgttgatctcttagtagcatgttgtaatcttttgggcttaaatgccctatcactatgccttagttcatgaagtgttaaaagtaactcacctaaaatgggaagcggagaatgtaataacttaaagatcaaaatcgaatttctcataaagatttttagaaatagaaaataatcttttaatgggccaacattatttacattttatgatgttagagatcaaaactcttcctgagtagtaaatgaatgtggcgacttaaatgtgaaggagggaggctgtgtgattgacttaaatgtttttctgaatgtgctaaaagctctgaggtaatggcaaacttcaatattggaaatagaagggatatattctttattaagaaggagaatagagggtactgggggaaggaaatgctcttttgcctacacttaaaaattaagaaggtaagtatatgaaattgaaggggtaaaagaccacagagcaggagacaaggaaaccgttatttccctctgaaataattctagatggtgatttgaacaaaccagttgctaaaaaacttatatgataattggggcagtttgaacattgactgggtatctgatgttaaggaattattctcttcagatggggcagtagtatggtggtcatattgcagacaaaaagtacttaccttttagaaatatatactgaaatacatatggatgacggaatgtgtctgagatttgctgggggaaaggaagaagtggtcagcagtatagataaaatggccatgtatttatttataactgtctaagctggctgatgggtacaagaggcacattgtattatttctttctacttatatatatgtttgaaaatttccataaaataacaacaacaaacccccccccccccaaaaaaaaatcttaacaactaccagaactggcagaattgtcaagcctacccctttatcttctttctctctaattttagatgggcaagtaaagccatagattcatgctgatgtttccaaatgggaatgcagtttagatttccatccccttaagtttcaatctatctgtagtgcagcatcactgagagaacaagccctgctattttcccagcagtgtggtaagttacaacagggtaggagtcatactacccatctttaaggctcttcctccttataggtgaagaaataagatttaaaaagcaaaacataattagagaataggaaaatgtggtttaaaattatatgtcatattttatagttctggccaaacataagaaattctagagaaaggaaagaacattttgggttaggaataaccaaaggcttttcttttgaaacagggtctcactctgtcacccagtttggagtgcagtggtgcatttatggctcactgtggcctcaaccgcttgggctcgctgcagcctcagcctcctgggctcagctgcctgagtagctgggactacaggcatgcgccacctgtccagctaatttttgtattactttagagatagggtctcgctatattgcccaggctggtttcaaactcctgggctcaagtgaccctcctactttggcctcgcaaagtgctaggtttacaggcatgagccatcatgccagaccacaaagacattttttattaggccagtggatgttcggatcatctttaaacaacattgaaagttgaattgctgacagtaatatggggatagcattccagggagagaaaatactatgtttggtggagaatagatgaatttggattggggaacagaagatatttttgatgggtaggatggggtcatttcataaaggacatgaatttttagttgagacatttgggcttgatcttatagaccttaaggagccatttttggggtgtggggaaccatttttgacccttaagctacctaagtatttattaatttggtttgatgataatattgtgtattcttagttgcaggcttttgcatagagagtataacttgactttgtagcctttacattctttttaacataaatttgttatttccacagtgttccaaaagttattcagggaccagaattaatatttattttttacaaattatttatttatttatttttgagacagggtcttgttctgttgcccaggctggagtgcagtggcgcgatctcggctcactgcagcctccgcctcccgggttgaagcgattctgcctcaacctccccagtagcttggactacaggtgcctgtcaccatgcccagctaatttttgtatttttagtagagatggggtttcaccatgttggcctggctggtttcgaactcctgacctcaagtgatcctcccgccttggcctctcaaagtgctgggattacaggcatgagccaccgtgcctggccacattttgatatttttaatcaactttattgaggcataatttacattcaataagattgaaccattttaagtttacaatttgaattttgacaaatatacacacccatttaataaccatacaatcaagatacagaacaattcagtctcgcagaaagttacagtagcactgtttgcattcattctcatcctcctccacttccagaaaaccactgatttgctgtcaccataggttagttttgctttttctggaatttcatataaatggcctcatctaggatgtactcttctttcatcagcattctttaagattcatttattgttgtttgtatcagagtttgttgttttttattgctgagtggtaatctgagtagtgttacattgtatggatgtaacaagatttgtttattcattcacctattgatgaacatttggattgtgtctggttttcttgcttttatgaataaggctgttatgaacttcatgtacagctttgcgtagatgtatgttttcatttctcttaggtaaataccttacagtggaatggctgggtcatatggttggtaggtttatgtttaacttttaaagaaactgccaaattgtcttccaaagttgccgtaccattttatattctctttagcaatatatgagataggagagttctagttgctttaaatccttaccattgctaaaatgatatatcttaaattttagttgttccaatagttgtgtcatggtatcttgtggttttaatttacatttccctaatgactaatgatattgagtatctttttatgtacttattttcatgctgtgtatcttctttggtgaagcatttgttcagatcttttgctcattaaaagaaatgggctgaccgggcacagtggctcatgcatgcctgtaatcccagcactttgggaggccaaagtgggaggaccacttgaagccaggagttcgagaccaccctgggcaacaagcgacactctgtctctacaaaaaacttaagaattagctgggtgcttggcatgtgcctttagtcccagctattcaggagtttaaggtggggggatcacttgagcctagctgtttaaggctgcagtgagctgtgatggtgccattgcactccaacttgagtgacagagcaagaccctgtctttccaaaaaaaaaaaaaaaaggattgtttctttatagttgaatattgagaattctttatatatcctggatacaagtcctgtgttatataaatgctttacgctttgcaaagattttttttttttccgattccatggcttattttttcattctttcagcagtgtcttttgaagagcaagagtttttagaggccaggtgcggtggctcacgcctgtaatcccagtactttgggaggccgagttgggtggatcacttaaggtcaggagtttgagaccagcctgaccaacatggtgaaacctcatctctatgaaaatacaaaaattagccagacatggtggcgtgtgcctgtaatcccagctactcaggaggctgaggcaggagaatcacttgaatccggaggcggaggttgcagtgagctgaggtcacaccactgcactccagcctgggtgacagagcaaaactccatctcaaaaaaaaaaaaaagaagaaaagaaaagaaaaataaagtattctagtgaagaccggattccttggcataagacaccaggaattttagattgataggagtaaaaataaataaagaaatattggctcagggaataaacttcattaaaatcaatttatgggccaggtttggcggctcacacctgtaattgtgcagcactttgggagactgaggtgggcagatcacttggggccaggagttcgagaccagcctggccaacagagtgaagccctgtctctactgaaaatacaaaaattagccaggtgtggtggtgcatgcctgtaataccagctactagggtggctgaggcagatgaattgcttgaatcctggaggtagtggttgcagtgagctgagatcgtgccactacactccaacagtgtgagactctgtgtcaaaaaaaaaaaaaaatcaatttatgaaagttatttttaaatttgaagatattgaagatactaaatttgtgtttaaaaagcatttattttgatcaactccgctgtatagaatattttgtcttaagtcactgtaaagtttccatgccctcaaatgaaatacagtgccaggtttaacattcgttttcatggattgttttcaaaagttattgagttgtctgatttgctgtaaaaaaaatgaaaaattcatttcttttattaacatgatgtatttactgtgattattctaatagactaatggacttttaattttactgtttaaaatagtttataattaaaatttaatatccagtcttcacttgttctttcattttttaaaataataaagtagtttggggtttatcagaacaagggaagaaaccaagctacgtctcattttatgttgggtaagaatcactagagacgaaattattattattattattgttattattattattattattatttttgagatggagtctccctgtgtcacccaggctggagtgcagtggtgcaatctcagctcgctgcaacctctgcctgctgggttcaagcagttcttctgcctcagcctcccgagtagctgggactacaggcgtgtgccaccttgcccagctaattttttgtatttttagtggagatggggtttcaccatgctgaccgggctggttttgaactcctgacctcgtgatctgcccacctcggcttcccaaagtgctgggattacaggcgtgagccaccgcctggccgacaaagttactttctatgggatcaattcctgagttttatctaacacgagaattttagcaattaaaagtcaagtgcagttcagatatattagtttaggtaatatttttagtgtttgaagagagctcaatttgtaagccatttagctactaattaccctgcctttgctgtagaaagaacttaaatgaaagacctgttttaagatgcctttttaaaaagcagccgttgtaggtataagagttgaaaaatcaagatctaggcagcagtggagaattatgaagtctgataagataatatgctaaaattgtattgttaattctgatttgtgacagtgcttatcagtagaaaagaaatgtgatctgtggttaaagactgaactgccactaaatgtaaaatgttttttagatgagttggaagaatgctgaaccagtctttattgcccaagatggctttgagtcagcaatctcaaagaataaagaaaaaggagttaagagtgagaggcaataagtaatatgctgttttcatttaagatgtcttgaagagataattaaaaagttgtaggggtataggaattgtgatgtttctctggtgttaatgaagtctactataaattagataatacaggcactctaaattattgtttttccttttttaaattcttggcagttactgacaaattatactcaggatcaagtttaagtctcagtacatgaatgaccctgacattgaaaaccctgaaggatgttgaccttagttttgacctggctttatcctgagcagcctctgtgaattcttaatgctgtgctctttaacaggggtactttttccagatgtttttgatactgtattcattaacatataataaagttatcagtgtccctgaaggctaattttttttttctgactgaatatgagatatggagcgtgcaatttgtacttattggtattaacattaccaacaaggtttgtctttttcttataagatggggaatcttaagaaacttcaggccaggcgtggtggctcatgcctgtaatcctagctttgggaagctgaagtggggcgaatcacttgagatcaggagttcgagaacagcctggccaaggtgaaaccccgtctctactaaaaatacaaaaaattagccaggcgtagtggtggatgcctgtaattccagctacttgggaggctgaggcccgggagacagaggttgcagtgagccgagatcatgccattacactccagcctgggcaacagggtgagattccatctaaaaaaaaaaaaaaaaaagaaacttcattaagaagttaaagcctgggtatgctctccttgataatttctttttactcacatctttattggtaaatcaggccagaaggattatttaccttttcagaaagggaaactaggttctacggtttggttacagatagcctggcagctgactttacattgggcagaggagactgccgtacttagtggttctgagaaaccaagagagtattgcctgctacagctatgagaaaaggtattgaatcttccccctcctttgtgggggaattccaatctcactaatttatggtttcagtgtagttatggtcatagcttctgagacgtgggtactcattgaagctaacagttttagagaaaggggagggtgtttaattccaataactggtagtttatatcactttaataatttagacccaatgatatgaagattagttagtataaggcagatatacatgtaatacattcttttaaatattgtacaaggagtaagaaacccctttaagtagtcatgtaattcattatagcagctgaacatttctaagtgcaacattataggaaaccagtaaagctgatttctgatttatctgcagcaaaagaatttaatattccaacttcagcaaaaggcaattaaaaacaaacttaaatcacattgtgtgcttttaatacgtatgtttttttccatgctgtctgatgtattttagttcttagtcatttacttccattagtttccaaattggttgagggaattaaattggtagccaagttacctatacaagattttcctactgtgtatgtgaaccactctttctgggaaaatcctcccgttggcacttttcttgaaggcatgcactttttccacacttagtgatttggggactgaagcctgcatttagcctgtatttagtcagaggtgacaaatggctaaattttttttttccagtttagagattgagaaatgattcagaattgaaactaaagtgaatttggacttactgtatttctttgcaattacttttaaacaattgctgtctgttactattaggcatattttggacctatgggttccattttgggccgatatttggtgttatgttgttaaatttcttgcctggcttagatggttcattgttgaaactaaactggaactaggtttgatcagagggccaatggaaatgcacgttgtggcccatttggggaggacaaaatttgacatatttttactttaagaattcttaggaaaatttggataacgtgagaatatatttccaaagggttaagtaattttcgagggaaaatcagaaagcttgtaattcctactgaaaatattagcctgctgaaatattagcctatttcctactgaaaatataacattagcaggccgggcacagtggagttcacgcctggctaatttttgtatttttagtagagatggggtttcaccatgttggccaggctggtcttgaactcctgacctcaaatgatctgcctacctacgcctcccaaagtgctgggattacaggcgtgaaccactgtgcctggcttgacttttttatttaaaaaaaaaaaatctatacccaattgccctatcagtttatcatttactcacttatttgaaacggtcatattaacatacactctttatttatttatgtgcctatactttgttttaattactgtatctttagaatatgtttcaaaatttcattaactattataattgattctctttttttgtaacgtatcatcagcaaataataatttggactcttctaatatttctgcttatttattgacattttcaaagaatagcttatgattgataataatcataccagcgaatacagtgcttttcaacttaaatatgcacagcaattacctgaggatcttattaaaatgaagactcagtagggctggagtggcctgagagtctgcattttgacaagctcccaggtaatgttgacttatgggttcatagaccttatgttgagttacagggaactaagatttattgagtacttaatttgttctggtcagtgcttttacatctgtgaactcgtttaatctttaaaactccatgatgattattatccccaatttgccagtgaagaaactgacacttagagaagtttataacttacccaaagtgacgcaaccattaagtggaagagccagactgagcccaagcagagtttgcactctgaacctctcgaatatattgctttaccacatgcgtgttcgctcacacacacacacaacagacattatcttctcttgtgtgactcaaatggtaataccttaaaattttttttttaatgaataggctttattttatctattttttgagatggggtcttgctctgttgcccaggagtgcagtggtatgatcgcagcttaccacagccctgaacttctgggctcaagccatcttcctgcctcagcctcctgagtagctgggactaccggtgtgtgccaccatgcccaactaatttttaatttttgatagagacgaggtcttactgtgttagccctgcctggtctcaaactcctggcctcaagcgatcccttcacctcagcctccaaaagttctgatattacaggtgtgagccacagcatctggccaggctttatgttgagaagtttagagtttacagaaaagttgagcagaaagtacggagaaatcccacatatcccattatctctgcctgtcctcacgattttccctgatattaacatcttgcattagtgtggtacatttgctacaattgatgagcaatattggtacattaactaaaattcatagtttacattagaatccatagtttgtgttgcacatttgtaagagttttcacaaatttgtaatgttgcatatccattattacagtatcatacagaataatttcactaccctaagaattccctgtgctgtacctattcatcccttcctctcctcagtccctggcaatcactgatttttttttttttttttgagatggagttttgctcttgtcatccaggctggagtgcaatggcatgctctcggctcactgcaaactctgcctctcgggttcaagcgattctcctccctcagcctcccgagtagctgggattacaggcatgcgccaccacgcctggctaatttttatatttttagtagagatggggtttcaccatgttggccaggttggtctcgaactcctgatctcaggtgatccgcctgcctcggcctctcaaagtgctgggattacaggcatgagccacctcgcctggccaatcactgatctttttactgtctccatagttttgatgttaccagaatggcattattgcatgtagccttttcagattgactttttttcacttagtaaagtgcatttaggtttcctccaagttttttcatggtttgatagctcattgtttttagcactaatattccattgtctggatttccactgtttatttacccattcacctattaaggaacttgttggttgctttcaacttttttcaactatgaataaagctgctataaacatctgtctgcaggttttgtgtggatatatgttttcagctcatttggctaaataccaaagacagaactgcgtgatcatatagtaagagaatgtttagttttctagaaactgccaaactgtcttacaaagtggctgtactattttgctttcccaccagcagtaaatgagagttcctgttgttctatatccttaccagcatttgatgttgtcactgctttgaattttagccattctaataggtatgtggtgtctcgttgttgttttaatttgcagtagcctagtaacatatgatgtttagcatcttttcatacactatttgccatctgtatatatcggtgaggtatctgatcatatcttttgcccattttaaaattgggatgtttgttttcttattgttgagttttaagagttctttgtatattttggataccagtgcttcaccagataggtattttgcaaagattttcttctagcctgtggcttgtttatgcctttagttttttaccattaaatatgttgcttgctgtctggttgtgacaaataatcatcaagttaagaaagcttctttctttgtctctctaagagcttttgtcaggaatggctattcagggaagtccttgaaaattatttggctaaacaaatagattaagctttgtttttagcaagacatcctgttttattccatataattaaaaacacattctttatagtgtgatattaagactgtaactgagactttaattcctattccttctaaatcattttctcttactctgtgattttgtatgcctttaatgtccatgttgattacttgtccagcatcttaatctcatctgacttggtctttcttctcccagctatctgttcttccacttctctgtagcaatttatttctgtggccaaacgtccacttctggaattacaaatctgtaaatttttctctttgaacacaatttcctgtcttttcagttcttccatttgctgagtttattttctcatttcactgaggccgccagccccttaaatctccattgtctcccaatttgtgacattcttcctggcatcactttatcccatatggatgccataattggtcactttcaatgagtcatcagtatccgcagttctcctgcatctttgttcttctttcccacatgccatgcagatctccagctgtggattaacagtactgccctttttctgtgttcccgctctagggcctgaagaaatgatttcatcatattaatttgttcttttgctaatccatgggttttagcctcatctgtgcttattattctctttagtagttttctcacttgtttggagttgatttcatttctccttcaccagaatgacagttctttctaaatctttccacattttcctttggttcgtgtcaccttcctccattgcagctgattctacacttcagcagagtgacctttaaaaagagagaaaacaacaaatctattatgttatttcctgtacaatactgttcattataaagatggaggtaatttttttttttttttttgagatggagtctcgctctgttgcccgggctggagtgcagtggtgtgatctcggctcactgcagcttccgcctcctgggttcaagcgattctcctgcctcagcctcctgagtagctgggattacaggtgcatgccaccatgcctcgctactttctgtatttttagcagagatggggtttcaccatgttggtcaggctggtcttgaactcctgacctcatgatctgcctgcctcagcctgccaaagtgctgggattacaggtgtgagccactgcacctggccagaggtaaaattcttaagtttaacaggatctttctggttttctagcctcatctctgtcctcttagcgccttagcttcactggccctttttcagatccttcacatgccaagctcattcttagcacagggctttgtatatgctcttttctctgctggacaccttttttcttggcatgtttaatttgtatttatcttaaggacttagcttatgtgttcctttctcaagaaagttttccctgaccttccatttgcctaaaggtagattagattccctctgaaattattaatagtaatgatggtaacaacaataatagcagcaacctttgagtgtttatgagttgcagagactgttcttagcacttacacataggaagttttttggttttcatagcaaccctatgagttgtataggtgggtaaataagtaggacctagaattatctgcatcttatagatgaggaaactgaagtgaggaatgttaagtcacttgtccaaagtcacacagccatttggtagcagagttggaatttgaacccgggcagaccccagtgcccacgttctaaactgctgtgctctactgtaatggtgagtataactgtgtaatgttttttgttaatgcctacctttgttggtaggctctaagctcctcgaggtcagaaatcatacctgtctggttaatttccatggcctaggacggagcctggcatggagtagtctgtgaccgagtacttgttcctattgaatgaatcacagcttgccagtctactaaattgaggaaatagagggtttcagtgtgatccttttcacttttcctccccactgcttccaaatattaaactcccttggttaaaagaataggtgcctgtacttatttcaaaatctaacccctctacctgtttgccttgtatattctaggagtaatttatgtacttcgtaagaaaaattagtgcagatgtacataaagtaaaggtatacgtcttccattttttcctcctttaacgttttatacttccaggtgtcaactgctagtagttaaatcttcttctgtacatgtacacattttgtggacacttaaaatacacaagggtaatgtatgtagtattatctaagttttttaaaaatttaattttgatattgaacgatagtttcacaagatgtctccattgagggaaacaaggtaaagggtacaggagatctctgttgtttcttacaactgcctgtgactctacaattatctctaaagaaatggttaattaaaaaataaactatagaaatattttcatgtcagcgtattgacctgtttcttttaaatggctatgtaaaatgttattatatagatgtgtattactttatttcacgtttcccctattgatggacttttaagttccttccatttttcattttcaccaatattgccaaaggtggaccatccttgaatttgtaggtatatccttggttggtatatatgcacagccaagttttagaagaggagatcaaaagatgggcatatttgaaatgttggtaagagttggccagaccatcctccagacaagtttatactttcgttagcaggtgagatagaagctctgtgtgttcacctgcactgtcctgatcccattctgccacttcttcttggggactttatatctatatctatatctatatctatatctatatctatatctatatctatatctatatctatctatatatttttattatactttaagttctagggcacatgtgcacaatgtgcaggtttgttacatatgtatacatgtgccatgttggtgtgctgcactcattaactcatcatttacataaggtatatctcctaatgctatccctccccactccctccacctcacaacaggccccagtgtgtgatgttccccttcctgtgtccgagtgttctcattgttcagttcccacctatgagtgagaacatgcggtgtttgattttttgtccctgcgatagtttgctgagaatgatggtttccagtttcatccatgtccctacaaaggacatgaactcatccttttttatggctaaatagtattccatggtgtatatgtgccacattttcttaatccagggactttgttttattaactaatccttttccatttaatatatctacttccctgttggttctcttctgtctcctcatcctgtagcacatcctccaaactgatagagctttggttgctgtcagttcttttgtgctgctataggagaatacctgacactgggtaatttataaataacagaattttattttctcatagttctggaggctgggagggcactggcaggttcattgatggggatttggtctctgcttcttagacgatgccttgaatgctgtgtcctcacatggcagaaggcagaagggcaaaaagggagtaactccctccatcaagcccatttttaagggcacctaattgcattcatgaacggaggaaccctcatgacttaatgatgtcttaaaggcccgacttcttaataccatcacgttggcaacatctgacttttagaggcggagacattcaaactgtggccctagccaagtcctttgtgtgcttttacttatctttacaaccatcctatgagatagtgcctgtttctctgcctacttgttaagcgattatattcttctggattttgtccttggctcctctatccaacccacctgtagccccaccttctcttctgttccctcatccaaaccagagagaccaggatttgaatctggctccattattttctccctaagagacacggaatgatttactttgtctctatgtttctgtttctttctctgtaagtaagagtggggagactagagctacctatctcaggattgtgtggagtaaatgaataatgtgtgtaaaacatttaaaatagtgtctcatgtacactaagtgcttaataaatgctaataataggaatagtaacaacagtatagttacattgttattataaatctgtatctgtggtactcttagcttaagttcgtacaaaaatattgagctgcctgttagaaatctacatttggatgcctccccagatatcttaaactcagtttatctaaagtcagagtctttctgtggcttcagtgcttagtgactgtgtccgtgaataaactacttattttctttaagcctccatttctccatttatgaaagggtgataatgaacttattttatcaatattaaatgagataattcttgtaaaagtatttagcatagtgctggtatatactaatatcttaataaatattagttgctattattattattccttttaaatgctgatcccctttttgtcctgttctgcccagaaaaagagcctcaggatagctttgcctgtctgcctgtcttccttatccttcatatgcaaccagtcagcaagtactgttattttgtattttcattttaaacatcttaatttttatttattttaaaattatttatagagatggggtctcactatgttgtctaagctggtcttgaattcttgggctccagtgatcctcccacctctgccaaagtgctgggattacaggtgtgaaccaccacacctggcctatcaagtactgttgattgtgcttccgaaacatgtgcttgcatccaaccactccttatcatttcttgacacaattattgtggtaatctcctaattgctctcctggcctcttggccatcttgtacctttcatcctgagttatctttatagtaggtagatctgctcatatcactcagcagaaaggcctctgatgggtctctcttacctgaaatataaagcctccaaggcccactacaccacagtcatctttagagcctcccctcttgttctgggacccatgggtcctacagtatatgcagactactgactgttctgtgactgcaccctgtactctaaatctcatacctttgtccctgacctgctgttgctgtacctgccttctttttgcttagagggttgtcccctcaagcactccctgctaataagcactcagccttccaccccaaacatctagtctgtctggtgaattcctggtgattcttcagtggtctgtctcaaatatatcttctacgctcttttctctttagtcttaactgccatccaaggcaacattagttagtccctcattataagaggcaatataagctggtgagaggtatatacccacagtcctagctacttgggagtctgaagcaggaggattgcttgaggccagcctgggcagcatagcaagaccttgtctctttgaaaaaaatagaaagaaaatgctgggtgtggtggctcacatctgtaatcccagcactttggaaggccaagtagggaggattgcttgagctcaggagttcgagaccagcctgggcaatacagcaagaccccatctctacaaaaactaaaaaaattagctgggcatggtggcacatgcctgtggtttcagctactctggatgctgagggagaaggatcacttgagcccaggagtttgaggctgcagtgagccatgattgtgctccagcctgggtgacagagtaagaccttgtctcagtggagggggtagggtgggaggggggaaagaggcaatatagtggtaagttaaaatccctgagtttggagccagactgcctttgttattaaggtagttgtatataactgggatgaaactgtttaacttttttgtgtctcagttttctcatttataacaaatgagtaatattagtcttgctgtgagggttaagtgaattaatgtagggaaaatgcattgaaagggcttgcatattactaagtacttcataaatatagctattattattattctcaaagcatttcttacatacttacctataatagcatttgccactttactttttttttttttttccaagacagagtcttgctctgttgcccaggctggagtgtagtggcatgatctaggctcactgtgacctccgcctcctgggttcaagcaattctcctgcttcagcctcctgagtagctgggattataggtgtatgccactatgcccagctaatttttgtatttttagtagagacagggttttaccgtgttggccaggctggtcttgaactcctgaccttgtgatccacccacctcggcctcccaaagtgctggggttacaggcatgagccaccgcgcccggcctgcagttacttttttgtgtatatttcccaatagactgtggcttttttgaaggtgggctattttaatcatctttgtgtcatcagtatgtagtacacagtgggacccagtaaacaatcagatgtgctgtttgtgtagcccagaataaagtgccaggtcctcctgcattgcagcagtcagcagcatgcatctggaaagtattgctttctgaaactacggcattagagccacaaagctgtttgggattggaccttagcaagctcttcaaccagaaatttgctattacaatgaagcttcctatctgcaataggtagattgtaactgacagcatgtagtcattggaaggaggttaatcccagagcataagaggacttctgatttatttttgcttaaagggatacaatccaaggccacaaaggctgctataagacttttgttttgttggggataataaagagagctgtttctgccttttccactttcttcttataaacctgctgaagattgaaatgttaaaatgtgattcagagaagagatttctttattgtaaacatgatagagagctcagaatgaatgccggagatagactctttatagaggatttcagggtattaaactcttaagccccttatggtcaggttttactgccaacccttaacaccccaccatgcctgggctactgcaatagtaactggtctttctacctttaggttcgctgcagtctctcctgcctactgctatgatattaatatttataaagccttactttgacttttctcatgcattataaaaaatcctcgcaaaataccccatcatatacaaggaaagttccaagttttagcttgtcattctggacttgtattaggattctccagagagagagagagagatttctttcctttctttttttctctttttttttcccagggtttcactcttgttgcccagtcgagtccagtggcactatcttgcaaactgcaacttccgccttccggtttcaagcaattctcctgcctcagcctcctgagtagctgggattacaggcgcctgccaccacgaccggctaatttttgcatttttattagagacgggatttcaccatgttggccaggctgatctcaaactcctgacctcgtgatccacctgcctcagccttccaaagtgctgggattacaggcatgagccaccacgcccggcctggatagatggatttctgtaataaacctctataggccaggcgttgtagctcatgcctgtaatcccagcgttttgggaggctgaggcgggcagatcacctgaggtcaggagtttgagaccaggtcggccaacatgttgaaaccccatctctattaaaaatacaaaaattagccgggcatggtggtgtgcacttgtaaatcccagctatttggaaggctgaggcagacaatcacttgaacccaggaggtggaggttgcagtgagctgagattgcgccattgcactccagcctgggtgactgagggagactcggtctcaaaaaacaaaaaacaaggaaaaaaaccccaaaaccttcataataagtttccatatctatatctatagatatagaagaggtttattttatatatataatagatacatagataggtataagaggaggtttattatggaagttggctcatgtgattcatgtgatcatggaggccgagaaatcctatgataggccatgtgcaacctggagaaccaggaaagctggtggtgtaattaagttggagtctgaggtcctgagaaccaggggaatcaaggctgaaggcctgggaattgggaaggggtggtgtgctggtgtaagtcctggagtccaaagacccaagaaccaggagctttgatgtccaagagtgggagaagatggatatcccagctcaagaagaaagagtgaatttgctcttcctctgccgtttgctctctctgggtggaaaagggtaaacagattatgacgcccaccctcattggtgagtgtgggtcttctttatttagtttactgattcaaatgctaatctcttgcagaaataccctcagagacccacctagaaatgttttatcagctgtctgggccattccttagcttagtcaacttggcacataaaattaaccatcacaggactcttctgcagtctgactctggttaccttttctaccttatcttccactatatcctagaatgagctgtgtagcttacctggcctagttgtgagtcctataatgtgaattgcattttatgtttgtatctacccagaacattttaccttttgaaattttgcctctcctttaagatccattaaaaaaaaactatttatttatttatctgtttatttatttatttaatttattttttttgagatgaagtctcactcttgttgcccaggctggagtgcagtggtgtgatctcggctcactgcaacctctgcctcccaggttcaagcgattctcctgcctcaagcctcctgagtagctgggattacaggcgtgtgccaccacgcctggctaatttttgtatttttagtggaaatggggtttcaccctgttggccaggctggtctcgaactcctgacctcaagtgatctgcccgcctctgcctcccaaagtactgggattacaggcatgagccaccacacccagcttattttgaaataattatagaatcataggaaattacaaaattagtacatcgagtcctgtatacccttcccccaactttcaccaatggtgatatctttttgtgtgtgtgtgtgtgtgtgatggagtcttgatcttgtcgcccaggctgttgtgcaatggcgcgatctcagctcactgcaacttccgtctcccaggttcaagcgattctcctgcctcagcctcttaagtagctgggattataggtgcctgctaccatgcccggcttatttttgtacttttgaagagacaaggttttgccatgttggccaggctggtctcaaaccctgacctcaggtgatccgcctgccttggcctcccagagcattgggattacaggcgtgagccactgtgcccggctgctatcttatataattatactataatataagatcctattttttttttaagagacaggttttcgctcagacgcccaggctggagtgcagtgctgtgatgctagctcactataaacttgaactctgggctcaagtgatcctcaggaggaggatcctagctcctgggtagctaggactacagtcacgtgccactatgcctggctaattttaaaatttgtatagagatgatatctcggtttgttgcccaggctggtctcaaactcctggcttcaagtgattcctccacttcagcttccaaaaatgttgggactaggtgtgagccattgcacctagactgatccattttaaaactctattttgaataaaattttcaggggtaaaaaaggtttttttcttttccttttcttccttgcttctttctttctttttttttgagatggagccttgctgtgtcacctaggctggtatgcagtggcgcgatctcggcttactgcaatctctgccttccaggttcaagccattctcatgcctcagcctcccaagtagctgggattataggcatgcaccatgatgcttgggtaatttttgtatttttagtagagatggtgtttcactgtgttggccaggctggtctcgaactcctgaccttaagtgatctcccggccttggcctcctaaagtgctgggattacagtcatgagccactgcgtccagatggaaagtatctttttaaactttatatccctccctagaatttatcccctaatatatggtgtttatggaggtggttggaatcaactactttttataaatatattattaaagagttgacaacccctaaaaatcttttagatgctagacaaaaaaactgagagaaatcatgaagtatttttttaaaaaattttttgagatggagtctcactccagtgacaacccaggttggagtgcagtggcacgatctcagctcactgcaacctctgcctcccaggttcaagcaattctcctgcctcagcctcctgagtagccgggattacaagcgtgcgccaccacgcccagctaatttttgtatttttagcagagacggggtttcaccatgttggtcagggtggtctcgaactcctgacctcatgatccacatgcctcagcttccctaagtgctgggattacaggtgtgagccaccatgcctggctagtcatgaagtattttaaaggacgtgggttctgacactcttaaattcaataggccaaagttcctggcatttttttcttggatatgtaccgcatagacctttcttagtagatactgggagaaagaagttggtttaataatgaattaatgggaaagttttttttttgagacggagtttcgctcttattgcccaggctggagtgcaatggcccgatctctgcttactgcaacctccgcctctagggttcaggtgattctcctgcctcggcctcccgagtagctgggattacaggcatgcaccgccaagcccggctaattttgtatttttagcagagatggggtttctccatgttggtcaggctggtctcgaactcccaaccgcaggtgatcggcccacctcggcttcccaaagtgctgggattacaggcgtgagccaccgcgtccagcctggaaagttttaattgaccttatgtctgtataattaaatgtatttcattaactttttaaaggtaaataaatctggggtttcatctaagtgtcaaaaatatgattttcaccaatggcctacttatttttgccattatttgcataaatagctttctggtttttctcaagttaacctgtatgcttgtgatgtgaaagtcatagtatgtataaaaaatagtaccaagatgaagtatagatggtcattctgaaccattattccttagcagagtgaactatatttaaggttttagaaataaatcgtatttccatgtctgaataagaccttagtcttatttaaataaatgtaggggagatggagagaaagaataagatttgcctaagaatactaatattaagatgaatggcaggtaggacacactgaggctgtcaggcattgttctcagtgttttacattcaccatcttgcttcatcctcacaacagactttatcatttgattagaaaaaaatcagtacgatctagatgttctcattgaataacattttttcataaacaatttaatttcatttaatttatattgttactattttttatataagtaaatatgaggtctcactatgttgcccaggctggtctcaaactcctgggctcaagcagtcctctcacctcggcctccgaagtgctgggattacaggcatgagccaccacatctggccctgaactattttaatgcaacaagtatttactgagttccgataaatgaaccaagtctggtgctttagaaccatgatctcaaactggaggacatgtctaagaatatctaggcttggactgttttaagagaataaatttccagattctctatattttatttatactctttcctgaaattgacttgtttgaaggcaacactgatataatgctagtccaccttccctaccctccctttagccctgtgccttcttatgattaacagaagacagccatacctttcacccatcttgaatctcaccattgtacctttctatgaggtataaaatcctccaggattctaacaaagggatagtcaaaacactagtgtcacgtgtgaaacttccttttatcaaggtatcttcctccatacatcttattaagagatgcatctccaaaaaaggaaattactttttatgtttagttctcaaaatttgtaacatttgcattgtcttcatcgattgtgttttactataatagtaaccataccacaatccaacataaataaacaataatatacatgttttcattaaggaaagtatgataaaagttatattaaatactgtggaagaagcagaatagaaatacagtttcagggagaccgataaatggcatagcattttatataggaaaaaaagattctgttacagttttaaaatataggatgggggatatcagattgcccaggtgtttagattttattggaattagtgatacagtagggttttttgtttgtttgtttgtttttaagacagggtcttgctctgttgcccaggctggagtgcagtggtgcgattttggctcactgcagcctctgcctcccaggctaaagcaatcctcccacctcagcctcctgagcagctgggactacaggcgagtaccaccgtgtgtgactaatttttgtatttttttgtagagacggggttttgccatgtggctcaggctggtcttgaactccttggcccaagtgatccacctccttccacctcccaaagtgctgggattatgggcgtgagccactttgcctcaccaatatagtaggtttaatagctttaaaattagcaatataatagtgtttttaggtgtcagttctaaatagacatagattgatatataaatgaaaatataacctttgcagtgattaaaacttgtaatgaaaattttagatgtcaacctaagaatattcaaggagacacctttttccccccattaaatttgttttagcaggtatgtgagcaaaacttttgaatagtgccgcaaaggatatagagatcaagaagaaataatttttgccctcaagatgcttgttagttaaatggtgaagcaggggcatagatacatggtttggcttaaataaagccttaattgtgtcatggtattttgctgtttgcttaacatgggcattgtgcctcagtgttgtgtcatgcttgttaaaatgacccttgagtggtagtttagctcatatgtgctgtgttaccacataggctattgtgcagaacagtgaggaattgtatattgtgaaagacagatggataggaacagtgcccactgcacttaccaccaatgaatggtagggctttctctcattgtctagttgatgtgatcataaaaaacattagactggaagtcaggacaccctaattctcatcctgagtctgccacagaacgtatgaccttggctaaatcatttaacgcatttgaactctagtttcctcatataaaaaaagtttaaactggatgattttctacctgtgaagtttagagttcatacatttttacacagtatatgcgttttagaagggataggtgcagcagattttaagaaacagatgccaaaataatggagtagattacttactgtaatatgcggagaagagtagcttactaattatttatctaagtgtgattaggacagtctgttatatggcttgtcgtaagtgttgtgggtctcaccactgccctttttatttaaaaagagaatttcctctacttttgagaattagaacaaatactacacaggattagtaagcgagaataccaatttcagcttcatgccagtgcctctagtgaaaaccacatttttgcagtgttctagcagaatattaaaatggcttatggattacagacagctcaggctttggtctttataggtcagaggtggaaaccaacggagcaattaccgttcactcttatgggcggggcttcttaggttccttatggagctaaagtgaaactctggaacagttccactagaatggctttcctgggagcttatgaggcttacattctgaaactgatactcttgtagtacaagaataactacaaactgatgtggaattaggaggccagagaggggagaagccacatgtagctctcattctcacaagtcctttggctggcgaacagaggtttttcccgtcactaagcagatatttggttatatattgacaaatcctctctaaacaattcttagaatagaagactgattctgtcttgtgctttggaggtgaaggggaagagcaatgttgaaatgagtgaaattagcttgtgatggtttaacatctgcaaatatcatctatctaaccagtctttatctcctatgtgtgttcttaaatatggtccccattgtttgaagccaagaaagataactgaggaaattctatggctgatttgccgatgttattaccaattatttattagccttagtatcggatagtttgactgatttgccatgttgttttttagaaatgggggtcttgctctgttgcccaggctggagtgcagtgacgcaatcctagctcactgcagcctcgaactcctgtgctcaagtgatcctcctgcctcacctgtgagtagctgggacaacaagcgtataccaccacttctggctaatttctttttttactttttataaagacggggtctccctatgttgcccaaaggctgatgatttgccttttttaggtagaaaacctggactgggccctcaagtttttaactttttttttttttcttggtgatacaaaatgtggggtgaagaggtctgttaaagtgaccaggcttggtgctatttaaagccgaggagggaaatactgtttcctggcaggctttattgtgtttttgtattattaaatctcttaagtcagcagtttactttttgtctagttgtatgtcttggcttgtctaaatgaatcataattaaaatttagtcactgggactcttaatcttgtctaagcaggaattatagtttagagatactataccttgctgtgtatagaataagaaaagtataagtctgctatgatcactgagatgggtttttataagtactaaacttttttagaagcatagttttctttatcacctgtcccccagaaagtttagaaagtgaaaattaaaaagtaagtaaaaataatggtattggagttataatttggaaatttgtttcattcacttgcattttaatatttattatgtaaacatgaaatgataaatttgtttcctttgaaaagattcaagaaatagaatagttttaaaagtagtcttttacattcctttgcttattgacaaaatcatcatcaggaacatcgattcagggaatgaggcttctgatccatctcaaaacgaacattactaatatttgctatggtcatttgacataagtttttattgagtcagaactatactggggcagtagccttcaagccagttaaacatgaattaagaacttgtgtgccaggtactgcactaaatgttaatggcataaaggtgaataaaacatcgtttatactgtgttttgtttcacacaggatttgagatggctgacagaaagtaactaaagtgagattgtaaaatgtaactgaggttcagaaccagggaaaagataaattagatttggaggcctagatatggttaaataattaattagacatgaaaccctatggctgaacagttcagttgaatgttgattttagtagtgatatgatacagaagctaagctttgttatagtcacgcaatgttgaggcatggttaatatatttagcaggattatgaagagttcaggcattttttggaaactcctatgaatatgtcatctagaattggttttgtaaaatggtagtgcttgtactgtttagttacatgtgttgaatatcagatggatttcagtatttttttaaaactttgcttaagcctcttaagcctcattgagtggggagactgcagtgtaagtatccaggctgaagactgaacttccaccttatttttatgtggtaatgagtttttgtttagatgatatatatgttttaatgttgagatggaaaaagtagaagtgaattgcagtgtagaaactactctgtttccttttttatctatttttatttcagtcattaagctttccccatctttagtctattgagttgtttcatggcacgttcggagggatggtgggaatgccctttgctgaatcaaaaactactgtttctccaacttcacaggttagagaagctcatcaagtcaataatttataattttaatatggaagctgttttgggaactcttgtgggcatatcttggttttaaaagaagaaaaaagatttactgatttaagaggtatataaacgcagcttgctgacagtagcttttgattttattggttcaacagatatcattgttgcacaatacataatctttcactgtggcagctaatgagatacaaaactgcataattgcaccaacagttattttccttatagaatttggcggctactaagtaaacaacttttaaaatttatcttaattggtttagttatgtgccatcattgaatgagtcttaacattttccttcacgctgttgcactccacattcttagttgaacagagaaagatattattttaagggagggcttgatcttttagcattttagccagttggcttttcttaattaggatgattactcatatttagatgaaatctaactgagaaaccacagcaaaatgcttactgaaaacattcgggtagtcagtgtggaggaaagactcctggaaaataaaatgtctcaaggttgttttgaagtttatcctcattgtttttatttatccttatgtgtgttaagtatacgaggattcctggttgtactggtattttggcaaagtcctgtactgttcctcaaatgcttctaatgcagacactgacttttaagaaccagacacatgtagatgtgcagcgagacaacactctggcctttaaccattgtgcctcctttcttacctgcgaattgcgtttactagcgtatttcacatttcagccaatagatctaaagaatacaaatgagaacatataggacctgtctgcaaataggttttaacttccagagattagaagtagctgttgagagcactgtgggtttagtgagaaagagtgctttggcagaatgggcagtgtctactgtaggctaaaaatgggggaactatagcatatcatgagccttctgtaaccctcgaagtcagttattagcagttgaacatgctctttggtcataatggcagtccccaggctccagataataatttgagcagggagctgggagaaataaggaggacatgagtacatgggacaaaagtgggccagtaaagggaaaattacatatgaatggaagaatagagaatggaaaatggtaaactggagagaaaaagatgaaaaagacatgaaaaaaaagagtagggataaacgggctctacctgtttccttttctgatcagtaaaggaaaatacttcttgaaatccttagggcatctttggacaaggaaatcagaagtaattcaaattgtattgttgtcagagtttagtcttaaaagttgtgttgccaggtagaaaacaaagcatgataatcatttatagaactcctttagttggtttacttgcctcttagggtaaaaacaaaattagacttccagagtagtctgtgatcttggaaaagtctttctgaaaaatgattatagaactgttaagacatctcccatctcatctcatatggcatcatacttttcccaattattttcagatattttagcatcaaagttttctagaatgagttttgtagaacactagtatccctcattgcttaaatatattaggaggaaaaggattttttttattaaataagtttgggaatatatagagtggacaaaattagttttaaaattacaggtcatttgagaggtcttgaagtaccagtgtcttgtggatccctgaagggctagatgagggtggggcatgtagcctttctcaaatttatgtgactaccatacagtttgaggaaagctggtctatataaatgcattacctgtgaaacctggctttcttccacatctcctctgacttgctttgctatttttttccccatctcttacagtacttcctgctatcccccaaattgggggaattctttcttttttcattttaaaatatgatattctggagatctgaattctctctttttacatttttatatgtgtattccactttgagcaatattaatactagcttacattttaaaatacgatattctggagatccaatgtataacatgagggctatagttaataatattgtattgcactgggattttttttgagagtagattttagttgcccttgctaaaaaaaaaaaaaaaaaaaggaggcaggtaactgtgaggtgatggataaattaatttgcttgactatagtaaccatttcactatatataagtatataaaaacattgtgttgtataccttaaatatatacaatgaaaaagaaaagaaaagaaaatatgatgatagtatttatatgtgaactctttatttggatctttaagtttctggataatctggtccctaatcttatctacattcccaggtttattcatcaccagtcttccatggtaagtcttcacttgagctcaatttactattccatgattatattctgtatgtggaatgttctcctctactttttgtattatggtctggctcaagtgcaccttttccatgagaccttccctgatatctttagctagaagtaatctcttccttggcacatctgtagcatttatgtactaatacctatagtgttatttacagatttatttgtggttatttatgcacatgtcttagatttcgagcttcagaagagagggaatagcatgccatatcacccagaagcttgtagcttagctattgcctagtaacattattaacagagtaataatgtcagctaacatttgttgtttactataataaatgacgagcacagttctaaatgctttagataattaatgtagtgaagaagtagagtaacttactcagtcacatgctcagttagtgatggcgccaggatttgaacctaagcattcttctgctctttatcactatacagtactgcttgctatgataggtgctcagtgagatttgaatgaacaaatgagcagacaaggctttgaaaaagagggcccatcatctgtggctcaagctcataaggcactttcttttccccttttcaaagctgacatttatcatttatctagccatgtaatgttttcagtgactaagaacaattagctagagttcaggtgggctgtgggagtggtagagatgagtgtgtggggaaatgtgtttagtcactgtgtttattttatttatacactagaacctgctgctatccttgttgaagaaatagtggtgagtccaggctttggagtcaggaaaacctggatgggagtttcagcttcttcatttattagcagtttgggcaagtttcttaacagttgtaaaccgtagttttcttctttgtaaaataatagtaactacttctttagtgtctatgtgaggattaaatcagatgatcatgtaaagcacttagctatagtacctactacatattaagtgcccaacaaatgttacttatgatacaataggttttacttaacataaaattaactcctaatttcttaaaaaaatatgtcttttgaatgtggacctttcgattttagtcagctaaagcattaagtctgttttcttccactccctcaacttcatagtaacatgtctgtttataatatgcagtgagaattgtagtgtacattgcaccatttatacactgcaaacatcatacattagtaacaagtctgtcatgaactgagttaattgtagggtttgttctgaacattttcttgccaggcatggtggcttacgcctgtgatcccagcactatgggaggctgaagtgggaggatcacttaagtgagttcaagaccagggcaacatagcgagacctcacctctacaaacaaacacaattaaaaaaatatattttttcattgttgagctttattttcggtgtttgtaatatgaagacaataggtatctttttatttatcaaataaggtttattaattatgctttttcttttaaatgacagccttgagtcaactttttctgtctttgtgctaagaattacagtagtctcaacgtagagccgaggtgattctgatctaaagatgctccgtgaatgtgcgatatttctttttcttttttttttgagatggagtctcactccgtcgcccaggctggaatgcagtggcacaatctcagctccctgcagcctccgcctcccaggttcaaacaattctcctgcctcagcctcccgagtagctgggattagaggcacacaccaccatgcctggctaatttttgtatttttagtagagatggggtttcaccattttggccaggatggtcttgatctcctgacctcagatgatatgcccgcctccgcctcccaaagtgctgggattacaggcatgagccactgcgcctggccgcatgtgggatatttcgaagaatcttagctttgatgcatctgtggggaagaaatgagtgattattaacaaaggtaaaaggagaggagagtcattgcaaataaagaatcttgtagcggccaggtgcggtggctcacacttgtaatcccaacactttgagaggccgaggaggatcacctgaggtcaggagttcgataccagcctggccaacatggtgaaacctcgtctctactgaaaatacaaaaattagccaggcgtggtggcgggtgcctgtaatcccagctactctggaggctgaggcaggagaatcgcttgaacctgggaggcagaggctgtggtgagccgagattgcaccactgcactccagcctgggagacagagcgagactctgtctcaaaaaaaaaaaaaaagtatcttgtagcagtttattctaggccagagccacagtttgtgttgatttggctagaaattattaaagttggtattctgtgaaattttgtttgagtggttctttgtttggttgagcgggttcagatgaggctgagaaaacaggaagattgtgcttggaagagggggagaaggcttccttaggccaaggcaggtcagtcattctataaggagagtctctatacaggatgtttctgcttttaaaaatatggtctgatatgcaaattcacttatctagtgcaaatgattctggcaaaggtttctactttcttgattcaggaataagacaaaagagttttccaccccatagtacacaacaaaaaagaggcattataaaacttttcagaactactaaagtggtatgattttatgatttcttgttgaattcagcatttgaaaacagaagaaatgtgaaaacagaggaaaggtgcttagcataggaattaacttgtttcttggcaaggaaaccagggtcaggtgtttgaatcacttggctttgtggtggttctgttggtttttgtgtgtgtgtttttcttcttctgctggattatcatctctttttttctgccttggaaactgttgctttatctagggcaatcaccccacttacacaggaggcaaattcaaagctggttgccttatgttgttaaaagctgtcagattcacatcctttgccatatccttcttcaggagtcaggacaatgaagacaggagtctaaacatggggccagagtgagctgccccgtcctcagtactaacacctattcctgacagcttaagttgcttctcagccttagtgaagctttctcagctattctggctcatgatgatcattccctcctttgaactgaaatagcctaattgtctctgagtcatgtggcaattagtcttgttttgctttctgatatctcttgtagttgacttttattgttaatgtatgctgcttgaaggcaagggctgttgtgaatttattatattgctatatattttacagagactcttgatttttccctggtttaccttgggaagttttcctgcctcttaaatggcgagaggatcctttagaagatttcctaactctcagaatcttttagatttttcatgtcatgctgtgtttgctatggccttgaaaaagcagtttttcccttttttgcagcagacacaaccaagattctggataaagaccaggcaacacaattttcctagagtaatacttaccttgagtagtttcttatggggaaaaaagcccccaatattcttaggcttaatttctatgatcaaatattttaaagatagaaacaaatgatatatagtagttaggtatgggggcaggcaaacaagcaaaatgttaagatcttgcatgactaattagtactgtataaaacacatttaaattttgttgtacccattcttacattagaaatgaattgattgattcatatggtattggttttcctttaagggatttatttcttaatgaatcagaggtttcacattgaaaaagaatctgcgtatttttatatactatcccaactttcatctgagttatttcatgtttttcattgccccattggaaaccgtattttgccgaagagtcatttaatatatttttcacactggctttgatttggtgacatgtagcagttctggaagaattaacgatatgttaacacaagttgactgtgatagaataattacaataaatatgcctattttcctttggggagaaaagtctaaaattctgctttatagaagctattctcagctctaaaagagcatatatgtagatcttcatttcttttcttctaacaattttaggggaaaatacaaaccttaagttatttcctgaaatatttcccaggatgattactaccttggattttaaggcttctttcttcacaagttctgactcttctataagcacaatcagaatggtcagaatgctgactctcctttaggtagtcagaatgggtcttccaaacctttgtatgagcccattagctgcctcagctttccctcaactttcaggaaaacacaggttacatattctttacgttactatgagaaactacctacattatttttttttaaattttatttttggctgggcacattggctcacacctgcaatcccaacattttgggaggctgagatgaaaggattgcttgaagccaggagttgcaagacaagcctaggtgacaaagtgagaccttgactataaaaaaaaaaaattaacctttccggcggtgatgacctacccacacgagaacatgcctcttgcaaagggtctccttcatccctctccagaaaaggagaagaggaaacacaagaagaaacgcctggtgcagagccccaattcctgcttcatggatgtgaaatgcccaggatgctataaaatcatcacggtctttagccatgcacaaacggtagttttgtgtgttggctgctccactgtcctctgccagcctacaggaggaaaagcaaggcttacagaaggatgttccttcaggaggaagcagcactaaaagcactctgaatcaagatgagtgggaaaccatctcaataaacacattttggattaaaaaaaaaaattaaaacaattagccgggcatggtggcatgcacctgtagtcccagctactctggaggctaaggtgggaggatcgcttgagcctaggagctcaaggttacagtgagctatgatcacatcactgcattccagcctgggtgacaatagccctataatgtaggtagttacttttatctgcattttacaaatgaaaagaactgacagacattgagttaaaataaccagtacaaaaatcacagatgggggatagccaaagctttaaaatggaatagcaggaagttttaatttgcaaatagaatcattaatgtttaatagaatcattaatagatttaatagaattaatgaattgatagaatcattaattcatacttagtttggagtgattgttgaacacatttctcagctaatttaggtcttcattatattttagaacatattatctgcatcattaaaaaattcctcatttcctcattgcctatctctgccttttattcactcagttttaaaataaacagattttgtttatactgcttcttttattaatatttatggtaagatattttatactgctgataaatggacattaatgatatatagcctattgtttgaaaaaagcattttggattatagcccagaactggaaacaaccaagagataaataaatggtggtatattcatacaataaaatattactcagataaaaaagttcagttcaaaactttcagttttatcattgcattatttgcagttgtaaaacatggtaacatcacaaccttatgttacaaagttattaaaaatattagcaaggtacactgattgctgtagccatgttacaattaagctaaaggaatttcttgttaaccaaaagcaaaaaataagtttggtttttttggatcttaattgactatttataatagaacttgcctttgggtagcgaacagattcacaaatgaaagaggagattctggaacttactgtataattccaggtaactctgtaaagtttgaaatgtaaagaccatgccttaatacaattgataattggaatcgtgctggcatcttcttaacatctcttgcttgtctgtggagcatggcatgattacttatacattactacatttaggaaacagcctttataagacccactttttctgaagtttttggtgttactcttttcttaaccaccagtactgatctcattatgttttggccgacttacttgagggcatgctaaaaagtgatctaaatacttaatttctcccttcaattgtgcatcgtgttttacaaataaaccgtatctttactttcatttacttgcatgtcactgagaaaatttgagatctttagcattcatgtccttgcctgaagtataaggatttcacataatttcagcttttatcattcaagtcttatagatgcttttctcttgtctctgttttcaaataatggtgctaattatatttaaggggcagtatgtttattcaatatagttatagtgttagcagtgtaggatttaacaagcttttcctctggaatgtatactagttcttcatgttctatgtgataacttatacagtgctatggtatttttgttgttagatttaagttttctttgaattttttttctgtccataatcttaggctttctttttgtgcttactgtttttttctcccccagaatgatacatggcagcgattataaatctgttttataaaacttaacttcattaaacatatgaagaacgtgggattatttttcttgtcataaaaggtgacctccagtgacaaatggctattacattatttatgtgagattccttcatttcatatactgttatcaatgtgtttgataatggttgaagaaccagttggtgttggtttctaatactaattaataatttgccttgagcctgatcaatcttcttatatccattatcagatttttttcttcaaatctgaaaatgttttcttttcttttccttttctttttttttcttttcttttctttcttttttttttttttttagacggagtctcgctctttccccccagactggagtgcagtggcgcaatctctgctcactgcaagctccgcctcctggcttcacaccattctcctgcctcagcctcctgagtagctgagactacaggcgcccaccacgacgcctggctaatttttttttgttttgtatttttagtagagacgaggtttcactgagttagccaggatggtcttgatctcttgacctcgtgatccacctgccttggcctcccaaagtgctggaattacaggtgtgagccactgcacccagctattttttctatatttttatgtagttcattgagggtaataattttatcctacaacaaacatgtaagttattgaagaatattggagttttatgataatgctgtcataaatataaaaggtagggtaagagggatccaaatagagctcacttatattgtcactgataggcagtcacgctgtgctgatagaatgtggcctgacacttgatggagtgcagcatatgtatacttgggcaatttgagcagatatatacggtcccgagtttaaagaagagaacaaacaccagtgcacagctatagtattcctaatataggatgcattttaaagaatttcacattctacaaatggagagagatggcaggagaagccttattttaagtcctgcactaaggcaggttaacctcatgggtgtaattacctggacctttttgtaaggacaaaatatttaatcattaaaaggccctctgtagggtttgaaatatctatattttatatatgaatgcttcttttattaatatttatggtaagatattttatactgctgataaacggacattaatgatatatagcctattgtttgaaaaaagcattttggattatagcccaaaactggaaataaccaacagataaataaatggtggtatattcatacaataaaatactactcagataaaaaagatgaacttaatctcataaacattatgggcaacatagtgagaacccatctcttttaaaaaaaaaaaaaaaagaaaaggtgggtgtggtgatgcgtgtcatagtcccagctactcgggaggctgagctaggaggattgcttgagcccgggagtttgaggttgtagtgagctatgatcatgccactggactctagccaggagcctgggcaacagagcaagaccttgtctctaaacaaggcaaaacaaaaacaaaaaaacaaaaatcaattgcatttttatatattagcagtgaacacatggaaatacatgcaataccatttataacagttcaatcaaaagaaatacttgagcatatatctaacaaaacgtatataggacttacttgtatactgaaaactgcaaaatgctgatgaaagaaatcaaagaccaaaatagtgagagatactgtgttcatgattggaagactcaacatagtaaagatgtcagttctcctcaaattaatctacaagtttaatgcaatttttatcaaaagcccaggaagattttttgtagatataggcaagattattatcaattgtgtgtagaaatacaaggaaactagaatagctaaactgaataaaaaaattggaggaatcactctacctgatttcaagacttattgtatagctccagtaatcaagattgtgtaatattggtagaaggatagaccaaagatcaatgaaacagaatagaaaagcaggaataacagaatagagacctatacagatatcctcagtaaatttttaaattgagatataacttacatacctgtaaaattcagtggttttttattatattcacaaagttgtataacattcaccatcatttaattccagaacatgatcatcacttaaaaaataaatgctggcctggtgcggtggctcacgcctgtaatcccagcactttgggaggcctagtgggtggatcacctgaggtcaggcattcgaaaccagcctgaccaacatggtgaaaccccgtctctactaaatatacaaaaaaaaaaaaaaaaaaaaaaaaaaattagccgggtgtggtggtacatgccagtaatcccagctacttgggagggtgaggcagagaatcccttgaacctgtgcagtggaggttgcagtgagccaagatcgcgccattgcactccagcctgggaaacaagagcaaaactctgtctcaaataaataaataaaataaaaataaaataaaataaaataaaatgctgtattcattggccattgcccaactgatttttgataaagatgcagaagcaattcagtgcaggaaggatagccttttaaataaatggtgctggagcaactggacagctataagacaaaaaaaaaaaaaggaaaaaaggaaaaatctgacctaaacttcacaccttataaaaaaattaactgagagtggatcatggacttaaatgtaaaacataaaactaaaaaaaattttagaaaataacaggagaaaatgtttaggatatagagctaggcaaagagttctgagacttgacaccaaaagtatgatctagaaaaggaaaaattggtaagttggacttcataagaactaaaacattttggtctgctaaagaccatgttaaaaggctgaaaaggcaaactacagactgggagaaaatatttttgaaccacatatccaataaagactactgtctagaatatataaataactccaaactcagtattaaaaaaccccaagtaatccaattagaaaacagcaaaagatgttaaggaacatttcactgaagaggatatacagatggcatgtaaccccatgaagagatgttcaacatcattagccgttagggaactgcaaattaaaaccacagtgagatatctcaaaatagagtttaatttttaaaaagcctgggtgcactggcacacacctgtaatcctagtactttgcgaggttgaggtgggaggatcacctgagcctggaaagtcgaggctgcagtgagctgtagtcctgccactgcacaccagcctgggcaacgggaatgagactgtgtcttaaaacaaattgttttaaaggaaaaaataatatcattaaattcagtaaatgcaggaaaaaaggctaaagcagaaaaaaaccacatgtgatctcaataactgtatataacttccagtaacattttgttgtattttatacatttttttgccctctgcatttttatattatatagttaactgaatatgcagttgtgtcttgcttttttcacaatactcaatatcatgagtatttttatcacttaaaattatccatgaatatagattttaaatggctcataatctttgttgtatggatgtacagtaatttatttaaccattcctttcatatgtttaaagtagttccattttgttgctattgcaaataatgctgtgagaaacatttttgtatgtaaacttctgtcaggatttctgattccttccttacaatacattcttagaggtagaattactgtgtcacgacgtgggcatcttagaggcctttgttaactatacattgccaaaatactttgcagaaatatagtttcgatttatgccccttttatattcttacatttctcctttctctaggaaaataaatgttcatgttactcaccttcactcaaggtttccaaacactttttcttggctctcctcctacaactctgttctcagctttccaaaattgtttctctttactccttagatatctgggtttccttaggttctgtgctctccctcttctctctatgtatattcttctttgagctaatcagaaccagccccttgccttcaactacagtttacatcataatgactcctaaatcccatatctctgctgagttttgggaaccagttctaacaccatactagatatttttaccttatgctacatagccatcacaaatgtaactcccttatccaaaactgaactcattatccaaccacactaacttcatctccactgatggcagtatgacccatccagtggtagaagccagaagtttgggagttagcctagatttctccttgaattttgtgtaccactggtcaatcattacattttaagattctgcttccaaaatagctctctaatttgttacctcccctttccactgccttaatttaggccctcatattttttgtactgctgcattggtgtcttaactgatacgcccatttctgacctagttccatccctcagtttcatccttcacattaaaaccattttgtcttttaatttttaattttatttttgagacagggtctggctctgttgctcaggctagagtgcagtggtgcaatcttggctcactgcagcctctgcctcctgggttcaattcatccttccacctcagcctcctaagtagctgggactataggtgcttgccaccatgcccagctaattttttgtagatccagggtttcaccatgttgcccaggctagtctcaaactcctgagctcaagtgatccacctgcatctgccttccaaagtgctgggataggctgggcacagtgggtcacacctgtaatcccagcactttgggagaccgaggttggcggatcacttgaggtcaagagttcgagaccagcctggccagcatggtgaaaccttgtctccactaaaaataccaaaattagccgggcgtagtggcgggtgcctgtaatttcagctactcgggaggctgaggcgggaaaatcacttgaacccaggaggtggaagttgcagagagccgagatcacaccactgtgacaaagcaagattcaatctcaaaaacaaaatatacaaaatgctgggattacaggtatgagccaccatgcctggcccagtttgtcattttaatgcatgcatgtcagcatgtttctcaccgtcactgtcttctgtctcctgtaaaataaagcctgttctctgtagcatggcacccatgagcctggtcttgatttccttcctccaggctactttcatgatttatccctggccatgcctgatatggctcccagtcatgctgagctagtttcctcaacatattagaattgtttttcaggcctttatgcttttgctcatgttttttttttccttgacatgcttctttcttctatccatttgccagatttctttcacatcctaagattcaggtaacatcataacctcctatggaaagcaagccctctataggaattgttaagggcttccttgtctgtgttcccactgtgccatgtacctacttctttctgccacctcctacattggtgtacttttgttgttgttgttaagctgtccctattatactagattgtaacacatgctttctaccgcctagagcaggaactgtgtactcttaattgtttcctgagggcttgagattagcatctggcatgtagtaggtgtttaataaatatttcttgagtagatgaagatatgagtgaatgaatgaagggtttcatgctgaaaaatgaaaaaagggtttaactttaagaaaaaagtcacagattttggagtcataggaattgagtttgagtcctaccgtcatttcttagtgttgatataattttaagcaggttgtttccctcctctgatctttagttcttttgcaaaagggaggtggtagtagtagtagtaatactattaacagtagtagtagtaataataaaagtgcttttaaaataaatattctgcaaattttagttaatattgttaacagtaataaaaagcatcttctatatgtaggctgcacatgcataatgcattgtcttgaacgaagtgagaggagaattacttaaaactttgggtagacgtactcatcaattacaagatcaatttacttggttttgctataatttggttgccattgttgacccattgctttattgtcccattgtctcatcacttgctcagacgctgaagatgggtcagggggagtcagttttagaaaacagccttccctgggccgggcacagtggctcacgtctgtaatcccagcacttttggaggctgaggcaggtggatcacctgaggtcaggagttcaggaccagcctggccaacatggtgaaaccccatctctactaaaaaaaaatacaaaagttagctgggcatggtggcgggcgcgtgtaatcccagctactcgggaggctgagacaggaggattgcttgaacctggaaggtggaggtggcagtgagccgagattgcaccattgcactccatccagcctgggcgacaagagtgaaattccatctcaaacaaacaaacaaacaaacaaacagatataaaaaaaagaaaaaaaaagaaaacagccttccctgaaagttgtttgtgatgcttatggtctaggatgtgaaatttacaggatgatgaaacatgcagatattaatagtgttccatattatttttgaatgtggtttgacttttctaacgatcagcagtgacaaacttgtgtactaccagtcaaccctgttttccatgttttctctacagagatgtatagttagagcagagatgactaatgtgttttcaagaaatgctactataacctttaagtctgatgggtagattgagcatttaaagctgttgctttttcatcgcatctggatgactgtatgttcctaccaaatgaatcactttatgaatatgcatgagcttataaacacaactttttagaaaaaattcttgtgttctgaaacaaaattacgttggtagtattttccaagttttccgtaagaagtagctttgcattagccctagaaattccttgaataatatgtttttacccccttacttgtattacatttaatgacatctctggctttattttctccattcttttttccatggagtttcttaatttcactgtttttgccttgccctttagacgggtgaaacaatgatgactcattttagattgatgaaagggacagcttagcagctggagagctggtagacactagagcactaaattgccagcaccagccttctcttcattgtccacgtaaggcttgtggcagaggtatgcccattcagtcatttattaatatgtaatttgtaggttagatgacttcatcaaattatatttacatctgacctggaggttcaaccatgttttgctttgggacatttttaattgttaaaaatcatagttgggttctgatcaatatgtacatgctgaagttcttatttagccacattatgggcttttttggttttcttcagcatgtcaatagtacacagcagctcagaatggtcaaaattgtttcattagtgccttaacaaccattcatgatatatcatattgtagaatgcaagtatagtcacgcactgcttagcgatggggatacattctgagaaatgcatcattaggtgattgtttccttgtgggaacatcataagagtgtacttacacagacctagatggtatagcctactacccacctagggctatgtggtatggtctgttgctcctaggctacaaacctatacagcattttcctaactcaatattgtaggcagttgtgacccaacggttaagtatttgtgtatctaaacacagctaaacaggaaaggtgcagtataaatacagcgttatcatcttacaggacctctgttggtatatggtgcacgactgtatatcctttatctacatttcccccttttggcttggatagaccatcaattccttgggtttacatttatttcatgtaatcttaaaggattttgttttatgcatggcaccattttttttcaatacaaatggttagtataaaacccaaatttgagaatttgataacaatggcttagtattgaacacaagtgttacataaagttgtggaaaaagccttagagaggtagtcaggggatttgagttccaggtctgactgtgcacttgactcaccacgtcatcttggttaataatcacctaacaataaaaataataaccttaatttatataatgctctgcagtctgcagagcacttttaaagaaagtataggctgggtgtggtggatcacatctgtaatcccagcattttgggaggctgagacaggtggatcacttgagtgattaggagttcaagaccagcctggacaacatggtgaaactctgtttctaccaaaaacacaaaaaagtagctgggtgtggtgaaacatgcctgtggtctcagctactccagaggcttgagcctgggaggcagaagttgcagtgagctgagattgtgccattgcactctagcctgggtgacagaacgagatcttgtctcaaaaaaaaaaaattgtattgggcatagatatgattattcacattttgtgatgaggaaactaaaattcaaagactttaagagatttgctcaaggtcacataccggtaagggctagaactagcattgatttttatcactttcctttcagtcataccatgctgtctctcattttacttttatgggtatcagttatgaaataagggggttggaccggatcagtgatttttttcaagctacatttacagagagtcttaggattcttttgagtggcctccaggtttgcttgtggaatgaagattgaaatatagggaaaggtgcttagctttgcaccagagtatccacactgagtgaggtagtagttgctcattgacagttgagaaactactgcatgttattaccgatggatgagtttgtgtccctttagtatgactggacaaaaagaaagtggaaagacatctgatataaacttttgaggttttgtttttgttttttaaagaatggggtagaattccatagctacttaaagcttgcaaactactgcattagatgatttttttttttttaaggtagggtctcactctgtcactcaggctagagtgcagtggcgctgatctcagctctctgcaacctccgcttcctgggttcaagtgatcctcccacctcagcctgctaagtagctgggactacaggcacatgccaccacgcctgggtaatttttgtatattttggtagagttggggttttgccatgttgcccaggctggtcttgaactcctgagctcaagcaaacaaactgccttggcctcccgaagtgctgggattacaggtgtgagctaccatgcccagccagatggtttttaaggaatttttcagcctgtgagtttgtaaaatattgcaaccttaactttggtggtgttacctgatgaatccctgatgactttacagctgttgcaggcttacatcagtttagagttatggggcattattgaagccctgtttatcttccaagatagtctttattcttctttgctaaggtggctatttttagtaatctttagggaaaagaggcacaatggcagaaatgagcatgtgttattattagtatatttatgcagccaatattggtaatgctttttttttttttttttaaagactgtgtaggagtgaaaggggagttttcctttccgcctttgaggttagctgaaaatcaactgacaaaagtcagattaataggagaaaaggcataaacatttttattaacatgtatggaggaaaatcacagagagattgcccacaacccagtggggtacagatgcttatgtacccttgtttttagaggaagggagatggggaggtatggatgattttacagggctagtaaatgatttttaaagttattcagtgggcttggagaatatacagtggtctgggacaaagttttttgggcctacagagcagatagtggtttgtgacaaaagtctgtccaggcccgggtgtggtggctcatgcctgtaattccagcactttgggaggctaacgcaggtgaatcacttgaggccaggagttcaagaccagcctggccaacatagcaagaccccgtctctactaaaaatacaaaaaattagttatgccacggtggcgcacatctgtaatcccagctacttgagaggctgaagtgggagaatcacttgaaccctagaggcggaggttgcagtgaggtgagattgcgccactgcactccagcctgggtgacacagagagaccctgtgtcaaaaaaaagataaaagttactcccaagcactggcatagtgcagtgtgcaatatatatatatatatatatatatttttttttttttgtttgtttgtttgtttgtttgtttgtttttaagaatattagctgggcatagtggcacatgactatagtcccatctaccagggaggttgagactagaggatcacttgagcccagtaggtcaagggtgcagtgagctgtgattgtgattccagcttgagcgacagagtgagtccctgtctaaaaaaaaaaaaaaaaatcatcaggtgtattgacatacttcagtctctcttcctgcaatattagttcagttaatgaaaactcggggaagggacagagataactattttcttctttggcaggtccagatttaggcagataagggaacttcagagaacaacttctccctgtgctttgggggtggtgaggggatggtcagagaggccttgaggattgtacagttcagcatgtcaaagtgccatattttgaggtatcggtttctgggcctcaacaactgctaataagaatgattgactttggagttgccttggagttatttcaaaaagtgaaaatgttattgtttagcccacactagttatcttagttgtcatttgtgttttctacaatctgccaatggttaaacctggcatttctatcaagaaggaactctttttgcttccagagtaaaggtatttttattatattaacccttgaaatagatccagttatgtattcactttgcgtttgtttctgaacaaaataaacctgtgtggtaagatggaagtgggtttttcacttacaatattagttacttacatttgtaccttttttttttttttaacttcttcacatttcctcccttgccctccacaatctgataagcatctcattgatgactatgagagactaatttaggccgtgtggttataaatgagatttcaattcatttcttcttctcttaacccgtctcagaggagatatcacagggtgactttctatgttgcgttttgacacaaggacagtttgtttttgctttggctgatggatggggcagctctagttgatgaatgtggtttatatgctcacaggcagatgaaagtgtccactctgccctgagaccctctcctttctgcttagtggtgttatgaaagccccatgggtatttgatttttcaagaattaatcagtacacagaagttgaaatgtagaccaaaggaaagaatatgttttttcagttaggctttttgtctttttttaattatatggggtttaccctttgtgtttcccaactcaggggtttcactattaaataattgtctttgactcttaaactttttaggtaaaatttatataccaggaaatgcatagatattaaatatacagtttaatgagatttgatgaattattataaccaccaccttaatcaatagagaaaatctctatatcccagatagttcccttgtgcctctttccagtcaatctctagacacatttacttgtataataaaaagattttgacatacccaactacaaaatgatcagatctttgtttctgtagcaatgggtagaataaaataaagtaggatttacttaaaactaatattttctttgtaggcaggcctgttgttacaggtagaaggtgctcaaaagctggtttcttaactaatttatggattatttttattttttatttgttattttgttatttttaggtttttttttttttttttttttttttttttttttgtagagacagaggctcactgtgctatccagggtggtctcaaacacgttggctgaaatgatcttcctgcctcggcctcccaaagtgttgggtgtgagccactgtgcccagatttattttattttattctgtttttttagagatgacgtcttgttacgttgcccagacaggactcgagttcctaggggattctcctgcttcagcctcctgagtagctgggactataggtgcacaccatggtgcctagcttaattaatggagtttttgataatggttgacaaagatagtggtaagcaaagcagcccttatatagactttacatcttaaaacataatcccctatgtgtgaaattgagaacagctttctagaataataaacagagatctgtatgctaactaaaaggcagagagaatattggctcagccaggccctcacttttttgttcctccctatctgtaaaacatcatttacctcatcagcgtgctacggacatgggttaatgtttggaaaattctgtggaaagagtggggttctgacaatgtgctctgaccaaggcagtttagcaaatttgtactaagtggctgacctttgataagcaccactccttccccacctgacctgtgattccatttttcttttgtgcaaatagttctgaaggtttaatgtttattttttactacgatgcagtagactttcttctctcgtgtagaaactgctcgaatgactgtggatgactcctagaatataggaataacagaattggtttctcctgtactctcaacacaaaatacttctgtgaccaaatgtgtgggagtgtgtccccacacaccaagcagtcaaccagttctgcagcagctgccagctggtgtcctctaatgcagttcagttcagttcagttctgacactgtctacctggagatagcgtcagatctcacagattgagggctcagtcccacaagtctgtccccagtcttcagtgccagtcacaggctccaggtggttttacctgtgcttctgacctgctggctataaactggtttcccaatatccccttattgggttccatgaaattgttagagtggctcacagaactcaggaaacatactgaccagttcattagaaaggatgttttaaaggacacaagtgaacagccagatgaagagatacccagggcaaagcctggaagagtactgaacgcaggagcttccatcccggtagagctggggtgcctcaccctcccagcaagtggatgtgttcctcttcactctcctggatgcccccttttaggtttttatggaggcttcattaggtaagcatgattgattaagtcattggccattggttatcagtgcaaccttcagcccctctcctttccctggaggttgagggtggggttttgagttctaactgtatgagcacagggttgattcccctggcaattggccaccagtcctgtggttatctagggactttgcaaaaatcatctcattaacataagctcaggtgtggttgaaaggggcttgttataaatagcaaaagactgtcttttgcttttatcactctggagctgttcaggaaccagtggcaagaggccgaatacagtattttaaccaaagtcacttaggaaattacaagggttatataggagctttaagccaggaaccatggagatatatgtatgtgtatatatatatgcacatatacacatacaaatatcaccgcgacccatgatgctcttctcaagggcctgtgccttctgataaacggctgagttggctgttacacttactttttcgagcaaatgaatgtgtagtttcatctggctcattcgtcaaaccccgggtttggaaggttgtatgtttttatttagctagtagcagttgatgtggttgaggtggggcttttctttggggaaggtacagctttgaatggctgttatctttcaagtacaaatagtgtagctccttatggctcaatagtatcaataaactgttttatttgctttccttttctcttcctttttttctttttttttaaacggagtctctctctgttgaccaatctgaagtacagtggtgtatctaaactcactgaaacctccgcctcctggattcacggtgaaatcccgtctgtactaaaaaatacaaaaattagccgggcgtggtggcacgcgcctgtagtcccagctactcaggaggctgaggcaggagaatcacgtgaacccgggaggcagaggttgcagtgagtcaagatcacgccactgcatcccagcctgggaaacagcgagactctgtctcaaaaaaaaaaaagaaggggttgactgccaagtttaaatattggcaggagatgaggagatttcagtttttatggagctttgttaatgagccgtgactgtttattacaagacttttacttttaaaatttacttagtaattatttactcataaaacagctacttactgtaaccagtaggtcagttctactcttgaggcttcacatttcttcatttgtaaaattagtacttgtattggtgtccattccctttctgaaattctgtgatatatacatttcctttaaaatgttacaattgaaaaaaataaagttacaataaagaccgtgtgcggtggctcaccctgtaatcctggcactttgggaggctgaggtgggtggattgcctgagctcaggagttcgagaccagcctgggcaacacggtgaaaccttgtctccactaaaatatgaaaaattagccaggtgtggcggtgtgcacctgtagtcccagctacttgggaggctgaggcaggagaattgctagaacccgggaggtggaggttgcagtgagctgagatcatgccactgcactccagcctgggccacagagtaagactctgtctctaagggaaaaaaaaaagttacaataaaagccaggtgcagtggctcaccctgtaatcccagcactttgggaggccaaggcgggtggatcacctaaggtcaggagttcaagaccagcctggccagcatggtgaaaccccttctctactaaaaatacaaaaattagccgggcatggtggcaggcgcctgtaattccagctactcaggaggctgaggcaggagaatcacttgaacacaggaggtggaggtttcagtgagttgagatgcactactgtactccagactgggtgacggagtgaaactgtttcaaaaaaaaaaaataaataaaataaaataaaaacaatgatacaataattcagtcttgtttagagttgccattttctgagtgttctggccatagcatttcttcttcttgcctccttcccagcaacatttgcccacttgctgtggactgcagttaattaggctggtttggagctctttccttcctgttccatttgtgttacacctaaagcatctcatgaagatgatttagattagttcctgccatcaaagataatccagtttaggatgaagtcaacagtattttaagggtggagttctcttttggaactgtcatttggtcagaattagtgaatgctgttgtagagctgacccctgcacaacacaggtttgagctgcgttttttctttttaaaacaatccacttatatgtggatttgttttcatcccaatgctgatcaaaacagtggtatctgcaggatgtgaaacctgtctgtacagagggccaactttttgtatatgcaggttcctcgggggactgcaggacttgagtgtgtgtgtaatttggtgtactcaggggtccttcctggaaccagtcccccagtataccgagggacaactgtgttgagatatcagctgcgggtttccccccaagctgttactcaattttcacattatctggggtttcctctgttctcatattacccccgaagattttataccaatttagggacatcgtgttttccaaatcctaaatgaaaagcaggatatgaagtgttcgtattttcatgttctatggtatttcctctcatgctcgatttatttatatctaaaatcatgtcatgtaatagtatattaataatgctatacatttggtactttgccattcataaagtgtttttacaaatattgtttaatttgaacctcatgataagctatctagacaggtattttctcagacagatgaggaaactgagatttatagagattaatttgttcaattccaagtagctaattgaaatccatacgacctttctcatttataggatttgtagatcctacctcctttaggtgcaaaggagttgtataaccagttttttttctactagaatgatgacctaatcaggagtaaatgacttttacttcatgtgtgacttcttcatactcacaggtactttgattctttcaatgtgtgttacaccaatttgatagtatcttgccttaaaaaaacatttgttttattgaatgtttactatgtactaggcctgtgcttagcactttcaaaaacctttttgttttgaaagaaaagaggtatactgaaaagtgtataataaaatacacagcttaatgagctgttataaatactcctatatacaacacacagatcaagaaatagaacatttttagcatgcctaggagccagctttttgtgtgctgtgtccaatcaacatgctaactttttgatattcacttctttttcttcttcttatttattattatttttttagagacagaatcttgctctgtcaccctggagtgcagtggcatgattatggcttactgcagccttggcctcctggcctgaagtgattctcccacctcagccttccaagtagctgggactataggcacgtgccattgcactcagctaattctttgcttttctttattgatttacttcctaaacaagcatctttaaacaatatagtttgcctagtttttagcgttatataattggcattacacaatatgtattctgttgtatcagcttcttacatcctgttttatatttttctctattatgtgtagcagtagtttgttctttttcattgctgtatagtattccactgcatgaatatgccactatttcttcattctattgttggtggacatttgtgggtgttttcctgtttggggatactatgaatttgcagctgagaacatttcctcaccctcccagctttattgacgtacagttaacaaaatttgtgtatattcaaggtatacgccatgatgtcttgatagatatatacattatgcagtgattaccataacctaactaattaacataaagaacattattttattttttaaattaaaacaattttttcggagacagggtcttgctgttttgctcaggctggtcttgaactcctggtgtcagattatcctgctgcctcagcctcccaattagctgggattacagtcatgaaccactgtgcttagctcaagaactttcttatgtgtttattctggcacatctcagcacatatttgtgttggggatatacccaaaaatagataggtcatgggattccttccttccttccttccttccttccttccttccttccttccttccttccctccctccctctctccctccctctccttccctccctccctccctccctccttccttccttcctttttttttcgcagagtctctctctgtcgcccaggctagagtgcagtggcgtgatcgcggctcactgcaagggccgcctcctgggttcgagcgattctcctgcctcagcctcctgagtagctgggattacaggcatacaccattacactaggctaatttttgtattttttgtaaagacggggtttcattacattggccaggcttgccttgaactcctggcctcaagtgatctatctgccttggcctcccaaagtgttgggattacagatgtgaaccatgatgcctagccaggatttctttatcttcagtttattagctactgcccaacttttttcttttttaaaagccagtcaaatttagcaatggggggttgtataccaactttagtgacactaaagttaataagttctgataacccactaccataggaccagcctgtcaaacatttttctaaagtggttgtaggctgggcacggtggctcacgcttgtaatcccagcactttgggaggctgaggtgggcggatcacctgaggtcaggagttcgagaccagcctggccaacatggtgaaaccccgtttctactaaaagtacaaaattagctgggcatggtggcacatgcctgtaattagtttgggaggctgaggcaggagaatcacttgaacccaggaggcggaggttgcagtgagctgagattgtgccattgtactccagcctgggcaataagagtgaaacaacgtctcaaaaaaaaaaaaattagctggacatggggttgtatgtctgtaatcccagctactccagaggctgaggcaggagaattgcttgaacccaggaggtggaggttgcagtgagccaagatcgtgccactgtactccagcctgggtgacagagcgagactctgtctccaaaaataaaaaataaaaataaataaataaagtggttatagcagtttaaggtactcaccagcagtataggtgagttcccatttcttcagatcttctctaacacttgctgttgtcaacttctaaatttaaaattttaaaatttaaataattaaattaaaaattcctaatgtagtaggaatatagtggtatctcattgtggttttagtttgcatttctctggttaacaataggagcaccttttcatgagtttattagctgtgatattcaagtcttttgcacatttttcttttgggttatttgtcttttattgacttgtggtagttcttaaaaaaattttttttaaattaaaaacttttgtgtattttggagacagggccttgctcttttgcccaggctggagtgcagtggcgtgatcacagcttgctacagcctcaacttcctgggctcaagtgatcctcctgcctcagcctcctgagtagctgggactaaaggtgcacactatcgtgatcggctaattttcatatttttagtagaaacagggtcttgccatgttgcccaggctggtctcaaactcctaggctcaagccattcacctgcctcggcctcctaaagtgagagattccaggtgtgaactacccacttaaaaatcgttttaatttaaaaaataaaatgaaaagaatgttcttcatgttaattggttaggttatggtaatcattgcataatgtatacatctatcaaaacatcatggtgtatgccttgaatatatacaaatcttatttgttaataaattgttgaggaaatacctggccggtagttccctctatattttggagatgagccccccttttttttattgtacttgttacagatatcttttttcccctctgtagcttgtcttttccctgttagttgtgtcttttgataaataaattcttaattttaatgttgtaatgaaatttaatctttttttctgtatgattagtgctttctgtgagttatgacataaagtcataaagataatctctaatattatcttctaaaagttttattgctttgcctttcacatttagatttcttaagggctaaaattattagataactaggtattagttgattatatgtaattagtaaacaaatatttattgtgacttcagctatgtagaagagtcagtggtagatactaagagatgtaagacttggttcctgccctaaaataatcaacattctgtttgtgtaagtaaggcccttggcatcagcacgatgtaatagaaagaacactgactggactgggcctggtggctgatgcctgtaatcccagcattttgggaggctgaggtgggaggatcacttgagcccaggaggttgaggctgcagtgagccgtgagtacaacactgcactccagactgggtgacagagcaagaccatcctgtctcaaaaaaaaaaaaaaaaaaaaaagaaaagaaaaaaagaaataaaacacacacacacacacacacacacacacacacacaccctccccccccccccctcagaatctggagacttatatccatgtccttttggggacctggctgtgacaccacctttgtgattttagaaatctcctttccttctctgggtctcagttttatcagtaaaataagggattggcttaagtatgtagttcttgattttggttcctcagattgataaggggtctgagtagatagcactggaagcattttttttttaaagctaaaagtatacatttttagccatggtgatgccacacaggttaaccaaaaaataaaatatctttgcttttaactggagtcgtgtgtcctttctgtgtgagaactgagtttaacagctttgatttacaataaaagttttaacttagtttttcaaaaaaatacacttcgtttattgataatcccagtttggtatacaaagtttttttatgtttttttgaaatggagtttcactcttgacgcccaggctagagtgcagtggcacaggcttggctcactgcaacccctgcctcctgggttcaagtgggtcccagcctatctaggattataggcgtgtggcaccatgccctggtgattttttgtacttttagtggagacgaggtttcaccatgttggccaggctggtctcgagctcctgacctcaggtgatttgcccactttggcctcccaaagtggtgggattacaggcgtgagccactgtgcctgaccttatacaaagttttaaataacatggccttctgactttaacttagaaaccaaagagtggtaggagtagggggaaggtattaaataacagaaactatctttggtgattaaaaagttgggtacctactattctaataacttttaagggctcttctgtaggttagtgtaaaagtaattgtggtttttgccattaaaagtaatggcaaatggcgggcgcttgtagtcccagctactcgggaggctgaggcaggataatggtgtgaacccgggaggcagagcttgcagtgagccgagatcacgccgctgcactccagcctgggcaacagagcgagactctgtctcaaaaaaaaaaaaaaaaaaaagcagtaatggcaaaaaaaaaaaccctaagaatttcaatatattatgagtcagtgaaaatatagtatttgttgttttgtttccctaagtgcccaattgagagatctggacaattactattatagagattgtgaggatggacagagaaccttttgttgactgaggtagtcaaagaaggaaggctaccagggtgagctaggattgagcagtgagaaggattgtttctatgtatggagaaaaatgggaaagagggaattgtggacagagcagtgtaagcaaggatacggaaatagcaaagtacaggtcatttttagggacagaagatgaatcagtttagcattagaagatgatgaaaaagtagtctgaagttaaagtatggaaagccttcttcaaacataaggtcaaatacagctttggaaaagttaacagttacaagtatgatggtgtaatgaagattctagttcttctgtaagccaagcaggggccattggctttaggatgccctctatgctccaatataatggtgctgcctggcatcattgaaaacattaaaaaaacttttctaaaaagtatttgaggactgggcatggtggctcatgcctataatcccaacactttggaaggctgagatgagagaattgcttgagtccgggaattcgagaccagcctgcaacatagggagaccctgcctctacaaagaaataaaaataattagccaggtgtgggggtacatgcgtgtagtcccagctacttgggaggctgggaggatcacttgagcttgggagatgaaggctgcagtgagctgtgatcatgtcattgcactccagtcagtgatagagtgagatcctgtttctgaaaataaaaagtgtttaggggataaccagattgggcttgtattgatagccagaccgccaagcaggaaactttatgtatttattttttaagagttggagtctctttctctctattgcgtaggctggagtgccacagtcgttgggactacaggtactgccaccatgcctaattaaaaaaaattaaaagatggggtcttgctgtgttgtccaggctggtcttgaactcctggtctcaagcagtccttctgcctcagctccccaagctcccaagggagtataggcgtgagtcaccatgcctggccagaaaccttattttgtggtagttgttcagctataccttgcagaattttttatgtgaatcctcagtaaatcccaaacagcttctctcagtactaacacatggctgataaatggtactgaattctttgtaaatctcaccaatctcaacagaatttctggttcggggtaaaaaaaaaaatttccgtttaatttctgtagaaaataaccactcagaatccactctctgttatgtgtaacaatggacagaaattttactgttgttggtacaaaacaatgactcatcccaaatcatctcttggaattaagaatgtaatcgtaatacactcatactcatatgtacgtgctcagacagtccctttctgcctttctttttattaccccttctcactccgctgtggtttagcttgactaatctatttgcagcacatcagcatccttaatgcagaaagtttgcagcttctgtttacagggggaaaaaaaaaggagtgtggagattgcagatttcatctcttttttcttcttttaaaatttataatttccttttttcaggaggagggtgattattttcgtttttgtttgagacagggtctcacgctgtcccccaggctgtagtgcagtggcgcaatcttggctcactgcaacctctgcctcccatgctcaagcgatcctcccacgtcagcctcctgagtagctgggactacaggcatgcgccatcacacccagctgatttttgtagcttttggagagacaggatctgtccatgttggccaggctggtctcgaacttcagagctccagtgacccagccacctcggccttccaaagtgctgggattacaggtatgagccaccgtgcctggcctacattttgtctctgacatttctcaatctaaagtatatgtatatgtacatttatacatatgttatttacatatatttttttctttaaaaaattattttttggtggactgagtcgctttaattaagactcagtcattttaatgaagtggggttatttactttgaccttcctccccaggaaatagcacttaaatacttaaaggaaaaattaaagaggaccaaggccatggtggcagggactgggagcatggtggccatacagcctgataagccagcagagaagagtcccacagtaaactgacacaaccctggtgatgtaggtggtttaggcacagaaaaaaggaaagtcagatttgagtaccctcagcaggccttgtactggtcacccccaatacccatgagaacacagcatcctagtcctccctggcttatcggtgctctccacatgggggatacctgtcacagcttttattccaggactggggaagtcacacttttctgcccaccccacccattgttttgcagagaagaatctctaaaaccttcattactcatgctgaaagtgctataggtatttggaatgggagaatgggaaagagtaaattctgaatgcattggagccttaatttgctgccctttctttccttccctctctcatcttcatgaaggagggcccattgtgaataaggaagaggggaagcctgtctgggagaggctttttgggtactgggcttcccaggaagaagccacttcccaccgtccccttgatgatcatgtgacccttttctccatgcagccagaatcagcttctttggggatgaactggtaatagatgttgtcgttagtgttatttttaaatttttagatatttttttccagatgcatcttcaaaatgtaggctttggaggttgataaggttttgtgggattggtaagtgttaatctagaagttgggcagtaaacaagaatagtaccttatcagcattaaaacaaagcatctgaaagaaatgtttttgaggagtagttgaatatttagttggttaaaaatttagactcagaaaattttcaggaaggtgataaagattcactaatcattaagtagggaatctcttaaaggttttatattgatttgatacattagagaatgctataataatagtgtactttgattggtggcctataaagtaattgtgccttttatggtatttatgaattggttatattttaaacaataaatcttgacttttgcgtcagagtttctctgttttgttttttgtttttttttttgagacctgctttgtcacccaggctggagtgcagcagtgctgtcattgctaactgcagcctcaacctcctgggctcaagtgatactcctgcatcagcttcctgagtagctgagagcacaggtgcgtgccaccattcccagtgcctcactttaggctaagtttttcattttttgtagagacagggtcttgctttgttgcccaggctggtctcgaactcctgggctcaagcaatcttccctccttggcctcccaaagtgctgggattacaggcatgagctatcatgcctggccctgcatcatagatttttttttttttttttttgagacagtgtctcactctgtcgcccaggctggagtgcagtggtacaatctcgctcactgcaacctctgcctcctgggttcaagtgatctcctgcctcagccccccaagtagctgggattacaggcgcacaccactacacctggctgatttttgtacttttagtagagatggggtttcgccatgttggtcaggctggtcttgatctcctgacttcaggtgatccacctgcctcggcctcccaaagtgctggaattagaggtgtgagccaccgcacctggctacatcatagtttcttaaaatcaccaactgttatctatgttttcctattttaattagtctaatttttaataatttatttctgggttagtttctgtacttttggtagaattgcagactcacaacaggcttcaggaaagtaattttaccaaatgcaaggctatttgcaatttagttttctgattcagaagccataactctgtgctggatttgattattcattatttaaccaaacatttttcaaatgccttccttattttctgtcttaactgcgtagaattaagcccatttccaaaaggattttgaggtaattctggagtttgagattaatatttttaaaaagaaaccagagttcattttctgcagagaaagcttttaatcaaatatacatatagtaccctgtgtccttaattgaattgagggtttgacttttctccatgcagaattcgagttgatatttttgtagtttaggagttttgacttttctcttttgcctttatgttaacaaacttgtgagtttgcaaggttataatagaaagagtatatagggtttggagtcaggaagtcctaggttcaaattttagcttaatgagcaagttacttaatttttccaagccacaggttccccagctatgaaatggaataatattacccatctattggggttcttgtggggattaaatcagatgaaagtgcttagcatagcatataaatgttagtttattttcctttggcaattatttaggctttagggcaaaattgcctacttgttttggaatgaacccaaattttatggttaattttaggctttttcttcagttagacttttgatatgtctaactccttcccaattttttttttttttttttttttttttttttgagatggagtctctctctgttgcccaggctgaagtgccatggtgcgatctcagtttactgcagcttctgctacccgggttcaagcgattctcctgcctcagcctcctgagtagctgggattacatcactatgcccagctaatttttgtatttttagtagagatggggtttcaccatgttggccaggctggtctcgaactcctgacctcaggtgatctactcgcctcagcctcccaaagtgttgggattacaggcatgagccagcacacctgggtggcagtgcattttttaatgaggaagattgaacaacttgacagaagggtgagctcatattctgaactcttacagttcatctaatgtcaaatttctagaaaaaaattatctaaatctaaaagttagtatgacactccataacattaattgtgagtccctgagggggcagctataaagataaaatggagtataggatcccccaacacacataacacaaacgcttgtgattgagtgtgcattggcacatgtacacctgtgtgctcacccctcctctcccttccttcacctctatcatgagtacaggtgtgttgctttgaattggtgaggagtgggaaagagagtccttttggtgacaagaaagcaaactggttttatttagttcaccaaaatattgttttgatccttttttgtttgtttgtttgttttgagacagagtcttgctctctcacccaggctggagtgcagtggcgtgatcttcgctcactgcaacctctgcctcccaggttcaagcgattgtctcacatcagcctcccaagtagctgggattacaggtgctcaccacccagcccggataatttttatatttttagtagagacagggtttcactgtgttggccaggctggtctcaatctcctgacgtcaggtgatctacctgcctcggcctcccgaagtgctgagattacaggcgtgagccactgtgcccagccgatccttttattttcaatataaaactgttgctgtaagcacgagcatgtccaaagggaacaccatgggatagtagtgaattgagggtgataatccagttttgaggcttaagtctgcaattcctggattaatttggctgctctgttattggtggctttgctaggatcattttcaaatcactttattttcctttatggtaagtgtattaatagtatttaataacaagattaatctgggccaagggctttcctgtgaaagttactattttcattatgggagaaaaatagagcagcatggccagtgtgcatttttgttatcccatccttaggtaagtgagtttagacagcctgagctaaatacctagatttgcaaaaacacctcctacccccatgctttccttttaccatttaaaattgtttgtgaagatcttttttttctttctttctttcttttttttttaaacacagagatagggtctcactgtgttgtttgtttgggtttgcaactcctaggctaaagggttcctcccgcctctgcctcccaaagtgctgggaatacaggtgtgagccgcagtgtgcagcagcttaagtttctgatctccctcaccacctcgcactttcactcctcataccccttccttgtttaatagaaggatcctttgttttgagtagtctccaagtggagtattttggagagactttgaataaatcctggcccaagcctgatcacaacacttggacattgagcttacctgcattctgctgttgggtagatatggaatctctgcccctcttgatcaaagctacatagcccataaggaaacatccattgagcagccttctttcctttcacttaatcaatttcaatgtattgtggtagaggtctttgtgatattccattttagactatatgatctttaggaatgcttaaccctgctgtgccaaagaccaggggaaggctgtgtattcaaactcatttgttctctgcttttttctttttaattattagtagttaactctaaatgaaagtatagaactgtttagtttgagcaaggaacactatttgttggcctctgctttctgttccccttccttcccttccctccctttactgtggcatcatgattcttccttcctgtattcttggtcattctcccagcacctcactttagccctacagtggagattcttctgttcactaataactgcagtggtgtcagtttcagtagatcagccttcgtcttcctttgcttgaatggagtgtttaacatgctggatatcctgcctctttctgctgaagcatctttcctggggtcattttgacttgctgcttatataactattatgtcctttgggtttgtgatactttatattatcaaaagcagcaaaagatagtaatagaagtaagatttttattactctcattctatgaatcagatgttattatcccattttagagataagtaaattaagagagtggttatacctgaagttccagagttattaaatgacatgactggattcaaacccaagagagcctgacttcaaaatctgtgcattgatctctactgagtctgaaggttactgacccagtgaaccagtcactgttctgtttctaagaaacgtttaggttctggctcttgcagggatctttatagtcctgtatttgcaaaaacacctcccacctccatgctttccttttaccatttaaaaatgtttgtgaagatcttttttatctttttttttttttttttttttttttctgagacggggtctcgctctgtcaccaggctagagtgcagtggtgcgatctcggctcactgcagccttcacctcctgggttggccaggctggtctcgaactcctgacctcaggtgatctgcccgcctcagcctcccaaagtgctgggattacaggtgtgagccaccatgcccagcccacattttgtttttatattctgagtattatatagtaaaaaaggagaagagttcattgatacagtcttttaaaaactgatctcaatgatatagtaggaaaaacactggattaggagataggggttttaagttctaatcctgcctggctgtgcccttaactagctgtatgagactaggcaacatttaccatttccttcccaattaaattgaggtagccgtactagatttatctaacatgcctttcattgctcacatcatgcgacattaagctttaattagaaagctttggttttgggacctctttgttttcccataggctttaaccttgtttcctttcttattgcccagcaggaattggactagagttggccaaaggtgggatgaggagaagaggtaggaatcttacaagagttggttggagtaaagttattgacaggtgggaagaagtattcctgtgactctgtggttgttcccttgtaagatttgaaggaaagtaatgagtcaggtcttaataatagtgcctctatgttatttcctccaccccattatcttttgtcagaattgattagcaaaatgcacttacccaagtattttcagggtccctgtttggatagtctaaataacgttgttctttttttttgttttggagacagggtctcactttgtcacccaggctggagtgcagtggcacaatcttggcttactgcagcctcgaccttctgggctcaagcaatcctcccacctcatcctcctgagtagctgggaccacaggtgtgcaccatcacgcctggctaattttttgtattttttgtagagatggggtttcaccatgttgcccaggctggtctcaaactcctgggctcaagcgatctgcccacctcggcctcgcaacatgctgggattacaggtgtgagccactgctccctgcctttagttacctttatcaacctatggtcctaaaggtagattcattgaacttgcctgtcagtgcttaaggatcagtcctgtcttagttcagacaagttaaattcagggttgcattctgtcaactttgtttctaatcagtggatgatcagatgatatttggagaggatttttaatatatgtgaatcttatggtggcattctgttacttaataaatactttaatttcttagcttttttccccatattctccataatttttgtagatagatgctcagacgaaggcagcagtagcacatggataatcagagttttttgtttgtttgttttaacatttctcgttaaagtataatgttcagcaatggggaccaatctatactcctcatctgtagtctgtcaataaataggttgctccgactttaaattctcagcttgaattgtttcttttttgtgtgtggaatttatgaccctctgtgatgttgaccctacctaaagcaagtagaatagctacaccagcaaaatgaaataccataacaacaacgtatgcttatgtttatatagtgcttactgtgtgcctggcatggcattgaataaatatatatatttaataaatagagttggggtctcgctttgttgcctaccttgtgttgaactcctggcctcaagtgatccttctgcctccgccccgtcaaagtgctaggattacaggcatgagccactgctcccagccagcattgaatatatttttttttttatttcatcctgagaacaaccttatgaggtactttcaggtcatacttttattaccctcattttatactagaaaaattgtgctttaagatgttaagcaaattgcccaaagtgcaaaaccagtgtgttggagcttgaattccaaaccagatctgcctgagtcaagcttttcttttatgttcttatttactaaaggcttcttgaacagaagtatgtgagagttgggcacatgcagcttggtcaattctatgtaaacccggtcagattctgagtagtgtagatctgataaagtcaatgtgaatttcttatcattcgttgcaagagacttaatgtagcaaaaatcagtatcataggaaacgagatgttactgtggtaggcacactgttctctctcagctacctcatttttgttgttattggtggtggctattgctctggcaactacaaaggcagcatttacttgacacggcgtgtatgcttaaggcagaacactgactgcttttcattgctggcaaatccggacttcatcagtactggctacctgtaaggaatgtgagcatgttggattttagaacaggaaaaacacaacttccacctcatttcacagtagagttcacttagggatacagactttttggtgacagtaactgttactttctgcttattaattcagatacttgcataatgctaacctggtagatattgtcagatgacaagccttcctcctacatgttctctataaaagaactgctagtgacaagcattttattatattaaaaattctacttcatactgttttaagttaaaatgtatttattatgaagccaatattgtgaaatgtttttttctttttccagaatgtggtttttttttcttgtaatggactaagatgcaggcttattgtgtagaatgaggagctattgcccagatggaccttagtgaaagtaacttaaataagcaagtagattttgcttctgtttgggaaaatgatctaagacggatgctggtattttgggcaggtggagactaatgttttatctcaatgtttgcaacttaagttcagcctacttaagggctgtcccttaagggtgtccaattgtttggcttccctggccacactggaagaattgtgttgggccacatataaaaatacactaacactaacaatagctgatgagctaaaaaaaaaaaattgcaaaaaagtgtgataatgttttaagaaagtttatgaatttgtgttgggccacattcaaagccgtcctgggacgcatgtagcccacaggctgggttggacaagcttggtctagaagttttctagattttactacaatgttcaaatggcaaactttaaaagtggggaaaggaattttgggtgagataaaaagacaggtttgaaaaagcatacaagttcagggaactgcaaatggtttcttaagaccaaagcgcaatgtcagtgtgaagaagtggcaggcaatgggaaaggataaatcagtggagcccagacaatgaaggagctttgtacttgatgctgaggagtgtggatttgtttctgcagataatggggaacttctgatttttctttttttaggtggacagatagaatcaagtttgcttttgttaattcatgtgacaatgtagaaggtggactgaaggtagggagagtattgtattcattggagactcattaattgttagaagactattgtaatcattcaagcaagaaataatgacctaggccaggtacagtggttcatgcctgtaattttagcactttgggaggccgaggtgggagaatcgtttgaggcctggaggcagggtcttgctctgttgcccgggctggagttcagtggtgtgatcatggctcactgcagcctccaattcctgggcttgtgattctcttgtctcagcctcccaagtagctgggactatagacgtgagccactgtgcccagctcaaattactttattttaaattttttttttttgagatggaatcttgctgtgttgcccaggctggagtgcagtggggcgatctcagctcactgcaacctccacctcctgggttcaagtgattctcctgcctcaacctcccaagtagctgggaatataggtgcacaccgccatgcctggctaatttttgtagttttagtagagatggggtttcaccatatttgtcaggctggtcttgaactcctgacctcaggtgatgcacctgccttggcctcccaaagtgttgggattacaggcgtgagccactgcacctggcctcagattactttttatacattgaaagatgacctagaaattagtcaagacattaatttagatagtcatacagtcaagtgacataaacctcagagaagaggaaggtttccgtgctatcgccccacccactagagtggaagaactttgagggagatagaatagtgatattataatctagttcctatagataaagaatgtttgccaagaaggttaacttctgtagctgagctcctttgctgagaagatgaaggaacactgtttaatggatagatttagtctgtgattctctgtggaggtgattactgtcagttctctttatcctagcagcatttggaaaactgcagctaagcaacccgtcgtcatttcctaatgttactataatctggtgtcaatgactaatgatctcattgggctagttattcccttccagcgatgctggcatcaggaagcacattaatagtctgtaagaaatgcattcattaaaaaccaggtaatcactttggagctggtcctggcagtgtctgaataaattggacaagttagagaaaatcttgaacctgaaagctactttgtctttcagcttggtttgggcaaggtaggaagagatgaatcagttataatttgatgggatctaatgttacttttataagatacatcactttaatatgatgcttcatcattaatgttttagtaatctgacagcattagacagaattgatattccccttattttattatttcttggcttcatgacagaactgtgcattaaaaggcacttaagattttaaaagggatatctaagaaagtggttaaaaaacaaacaaatcccaagtggcttgatctgacttacaaactctaacaatgtgtagctaattgcagatagattttattattcacagtattgtgtcaagtctcctgtgcacatcttctgtattggagcataagtaatggagatgttatcttgcccaacattaggtttgaggaagtcgtttttaagacagaaatagtagaacagtgttattccatactgtactttccccttttatataagcttgctaaaattaaggttgggcaataggcccttgagctaaatgtgacctgatagaaagttttagcaacaatgaaaaaaattataactatctaatatacatatctaatattagatatttaccttacttacatatcatgcacaatcaaacaaatggcaattataactacattcttttttacttgccataatggaaaaactttattaaacaaattatgcccactgttgctctgggatttggggactaggtaggcatgatttcaatggaaaataatttagtaatggtatgtctcaataatgtatcaacaacctggaaagtatatattctttgacttaggattttcatttctaagaatttgtcttatagaaataatagtaggtcaaaacaagaatgtagtcataagagtatttactgcaatgttgtttagaagagggagaaaacaaatgaaaatgggctgggtgcagtggctcacgcctgtaatcccagcactttggaaggctgaggtgggtagaccacttgaggccaggagtttgagaccagcctggtgaaaccccatctctactgaaaaaacaaaaaagaaaagaaaagaaaagaaaacaaaatgccacaaaaaacaaagagatgaaaatgaaaagagatctcacaagacatatgaatatgttgcacttcaaactgatgcaaacaggtgtccatctaaattcaatagtgggcagttagaatttgaaacttagttgtcattgatgattgccctgtgctcagaggaatcacagattaaaaaaattttttttagaaagaattgaagttgagtttcagaaaagtcagacatttaagtttacaaccgtagttggagtgcaaacacatatatgtcttaattacaaaatgtctgttctgttagtacaacttagcataaagaagagatggacctacaagtgaagtatatcaactgataagaaacaaaatgctttaaaactttggattcaaacctatgattccagaactgttctaacattttaaacaatatggtcaaactctaggcaagtttggttcccttgtgtttgtgaaactatatttttcatacatcttctgaagtaaaaactaaacactctcattagttgtttaaatctggaattggatttggaatttgccttgattttatatacctttgttcttgaggctacctgtatttgtcagttttatcttaacttactcaaaatgggtcacttagtaaaaataattgtctaactatacacttttagtttgattaagctttttggattagtttgggattttgactaagtttctatatttgtatgatcaataatttcatacttatagtaaacaaaaatttatatatctgtactcctatagatttatgattctgtggctctaaaaatttcagtgctcttagagttgtggaaagagcagagcactagattaaatgaaacctctgtgtgccaggccctagctgggctttctcgaggcattagagtgataaagttggttgaggaaatggtgaaagccatacctttgtcctgccattttttttctttatgagatcatggttgaagtccctgactctcatgatagtgaaattgagattttaaatatttgtttctctttacatcccaaatccattatagctaagaggaggaatttcagatatttttccaagagcggttgtcaattttttttttttttttttttttaagacggagtcttgttctttcgcccatgctggagtgcaatggcatgatctcagctcactgcagccttcgcctccagggttcaagtgattctcctgcctcagcctcctgagtagctgggactacaggcgtgcgccaccatgcctggctaattttttgtatttttagtagagacggggtttcaccatgttagtcaggctggtttcaaactcctgaccttgtgatctgcctgcctcagcctcccaaagttgtcagtattttacttacttttctttccttgcatattggaatagcttttttttttttttaaattatcatatacactacctgtggaggtaaaaacataaactgttgttttcttggaggctgaggcaggaggatcacttgagcccaacagtttgagaccagcctgggtaacatagcaagaccctgtctttataaaaataaaaagaattactgggtggtgtgcacctgtagtcctagctacttgggaggctgagtcaggaggattgcttgagcccaggaatttaaagctgcaatgagctatgattatggcactgcactgcagtctgggtgacaaagtgagaccccatctctaagaataaaataaaatggaattaacattcactgtcaacaaaggcactcttgtgccgtttttgtccccttcttgactgtcctggtcgtatgagatctgtttttcctctaaattcattgtatactattttctttacattgtacatttggccatctctgggaaaatgttaagaatgttaatgttctcattttagtatactgatatctcacttttcagaatatcaccttcctaatctttttctttagtcattttatccagttgtacttatgtaagctaccataaactttttctgaatcaaagcaaaatataaattaataaatgtttgcttctttaatagtgtatattttattccttttatcaaatttttaagtcagtaagtactgtgatttaagaactttttatcctataatactgaataaagtgttttgatatagaatacggtacatagatgtagatatgcatttagtgccttgcatatttgttgaatgaatgattactacacatatgagctaagtcagctgtttggggtcttctttttgcctgcatctgattggcttgtcaagcagactgactgcccacctgttagacccatatgggctggctgagtatatagctagtgttttgctcagcacacctgcttgtgcgcatggattgatgtctgctcttaaactagttgccaaggagtcaagtgtatggcaaggtgaaggaagactggcagtgaagatatcttaaagaggtaatctaataataatggccagtggttcccctgaatcttgtttgctcaagttgttcacatcagagagatgtaaaattgctttcatttgggtggatttgggaattcttttttgataatgggaaaaaatgagaaggtcctctatgatattgttgtggatggatgtgcatatggtcagagaacatgaacctgttaaattttgagcttgaatacttttcattaacaacttaattgagaatagctagatagcatctattgtttattctttttataacaagtagagaaatagagaaatgtcttttttttttttttttttttttttttttgagagagagtctccctctggcgcccaggctggagtgtagtggcgcgatcttggctcacagcaacctccgcctcccgagttcaagcgattcctatgcctcagcctcttgagtagctgggattacaggtgcccgtcaccacacccagctaattttcatatttctagtagagatggggtttcatgatgttggccaggctggtcttgaattcctggccttaggtgatccacccgccttgggctccccaagtgttgggattacaggcgtgagccaccgtgcccggcctgagaactgtcatatttttaatcctgttgggtctcccccttctcctgtcactgtatttgagcaagtttatataaattattgatatttttctggccacaaaagtgcagctatatttaagataatatttttttattttcaccctcttgacataatcaagccataacatgaaatggagatttattatttattgtttattgaataaaattttgttccttcttctattttttttggagacagaatctcattctgtcacccaggctggagtgcagtggcacaatctcggctcattgcaacctttgtctcccaggttcaagcgattctcatgcctcagcctcccgaatagctgggattataggcacacaccaccacacctggctaatttttgtatttttagtagagacagggttttgccatgttggccaggcaggtctcgaactcctggcctaaaatgatctgcctgccttggcctcccaaagtgctgggattataggcatgaaccactgcacccagccagaattttgttcctttttaataattaattaattaattaattaagatgaagtctcactatgttgtccaggctagccttgaactccttgggctcaaatgattctcccatctcagccttctaagtatttgggactacaggcaggttctaccacacctgacttgttccttattttagatgttgaaaataagcaagtgaaataaaggcttatcaaagtgtacacagcactttgctagatactgtggatgatttttcagggaagatgccattcctcccctgaagaagataattattgtagagttagagctaacagacaaaatagatgatatataaatttattcttaggagccaggttgttgagaggattaagagcaatcactagacgattagaatattggggacttccaaaacatctgaagtgtatctagaatagtagataagatctgcacaggtaggaagtagggtgagccgggtgtggcggctcatacctgtaatcccagcactttgggagggttgaggtgggtggatgccttgagcgcaggagtttgggaccagcctgggcaacatagtgaaaccttgtctctacaaaaatacaaaaattagctgggtgtgatggtgcacacctgtagtcctagctactcgggaggctgaggcgggaggatctcctgagcctgggaggtggaggttgcaatgagccaagatcacgccactgcactccagcctgggtgacagagtgagaccctgtctttttttttttttttttgagacggagtcttgctctgtcgcctaggctggagtgcaatggtgcgatcttggctcactgcaacctccacctcctgggttcaagcgattctcctgcctcagcctcctgagtagctgggattacgggcatgcgccatcatgcccagctaatttttgtatttttgtagagacaaggtttcactatgttgcccaggctggtctcaaactcctgacctcaggtgacatacctacctcagcctcccaagtgctgggattacaggcgtgagccaccatgcccggcctgagactctgtcttaaagaaaaaaagaaaaaaaaaggagtgaaagtagaggtgagaagtgcctggaaaacgggacttttaaactgagcttgctgcagaggtggacacaaaaatttggggctgttttgtttgaggaatgaagaatagcaggacaaaaacagattgttttggggttggtattaataattgtataggtagcgtggggaaaacttttagagagccttaaaagctgaacccgtatgttttagtttggtgtgagtaaacgtagattcctggtgctctgtaacaggagtgtttgtcgcagtttagtccgacagtgatggcttatagtacatatgattgtggtcaagatgaggagattaattagctaatcccaaagggatttcgtgatcatttattgaatccttaccaccaagcactttttgtcatgaatcattatttcatctaaacctggcaactgccctgtgagtttgatattgttataatcctcaccgtaacaagtgagaatgctgatacccagcaagggcaagcacctttcttagggtcacaaaacgaggaaggagtagagcagtcagtgtggctccaggaaccagaatcttaaccactatgctctaaagtgtttttcagagaaaggaagattaacattctttccttcgatgtatttttttccttgctaattccctatctccttacctacaatgtggcttagtgatcttaggacaaaggtttggcttggagacttcaaagaggtttgtccatttcagactcttcaaaaacagttactggttacttacaaataacactttgtaattcaataactgaaaaatcaaaacaactttaaatagattttaaggctggagaagggaggctagctaatttcataaatttgttgaagtttgattttctttaccctagttgtatcataaataggaatggttttttatatttatacttgtttaaatatactgtttatacctgtttaaatgctaagccaacaaaagctctctgaaagaatacatgcacacaaacacatgtctgtttcgtcacggatgtgtaactcactcatggttgctcctcctgatgtctgtgtgccacacagttcggaaaaggcacttgcttggctgtcacgctgtaagttccctttgtcatttgtgacaattggtctctttgctgtacatcttttgggatgaaggattgagctcttgtaaaagcatttcagaggtttttcagctaatgatttttccgctcattctttactgtttggtttcctaggcaacccatcctccccttgcaccctgctgacgtctgttcagcccctcttcctctccactacccctcccattactcaagttgttttttcattgctgctttaggattgcactaaaggaatatacatgttttcctaaatatctgctcctctatactttttagaatatattagaaggatgggaagaaaaaaaatcatttttagaagctaagtaacctgtatttttaggtcagttataacagggtttcatccatataaggctaaatttattctgttgtttctaggttggttttcttttttaaagttaaacaataataaagaaattgttgtccatttaaaccaggaattccataattaagctattttaggaatgtaaggtgttgtataggaaaaaacagtctgaaaatggtgggcatagttgcgtttctagatggttatgctgtgatttatttttttaaaaaatcagttgtgtctgttaaaagcatttctgttactgtggggaggggtttttaaagttttaaaaatctagcttttgggtgagtgcagtggctcatgccagtaatcccaccactttgggaggctgatgtgggaggatcacctcaggccaggagtttgagacccatctgggcaacatagtgagactctgtttattaaaataaaaataaaagtagaaataaaataaaataaaaatctgtttagttgttgttcacatttggtcctttagagatacttttttgagacagaatctcactctgtcacccaggctggagagcagtggcatgatcacggctcactgcagcctctatctcctggacttaagtgaccctcccacctcagcctcccaaatagctgggactacaggtgcatggcactatgtctggctaatttttaaatttttctgtagagatgaggtccctccatgttgcctaggctggtcttgaacttttgggctcaagagtcctcctgccttggctccccgaggtgctgggattattatagtcatgagctactgctcctgacctagtgataactttttgaattccaattccttgatcctttagcatcctaggcaaagacaaccatttctgctgggtaaagcacagtgaaaagccctgcttctctgtatacaaatgaaacagattgtacaattaatatgtattgggtgctgcatggtccatcctaacagtagtgctaattgccatatcatttatttttacatttggaagtattttactttggcctcaatgtaattttgtttttttaatgctgtagagtgtatgggatataggtaaggagtggataagaaaggaaacaatagaatcagaaatagtaagaattgctatataaatgcctttccctgtaaatgcacacaaatatatgaggtgtttttttttgggggggggggtcttgctctgttgcccaggctggagtgcattggtaggatcttagctcactgcagcctccacctcctgggttcaagcaattctcttgcctcagcctcctgagtagctgggattataggcgcccaccaccacgcctggctaattttttgtatttttagtaaaaatgaggtttcaccatgttggccaagctggtctcgaactcctgacctcaagtgttctgcccgctttggcctccgaaagtgctgagattccaggtatgagccaccatgcccggccacgagttttttgtatgtatgtctaaatacgtagaaagacaagatttacccccttttttggtgtctgtaataaatttagtgatatacgtgtatgggtgtatatgtatatagatatgtatgctatgagttagaaatgaaaaacctgccataaaagcaagaggaaggaggagttaattttgcctgaagatgtcagagaaggctgcattgaaaaaatttgccatagacctggtgataggagattgaatgggccttactagctgtgtatagtggtttgtaccaaaaagtatggggataggaggggaaagtggctgggaatattggaaaatctagttgaaagataggttgaaggccgattgtgaaatagtttcacttactttatcatttaagtaataggttggttagaccttttagatcagatcagtattttgagagtatctctaatagtatagaattatttgtacttcttgactgaaactatatgttaaataatgaatttgtaacttagttattagagtgttcaaattatacctgtttctctcccttccctcaatttttagaaagcattctctaatgaggcaggggtttttgtttgttttgagacagcgccttgctctattgcccatactggagcgcagtggcatgatctcgactcactgcaaccttcgcctcccgggttcaagtgattctcatgcctcagcctcccttgtaggtgagattacgggcgtgtgccaccatgcctggttaatttttgtatttttgatagagacggggttttgccatgttggccagctggtctcaaactcctggccaccttggatccgcccaccttggcctcccaaagtgctggggttacaggcatgagccaccatgaccagccaaggcaggttacttttatattggttaaaagagtgcctgatattaaatccttagtctcccactaaccagctctctctctgaccttggatgagccttaaactttggtttaattcatttgtaaaacaagcataataatgcctacctgaaagaactgttgtgaggatttgattgaacgggataatatgtaaagcacagctcttgacacactgtaaatgtagctgaaaaatagtagtgattattttgtggtaacagctttcattgtagaagaaaattaatggaatgtgaaggattaatgattttgggaggtggaggggaggagaccttgttaagtagattaattaggaagttattggtttgtccaaacagtgcttttaggtgacaagggaattcagtgtggaagaggaggtttggtaggagaagaaaatataatcagtttagttgtagatgggttgagtttaaggtacccaaggacacaaaggtaatactgtggaggtggctgttggaaatacgaagcctggaggtacgaatgtggaagttattgctgtctggttggagatacttgtgtctgggaagagtgatcgagtgagtagtggcctattaatgttttctttttttaaaaaatttactttcaatatactgccaataaagtaatttgcactgttatactaaggtattagaccacgtattctgagttcagatttgttgcttgactcgttaatgtatgtaggttatacccagttttggtaagcctcctgacctttggccccattcacagcattatctctatctctcaaagggaaaaagaagttcattctttgaactggggagtgctctgatgttggcaggtctactcctcctcaggtctagacactcttggcctccacagtggttttattcaggaaagttctcacctttgaattgtagacttagtgcagacttgctggtagttggctaggcgggatcacaacagtgattggtattggtaagtacatgtattgctgccaagaagttgcatagttcatgtgttcagtcatagccttttctttatatgacgaccccgctgaaatacagaatggcctgctgccttctcacagaaggtctactgttccaagcttatttttttctgagtgagaagaaaaggtcttttgccactgttttcagactgaaatttaaatttcagctgccttggatcctatataataaaagattgagacacagaaattgttctattagacttgaaatttcaattgcttttacttcccagtttgtagtagtgtttgaacctaaaatcctatgtgtgtttttagttaccttttcaagttaaactttcagaaactatctgcttaacttaaaaatttactcttgttaattgcccaaccacatcttacttcatgtgtcaaaatctgcctgatatttttaatttggaagtccacagtagtgggaagtcataggaactcccagtcagggtattcacagtaactactcacagtaataggaactcacagtcaagtctaatttttcattttaatttttccaatcccttctttacttctagtatactaattgaaaaaaaaaaacttgggttgcctttagtttcaatttataatttttattaggattttactgatactgtatctttttggtactggaggtctcagaggactgacctggttctacttgtttgctcttgggatttagaacgatagtttctattgtgttgagccagcaacattttgcttattttcaagaggcagagtggcagagtactaaattgcaaggttgtgcagaccttaaataagtgtatggtgagctataaagttacaatgttaaattagtttctggctggcccacattgtttccaaagttgactttgcattttaaaagaccttactgatttaaaaagcgaatagagaactgcttggaaacacatatcatctgagagacattcgaacatgcggggaaaaaaaaaagtggaaggaaaggtgctgctggctgggcatcatagactagaaagctgcatttaaagtttaaactgcttgggtaagacatgttttcctggtttatcctcatgtttttttccatctgtgttctcttgccattattaccaccaaatacaggagaatactcctttacttattgtagtcttatttgggagacagactagagtgtggattatgtagggacagaaagggagacttgagggtttttttttgttttgttttgttttttcttccagtatttaggttcattgatgtacagggcatatgttgtcttcttttagatttttcagtgaagttttgtactcctctccataaaactctcacacatttatatttatacatatatatgtaatatatatattatttatttattgagaaagagtcttgctttgttacctaggctggagtgcagtggcatgatcatggctcactgaaggctcaaccccaaagactcaagcaatccttccacctcagcctcccaagtagctgggaccacaggtgcacattaatatgcttggctaattttttaatttttaaattattattattgtagagatggggtcttgctgtgttgcctaggctggtctcaaactcctgagctcaagcaattcacctgcctcggcatcccaaagtgctgggattataggtgtgagcaccactggctgggccaatgttttttctcttataatgtttcttctgatactttgtggctattctgaatgtgttcttttaaaaattatcattagaaagttacttcatttttctttttttctttttttttgagtcagagtctcgctctgttgcccgggctggagtgcagtggcgccatctcggctcactgcaagctccgcctcccgggttcacgccattctcctgccttagcctccctagtagctgggactacaggcgcctgccaccgtgccggctaattttttgtagttttagtagagacggggtttcatggtgttagccaggatggtctcaatctccttgtgatccacctgccttggcctcccaaagtgctgagattacaggcgttactgcatttttctgcaccaggatctctttattttgtacttaggctttgcttgctccctctttgctttagtttcatcatctgtgaaacaaaggggttaggttagaataagaaatttccaaagatctttctacttctcacagtacgtggtgctgtgtcgaggtaacgtcctttacatacctcatgaagttagtgctagttgtaccatccaaaccacacataagttctgtgaatacaaccaaacagctttgttcacatgtatttgcatgtgtttcaacttaccgtgttctctgcataatgattcttcaacagtttgaggtaaagagtgaatatttcagtttaaaaatacagtcaaaagtatagtttcttattctggtggacgtggtttactactacctcctccccctgtgttttagtttgttgctgtgctagttttattgcatattttctctcctaaaaatagatggtctttatctaaagcgtagtttttataaatatttgcatctcaagtaaattttttcctaccacatggatttcatgtggtgagttccatgaaagcaggttgtgttaagagggcattctcctagtacctgtttattcttttccatacctctgccccaaggatcttgtttactgatgtcagaatactggcagtttgagtagtactcttgaagagttatttttgtatttatttctgctggattgaaggaggtagatgttgtactcattatctctcagaacatctattcaatcctaacccccaaaatataccttagaaacaggctctctgtgtttttttttttttttttaatcttttatgaagacatacaatacacacatttctcttagatgctggccaggaatttgtttgaacaaattgaaatggcaagttttaaccctaatttgaatagagttccagaaaatgaagttagggcagaggttggtgaggggtcatattggagtgtcactgagctagtaccaatttgtttgtttgttttgtggtaaaatgcacataatataaaacttagcattgtaaccatttttaagtgtacggttcactagtgttaagtacacttgtatagttgtgcaatcaatctccaggactcttttcatcttgcaaaactgaaactctgtacccattaagtaacaactcctcatttccccttccctccagcctctggcaccaccattctgctttctgtttctatgagtttgagccagtatttgtttagctttttcatttttgtcttgagaacttgaccttctttatgacagctaaatggatgttgaacatgaagaggagagtaatccagtaaaactggtagccactcttcatgatccatgagtgttggtagttgccaaccccgaaattagagtatcagtcagtcttctgtaatgcagtttggaaattgctattccttgtgtttgaggatgatgacaatagctagtgactaacacttacttggtacttattacatgcctgaggttagaggaaagacctgcttctgggaagaaagagtaaaggaaagattgggtgcatgacaatgtatagatacataaaggaagttcttgtctgttttctctgttaagctcaaagctaagtcatctgttgaaagttagggggctcaggttggttaggaggtttaaataaagtgacagatgtttgcaattaccaggaaatgggatagagactcatcagggaaagtagaataatactaacagtattagtggtaataataacaacaacaagaacagctaataatgactagttatctgttctatgccagctacattttatgttgtaatctttatagcaaccttattaaagtagttgttattacaggtaagagactaagttgcagagttaggatgccagtgtcactctgctgccccaagcccaggtgttctttcctttttctgcactgttaatggcattgggagtgtctgcctgacactacaaaccagaagtttagagtataatttttagaaattgttcttcagagaaaggaggaagagtgggctgaagtaaacgctatatgtctaaaatatcacaattatgttgacttttttttgccaccagaatgattgatgcccttgatgggtcatttcactaaataaagtgagttaccacagcccagtagaaacccagatctggttgtgtgaccttaatagaggtatctgaaattataaattgattttcttccaatagcccgcatctgaaataactggattgaggttcatgtcagtaaattcttcaatttctatgtagggaaaaatgaggacctttttgtttgtaattattctatttattgaacagttattagttgtacttctaatctgtactagaagactatattacaaagtgtttattttccctaaacaatggcttctcttgattcgtgttcattattgccctaaataaattgaaatttagaaaaagaaaaacccagttttcttagtatcatacatgcaagcttaagttttcttatttgtttgtttttatttgacatacatgaaggttatttccaaagatacaaatggaggccaaaacagtttgacataaagcagaccaaaacagattgaattatactgtacctctacactgactagcattttgatgtctagatggataagtaagcatagtgctaatttacaagcgcaaactcaactagtaagattaactaatttctaggctgtaatgaatttatataaatattcttgttattcagatgggaaacctcataactgtgctgtagattagacttgcattgcctaaaactggagaatgtaactttttttgtttttttgacaaacccacagccagcatcatagagaatgtaactttgcctcccaaatctgtgtatgtcagatcacttataattggagctgcacagttccctcttctaggtttgactctttaaacttggtaacatctcattaggctaaatgaattctccatgccctattgtctgtcttgctatgttgcctaacactttgattttaacattaggaaaacaactaccaataaacatgagataaaacacaaaatagatgaataccactagcttggtaatataaaccattatataacagggatttgctgcagactcttttcacacatagaaaacttttccaaaagacatttttgaagtttcgctatgaagaaagtttgccagtgactgaaagaaccttttgtaggtccctatttgggagtgcggtaactggtgcttctggactctatacacagagatccaaggctaggaaaatatctcagggtaaagctatctaagttttgtatccaaaagctattaatttcttcagttatgagaagaaaccacaaattgcgtaatggccttggtattttgttggtatggagagaaggatgatctcagaagacttgtaggcctgtcttggggtgtctgtggtgtgtgtgtgtgttgctttttttccaacttataaaaaaactcaacaatcaatcttagccacgtttttgaaaccgtagatattctaagttagcaaatccaaatcagtacacgaaacaaccatttttgccagcaccaaatgcatactttgctgagctttcgtatctgggctccagagtttattcatagcaaattctgacatctgctaagttctattatgacccagaggggagcgaagtgaagtaggatgaagaatctggaaacgcatgctgcttatagggtaaattgcattgaggaatttgcatccatgtagcctttccccttatggaccactgtgacgtttagtaggctgagctaaaaggtcatattgctcaagatgaataacaataaatggtttgttcagtgacttgttaagcctactgccagtgcctactaatagccaaaatagctatttctcttctgggatatatgagtttggctgtcatctttttgggaatatggtaatttgtagccatcactttcagtgtggtggggagatctaacatttaaaagttcttatcccagtggtttacagatcccttttcccccacaaaccgctgctgcttcttttgaaccttgaatgctaccatggtttaattttttttttttttttttttttgagtcagggtcttgctctgtcacccaggctggagtgcagtggcatgatcatgactcactgcagccccagccgcctggactcaagtgctcctcctgcctcagccacccaagtagctgggactacaggcgtgtgccaccacacctggctaatttttagatgggatttcgcatgttgcccaggctggtcaagcagttctcccaccttggcctcccaaagtgctgggattacaggtgtgagccctcatgcccggccttcctttgctttgcttttcttcagttgtggttcagttctagaccatgtttacagtagatacaggggcacagctcccaatagtgtttaaaacatgtgaagtatcggggcagaagttagcacctctaataagtttaaattccctcggatttgctttataggaagtatgttaagaacattttccagagcattttcattcaactgatatattttacatagctgccttattaaaatacagatgtattcttgaaattattgaccaatttttttttttgagatagtcttgctgtgtcgcccaggctggagtgcagtggcacaatctcggctcactgcaacttctgcctcctgggttcaagcgattctcttgcctcagtttcccgagtagctgggattacaggcgccctccaacatgcctggctaatttttgtatttttagtagagatgggtttggcatgttgtccaggcttgtctcgaactcctgacctcaagtgatccatccacctcagccttccaaagtgctgggattacaggtgtgagctaccatgcctggccgatcaatttttttttttttttttgagacagagtctcgctctgtcgcccaggctggtgtgcagtggccgaatcttggctcactgcaagctccgcctcccgggtttatgccattctcctgcctcagcctcccgagtagctgggactacaggtgcctgccaccacgcccggctaattttttatatttcaatttttaagaaatgaaataagatgaatgatgagtaattcctttttcagtaatatagtagattagatattcagagaaatcccctcgggtcagaaattttttttttttttttttttttttttgagacggagtctcgtaccgtcacccaggctggagtgcagtggtgtgatctgagctcactgccacctccgcctcctgggttcaagcgattatcctgcttcaacctcctgagtaactgggactacaggtgtgtgccaccatgctcagctaatttttgcatttttaatagagatggttttcaccatgttggccttgatgtcttgaccttgtgatctgcccgcctcaacctcccaaagtgctgggattacaggtgtgagccagctggaacatttttaaatgaggctaggaaaggtaaaaatgtatgagcacatataatatacatataacgttctggaactagtgtaagaaaaataattgaggccgggcatagtggcgcacgcctgtaatcccagcactttgggaagccgaggtgggcaaatcacgaggtcaggagttcaagaccagcctggccaacatggtgaaaccctgtctccactaaaaatacaaacaattagctgggcgtagtggtaggcgcctgtaatcccagctactcgggaggctgaggcaggaggattgcttgaacccaggaggtggaggttgcagtgaactgagattgccccactgcactccagcccgggtgacagagtgagactccgtctgaaaaaaaaaaaaaagcatcatttcataaggcagaggaagccctgaaggtggtggtggttctgagggtttcttgtaggattagaggaaagtggagggacaagagacaagtagtacctaagcatagtggaaggtcctactggagactgtcccagatggaactgggaccctggagggtgcaagtcttcagtgcatgagtagaaaaaagatgtccaagatgtcctgcatgcagagacttgcctcttactgtcttggatctggttggagaggggaaagaagcctcccatgtgattgcctaagcagacgcccatactcaaagatttgcagtcagattttatactacctgtgaggactgaaaatctctaaactgaaaacttagttgaaagtattcctatttggttatggttcccagtgtctgggagaatcaaattcatatctcttttaaattaattaattaattttagagacagggtcttgctatgttgcccaggctagtgttgaactcctaggctcaagcagtcctcctgccccggcctcccaaagtgctgggattataggcatgagctaccacgcctggcgaaaacacactttctagtcaggccttaaagacttttaatagaggaagttgcaagaaatgtgagtttgcgtaagaaaataagcaactatgagttggttattttgagtcagatggggcagattctattttccagatatggaaacagtatttcctgactcctgctcttctagaacctcactattgtactatcaagaagtagaatctttttctgttgaagctgggcagtcctttgtgactgctttgaccaaaagaatatgacagaagtgatattatttcatttctgaggctaagtcataaaaataccacacatttctttattctcttgggatgctcattcttggaacccatcagcatactctgaagaagcccatggagagatccatgtggaaaggaactgaggtctcaggccagtggcaccagctataggcttccagctgatggtcagtactgacttgccatctttttaagtaagcgatcctgcaagtggatccttcagttctctatcaagctgccctgggtgatgccatgtggagcagaggcaagctcttctctctaagccctgaacagattactaatttgtgagcaaaataagtaattattgttattttgatccactaaattttggagtggtttgatatgcatcgattgacaggtaactaaacatcggtggtaaccatcagtcttataaagcctacagatgtttaaagaaataaaggaggaggttaaaaatatgatgaggagactcttaaaactgatgaggaaaatatggaagaagaactcagtctctgtagaacttctagaaataaaaaacatgcagatgcccccagacttatgatgatgatctgattgtaatttttctttctttatttctttttttttttcgagacagggtcttgctctgttgcccagctggaatgcagtggcatgatctcagctcactgcagcctccgcctcctaggttcaagtgatcctcccacctcagtctccctagtagctaggaatacaggcaggcaccactatactcagcaagttttttatttttagtagagacagggttttaccatgttgcccaggctggtcttgagctcctgagctcaagtgatctgcccacttcggcctcccgaagtgctggcattataggcatgagccacctcagctgacctgattatgatttttcaactttacgatggtgtgaaagtgatattcattcagtagaaattatacttcagtacagtattcatgaaatattcagcactttattgtaaaataggccttgtgttagaattcaagctgtctaaaccaccttgttttgttttgttttgttttaggcttttagcagtgtgaagccattgtttttagtttctctctctagtgataagcggaaaagagggttgaggaaggggctttaccgaaccaaccagaaacaggaactaagaacccaagcctgtgttccctcccttggacacccctgtaagatgattttgctcagtcgtaggctaacatcagtgttctgagcatatttaaggtggaccaggctatgatgtttggtaggctaggtgtattaaatgcatttttgacttagtaatatttcaacttatgatgggtttataaggacataagccccttgtaaattgaggagcatttgcagcgaaaaatacagtggaaagaggatacagagtagagtaaattaatgaactggaaaatggatctgaagaaaatttctagaatttagtacagagaaagaagagatggaacatatgagaggtttagtgacatagagaatgagacgataacatctgtctgatctagtggatcccaaactttttaaatcttaggatcccttatgccttatgctctctctctctcttttttttctttgtttgttggagatggagtcttgctctgttggccaggctagagtgcactggcatgatcttggctcactgcaaactccacctcccaggttcaaacgattctcctgcttcagcctcccaagtaactgggactacaggtgtccattaccacgcctggctagtttttgtatttttagtagagatgaggtcttgccatgttggtcagtctggtcttgaactcctgacctcaagtgatctgcccaccttggcctcccacagtgctgggattataggcatgagccactgcacccagcctactctttaaaattattgaggacccaaattgcttttgtttatgtgagttacacttataatttggccacatttttgcatatatgttatagatccattaaaagtttactttaaaaaagaaacatcatagagtgagaaggtgagccacaacttgggaaatgtactaacaaaggtttgttagccagaatataaaagaactcctcaaataaaaaaaaaaattaggaaaaatggaaataggaaagtcatgaaaaagttaattttacaggagtagaaacaaatggttcatgaacatatgaaagatcctcaacccttttagtaatcaagaaaatgcaaattaaaatggcaaggaactgtctatctcctgctcgtctcctttcccccaccaaacagggaaaaattaaaaatatagttacagttgttagagatgatatgagcagtaggagcagtcatactgttaggtaccttcatttttgaaaacaatttggctttacctagtgatgcctaggtatgtcccctagtgaaattcttgtgcgcatggcttaagagacatatgtaagaatattttaattattgttcatagtagctaaaaatccaaacaactcaaatgtctagcaactgtaaagcataaatacagttggtatatttataaaagggtgacctctgagcataaaaggaatttaagtgccactacatgcatcttcgtagaggaatattccaaaatagtggggatcaaaaaaggcagttagaaataataaatacggggtgggtgcagtggtacaggcctgtaatcccagcactttgggaggctgaggcaggaggatcccttgagcccaggagttcaagaccagcttgggcaacatagcaagaccctttccctacaacaaattaaaaaaaatattatctgggcatggtggtgtgtacccgtatttctagttactcagaaggctgaggtggaaggatctcttgagcccaggagtttacagctacagtgagttatgctcatatcactccactccagcctgtacatcattgtgagaccctgcctcaaaaaaaaaacgagtatgattctatttgcataaagtttagatgcaggcaaatctaaacaatatgttgtttggggatacatatatggtaagattataaagaaaagcaaatgaacaaacttcaggatggtggttttcttggagtgggatgaggtggtactggggaatggaagagtacgtaggaactatggtttgaatatgacatattttacaataaaattttttataagcttgttgttgaaaggaaccctgaggtgattcttttttctgaagaagacttttggtaatgcggatagtaattttttttttttgagacggagtctctgtcaccaaggctggagtgcagtggtgcgatttcggctcaccacaacctccgcctccccggttcaagcaattctcctgcctcagcctcctgagtagctgggactacaggtgcatgccaccatgcccagctaagtttttgtaattttagtagagatggggtttcaccgtgttagccaggacggtctcgatctcctgacctcgtgatccacccgcctcggcctcccaaagtgctgggattacaggcgtgagccaccgcacccggcttgcagatagtaattcttaatcttttggtacatgctcttgcacataaagttttacagtaaatatatttttcatttttttcctgaatttctttatgtcaaccttgctaaatagagagcgtgcctaggaagaagatgaaactaggagaattcatccacaagcttaagttcaatggttgtagccttagaatgagaaattaggccttttattctacctgtcttaaaattagcttattattgttaaaaaccaaagactgtttcttagtttgtttatttttattttttgttcaggagcagaagcactcttttgcccctagccctagcctgcatctgctgtttgttaaatacctccatgaattgacatctcttccttttccgaaggaatgtgaaacccaataattacacacagacctgacctactttggaagaaccagaggacaaagaaaccctagatttcttcgtctttttttaactaaaaagcagagatttttgggaggcgagggccagaacttcctgtatctattcttctttgaagagcccaactcacctaagaaatttctggctgggcatgatggctcatggttgtaatcccagcactttgtgggactgaggagggaggatgccttgagcccaggagttcaaaaccattccaggcaacataacgagactctgtctgtatgaaaaggaaggaagggagggagggagggagggagggagggagggaggaagaagagagaagttttcccttgtgtgtgctgcttgtaggctagtggacttgattctaatgaagcctttgcatgtctgctgatccggaaatatttggccttttcccaaggctctatggctttgggaaaataatgatgaaatacctatttattttttatttttaattgtcctattttatatgtttgatttttgtaaacacctcagccctttttaaaaagaaatagttggaatataaacatatattctcattaattaataaatcagctggatgactagtccaaactattattccattatcattgtcactgccctgtaacttattttagttctgtgttagttatatttacctgttgttattttgctaatttgatagtttattgtgaaaacaatttttaatatttgtctactgacattttttaaaatagaaaaaaattctcctaaaccacaatcagaaatcttttcatttgattcattaacagttactaaaacaccacaactgcgttctgggtcctaggccctgtaggggggctcacacaacttcactaaacaccagccttagcagaggaagataactatcaatatctggaatgtcaagaactagaagaaacaagataatgtggtcctagcagacagataaatgggatagattcaagaattcagaaataaaaccttacacttatggtcatttgacttttgttaagtctgcaaagataattcattggagaaagaagagtcttttcaccaaacagtgctggaataagtgtatatccatgttcaaaagaatgaagttggacctttgctttataccatatgcaaaaattaacttcaagtggaccacaaaactctctaagagttttcatagagttttatagttttagctctcacatttatgaagagaagaaaacatacgagcaaaccttcctgatttggagttaggcagtggtttcttaaatagactaccaaaagcagaagggacaaagggaaaaatagataaatggactacatcaaaattaaaaacttttgttctgcagacaataccatcagaaaattgatgacaacccatagaatggaagaaaatgtttgcaaatcgtacatctgataagggacttgtatctagaatatataaaaacttttataactcaatagtaaaaagtctaataatttaaaaatagaggaaagatttcaatgtgtaatgcccctcaaagtgtatgcagttagtccacaaacacatggaaagattctcagcatcattagtcattaggaaaatgcaaatgaaatcctcaatgagataccacgtatccactaagatggctgtaataaaaaaagatggacaataacaagtgttggttaggatatgtggaaagtagaactttctggcattgctggtgagagagaatttaatgatgcagcagctttgtcatttcttcaaaatgtttaatgttccaaaaaatgttaaaagtggaattaccatataacccagcaattccactggtaggtataaacccaagataagtgaaaacacattcacataaaaattttatgaatgttcatggcagcattattcataatagccaaaaagcagaacaaccaaaatgtccatcaactaaagaatggataattaaaattaatatatccatacaatggaatattatttggcaataaaaagtaatgaagtactgatacatgctgcaaggtgaatgccccttgaaaacattatgccaagtaaaagaaacaagtcacaaaaggaccagatattgtatgatctcattgagatgaaatatttagtataggcaaatttatagaaagaaagtggattagtggttgcctagggctggtggagggataggagtgggggaatgaggagtgacagctaaacaggtatgaggtttttttcagtcggaacaaaaatgttcagttagattgtgatggttgcactatcctgtgaatttataaaacacgttgaattttacactttaaattggtgaattgcatggtatgtgaatatctcaataaagctgcttttttttttaaataactagaatacaaagaaagcagggaaattcttgctgaggagaaatactaatgtgattatttgtcttgttaatgaatttcatgtcctcgttcgggctaaatatttgtcaatttttaaaaaaatctactttcagaaagagtttcaggtatctttaacagaagatcaacagattaaaacaaatttaaaagaattagggccaaatagtctagggaagaggagagatggatactattttaccagaaaacttaggctaagtagagctaccacagttcacttagcttttgctttctggcagtacaggccaacaagaaaacatggattccttaactaacattattaaataaaaggaaaaaatacaattgagaaaaccgatttcccagcaccacactgtaagtcaaaacttaataccctgtgacttgatatcaggttcacaaaactatgtctaaaagaaaaattcttcaataatacatttttaaaaaagatttcaaggccaggtacggtggcttatacctgtaatcccagcactttgggagtccaaggcagatcacttacagccaggagtttgagtccagcctgggcaatataacaagacactgtctctacaaaaacaaacaaacaaacaaacagaaacccctatggtggcacatgcctgtaggcccagtcgctggggaggatcacttgaggccaggaggttgaggctgtagtgaactgtgatcgtgccactgtactccagcctgggtgacaaagaccctgtttcaaaagggggaaaaaaagggttccaaagtgttctttatatggaaaccattttgattctggatataggtctagtgagtctagtgaagaaatgttgtttgttaagcgatctggttacttgaactgacggaaagcagaaagctgttgtttagtctggtatctccaacattaaatagaagtttcctaacaaaacaatttaagactgaatttgaatgtagtgctagaagagcagagcattccattatgatgtttgcagttaactattttagaatagctttagatgtgtagaaaaattgcagatacagtacagaggtcccaaataccccacggtcagtttcctctattcttattatcttacagtaatatgatacatttgtcataattaatggaccaatattagtacatccttattaaagttcatactttactcaaattccgttagtttttaccaaaatgtcctttttctgtgtcaggatcttgtccaggataccacacgccatttagtcaccatgtctccttaggtttctcttagctgtgacagtttctcagtcttttcttgtttttgatgaccttaatggttttgagtagtactggtcaggtattgtagaatgctcctcagttggaatttgtctgatgtctttgtcatgattagattggggttataggttttgagtggtaagataaccaaggtaaagcgccattttcatcacatcataccaagggcacatactatcaacatgacttattactgttgatgctaaccttgatcacctggctcaggtagtgtttgtcaagtttttccactgtaaagttctttctttccccccctttcataatgtactgtctggaaggaagtcattagatgcacatgcttttgatagcattttgtgcaattgaaaaaagtaactttgtttggtaaactaaggagcctgacatatttacttttccagtggagagcttacctatgtttacacagagtttgctggaatctctacaagtaaggctaaagcaaagcttttctcaagaaagagctttagttttgttcacatgcttgaactcttgcttgaaactgctacagttctgtactataaattatggaagagatttccttggcctagaatttcttggagatgatagttgtctaccttataaagaaccatgagctgttagttttctattactatgtagcaacctgccacaaatttagcagcttaaagcagcacacatttactgtcttacagtttccatgggtcttgagtcctggcatggcttagctgagccctctgctcagggtctcagaaggctgtacagtattaaatggactgcattgtcacctggaggcttaactgggaaagtagttacttacgagatcgttcaggtagttggtagaattgctttatgagtgaggatcccagctttttgttggctgttggctggggcttctaaagagactgatcctagagagactgcccgcagttctttgatgccacccacagttccttttcctgagggcttccgtaacatggccatttacttcattaagctctctagctccacttggaagaaagggaggatattacataaaggcatgaataggtctgtcattatgtgtgtgtgtgtgtgtatgtgtgtgtgagagagaaccattgggggccagtcatcatggggtctgtttgtcacacagaatatgacttttatttttatttttaattttttttgagggtacatagtaggtgtatatatttcataatatgacttctgaagagaatatttaattttgagtaggactgcatccagtaagtctgtcttgatgaaaattagtcacagagtacatcccaaatgttagtttaacccaatagagctggttgtagtaaaaagaataaactttacttttaaaaatattgggtacaaggttaaatggaggtaggtagagctgttcaatgcagcataccagctggggatgaagaaagaagttggaggataggtgaaatacggggatatgttttccttgtttcaaaattttgctaaagtctgatgctgtcagtcatccattcttttattagtcaattatctctgtttatatttaacaactcattaccataaaatctacttttgagaaggagcaaaacataatgaagtggagggctcaggttcttgagctcgactgtctggcttcgattcctgcctctgccattcagtactgtatatccagggcacataacttcattggtaggtgtctcagaaacatctgtaaaatgagaataatagtacctactccatagggttgttgtatgggttaagagttaatgcctgtaattattcttttcttttttttttttttttgagaccgagtctcgctctgttgcccaggctggagtgcagtgaggcgatctcagctctctgcagcctccgcccctccaggtttaagcagttctctgctcagcctctggagtagctgggattacaggcgcgtgccaccacgcccaggtaatttttcgtatttttagtagagacgggatttcaccatcttggccaagctggtcttgaactcctgacctcgtgatccacccgcctcggcctcccaaagtgctgggattacaggcgtgagccaccacgcctggccattattcctcatttttttcaagtgcagtaaagatgtcatagttatgtttaaaaaaagagaaagactcctgtttgaggtatattgaagtagttacagatgaaatgatacggtgattgggattttggagaaacttggtagagatatagataaaacaattgactataaagtaataattcttgaagctgattgatgctttgaattattttattgtctacttttgttaatatttgaaaattttcattacaaaaagtaacaaaaaaatttagtgccttgggacatattaggtgctcagtatattttacctattcttactatgcttatgtttaatatattggaattaactagtctaaaacaaaaaatataaaacaaactaaaattgactctttgagtttctcatttctaagtgagaaatttgataatggaaacatcgtcaaatttggctgacattggattatgcaacatttcttagactcggattcttggtttctgtgttcatgtctttctggtgtggttgtaatttacagtttaattaatttgacctacttgttgcccgtttcacattccatttaatttagtctgccattgtttgttctgtaagtgggatggaaattaatgtcaatattattatttagtgttcttagttttaacagtgggaaacattgactttaccaatagtgaaaatattagcaaatgccaaggcttttctgggcaaacagtggtgttatgctttagttttaatgtatttaattgaggaaagaaacacttattcaccaaggttatctcaaatgtggtaaatgcagttttctgcttattatcatatggtcctacattatatagcactgtaaaactagatgacttagggctgggtgtggtgactcatgcctgtaaccccagtgctttgggagcctgaggtgggaggattgcttgaggccaggagttccagatcagcttgggcaaaagagcaagacccttctcttaaaaaaaattaatttagctgggcatggtagtacatgcctgtagtcctgactactcaggaggctgaggtggaggatctcttgaggccaggagtttgaggctgcagtgagctattatcacatcattgcactccagcgtggtcaacggagcaagactctgtctctaaaagaaataacaaatacagccgggcgtggtggctcatgcctgttatcctagcactttgggaggctgaggcaggaggattgcttgagcccgggagtttgagagcagcctggactatagtgagacctcatctttacaaaaataagtaaataataaacagataagagaaaataaaagaaataataactaaaactaaatggcttgattactttaactaaccaagattgagagttgtatgactagtagtgattctgatttatgtgaatgaacccttaggacttaaatgtcaatttaaaaacttaaaaaagtcaaaacccaagtctcccagagttcgaattaggaattggcacagtgagaaccttatcttgataactctctttctttcttttttatagtcagggtctcactctgtcacccaggctaggagtgtagtggcttgatcacaactcactgcagccttgacctccggagctcaagcagttcttgtgccccagcctcccaaaatgctgggaccacaggcacatgctaatgtgcccaaccaatttgaaattttttttgtagagacaggattccactatgttgcctaggctggtctgaagctcctgggcttaagcgatcatctcaccttggcctcccaaagtgctgggattgcaggtgtgagccactgtgcccagctgatacctctgctttcaagtcatgtaatagatgaaaacattgaggattagaggggtaaagtgattttcccaaggtcacaaacatatcttagagatacagctggaaattgaactctcaatctcagcacccactgcattcgtctttttgctgtcacagtgatttccaaactgttctgcagagccctaggcttctaaaaagttttgtctgtaaccaggatggatactcttttttctgtcttatgtgttagggtttatgtgtgattttgttcagaaggaaaaagtttctactgctgtgtatgatcatttttatatccttcctacactctgagctccttattctgtgctgttttctacccagaaaagtacatttgattcattgaagggatttttttttacttagtttcaaaaaatgccaacttgatctcttagtttcaaaaaatgccaacttgatctatcaagaaacctgtgacccagagacctcaggaaagttgcacaaagacttttaaatatggagggataattagttttattatgacattattatcaattaacattttacttccttctagctctctacattttcattttctcatctcataaatctcattccttatgattttttggtggggatgtgttacttacggtctcttattttcctagaacaatatttatgcaaatatgtctttttttttttttttttttttttgagacggagtcttgctctgtctcccaggctggagtgcggtggtgccatctcggctcactgcaagctccgcctcctgggttcacgccattcttctgcctcagcctcccgagtagctgggactacaggcgcctgccactacgcccagctaattttttgtattttcagtagagacgaggtttcaccgtgttagccaggatggtctcaatctcctgaccttgtgatccacccgcctcggcctcccaaaatgctgggattacaggcatgagccaccgcgtcggccgtctgtctatcttaaatgaaactatttctgatatctggagattcttttggatctcattggcaatgaattaggggtcatgttaattggcttaaaagtagtattgtcataagacataaaagaggggctaatagtataatagttgggttttacttaaattgtggatgcttttaatgatttttaaaaacccacaatgttattaactatactcaatactttaatgaattgatacacagttacgacaatttcctttacataaaatccttggttctaccttagcatctttttgaaattctacacttgtactctaatgcaaatttaggaccatcagagaaggtcagtatttaggatgtctgtaatcctgctacaggaaaacacaaagaatcttgttaaatgttaactctgttatattaagcatatacttcatgtagctgtcttttgacatctgttgtggctatgtttaacctatataataattttatatttcagtggaatcattctcagttttttctatggcaatgttgtttatcagttgtccgcttaccacctttaaaataaatatcagaaatttggccaggcacggtggctcacacctgtcatcccagccctttgggaggccaaggtgtgtggatcacaaggttaggagtttgagaccagcctggccagcatggtgaaaccccatctctactaaaaatacaaaaaattagccgggcatggtggtgcgcgcctgtagtcccagctacttgggaggctgaggcaggagaattgcccgaacccaggaggtggaggttgcagtgagccgagatggcgccactgtactccagtctgggagacagagcgagattccatctcaaaaaacaaaaacaaaaaaacccagaaatttaagaattaattaatgtttactattagacttccagggattgatttaagttacttaaattacactattcatcacatgaaatgcaaacattcattatggaaataacatttgtttgacttgaaaatgtgatgattactaaatataaggaactcattgaaactggaataaatgcacaagccatcacacaaaacattccattttgaaggaatcccagaggggcattatctgtcagcgctggtagtgtgcacctgttcttcggaaaacaccttggaaggtagttggtgccatgttcctgatgggcacagggaggctggcttcttactccaggctgctcagggaagatagtctggtatcataaacatccagacaagaaatgcatgatttcacaacgatgcaccttttgacaaacaatgagcacactactgacatccgaggatgcattacaagtgagactttcagaaataggaggatgaaatgcagtctgaaaatggatattgcttcctgtttttccttagtcttcattgtcaaataattgggagatgtcaagagatgagggtttaggatagtttttcaactgttttctgtttccttggttcactcagctcctgctacttcacgcagactgtgttattagtccttgagggcatattgatataatttaaaacaatttaaaatatgaactgttgctgattttgttcaacaggaacagcactaccattgtaaggttagcaagatacccaatataataaatctccataggggaagtttaagaaaattatgttacggcagttgagttcagctctcttttcagctggagccttaagtcttggagcgttctaggttctacatctaaatgtgcttaacagtacacaggcttcttgacaaatgctgttcttgggaagagtacaatccttctgtgagtctgtgttatttttacctgtgagttggcattccaggaaagagtagcatgtactcattaagaaaattcatcttaaaatttattcagctttttgtcttctgacaaccttgtattttaggccctattgccaagttatttcccgtctttctgtcctgggactaaagtttctttttttcttttctttttctttttctttttctttttttttttgaaacagagtcttgctctgtcaccaggctggagtgcagtggtgtgatcttgactcactgcaacctccaccttcctggttcaagcaattcccctgcctcagcctcccaagtagctggggctacaggcccacgccaccatgcttggctaattttttttttgtatttttagtagagacggggtttcaccatgttggccagactgatctcaaactcctgaccccaggcagtccgcccacctcggcctcccaaagtgcaaaatttcattttttatagtttaatttcccaccataactttgacatttttctttggaaataaactacttttttaaaaatttcaaaatatttctataagttgtaggttgaacacccctaattcaaaaacgaaaaatgcccccaaatcttaaactctttgagtgccaacatgacaccatgtggaaaattctatgcataagcacttaatacaaacttgtttttaatgcacaagattatttaaaatattgtgtaaaattaccttcaagctatgtgtataaggtgtatatgaaacataacgttttggataagggatattcaacctgtattgttattcttattatttttattgttttattttttgaaatggggtctccctctcgcccaggctggagtgcagtggcgtgatcacagcccactatagccttgagctcttggactcaaatgatcttcccacctcagtctcctgagtactaggactacaggcatatgccatcatggctggataatttttaaaaaattttttgtagagttgggggtcttgctgtgttgcccaggccggtctcgaactcctgggattacagcatgagccaccaggccggcctattttgtcattatgccactttcttagacagtgttctttggttgccattttgaactattagaactgccttgttaaaccatttagcttttgcccttttcttccccagatccctaatacttttctgcccaatcctttctctctattcagagtgtttcctgtttgtcctacattctctttctgtcctccttctttcctgctcttccctctttttttttttgagacggagtcttgctctgtcacccaggctggcatgtagtggtgtcatctcggctcactgcaacctccacctcccaggttcaggcgattctcctgccttagtctcccaagtagctgggactacaggcatacaccaccatgtttggctaatttatatatatatatatatatatatatatatatatatatatatatatatattttagcagagacgggttttcaccatgttagagaggctggtcttgaactcctgacttcaagtgatctgcccgcctcagcctcccaaagtgctaggattacaggtgtgagccctgcacctggcctcttccctctcttttttttagggctttgaggcatccttttcaacagctccttaaccttaaaattaagccatcaatcccattctaagtatctccctcttaaacttctgcaatttgtttaatctgaaataaacacctgaaaatagaaaattgaatatctatattttgtaaataatcctgattgacctttatttttattgtcaactctcttttcctccactccttttttttaaaaaaaaaaaattgttgaatacatttaagtgataaacctgtaggacaagagttgatttaactataaaacattgttggcactttgcaacaataacaatcatgtcagtatgcctgagagagttgctcataatattggagacactcgtaggcttctgttttctgagagggtaaatgtcaaccagatgggaattactggaactgagaaatcattttctttttgtctttaaaaatttctcttctatatcttgaatttcaagtaatcacagaaaatttcctttgcttcagataccatttactaattttgcacagtataccattttccaacttattttcccactttcagtaaactttctgttctctatccagacattggaaatgcatgaactattttacagtcaccattcagtacagcctagagggcagaaaaataaaagttcaaccactcacctaaaaagcactatacattttattgtattttattattattattattattatttttgagatggagtttcgctcttgttgccctggctggagtgcagcggcgccatctcggctcactgcaacctccgcctcctgggttcaagcgattctccctgcctcagcctcccaagtagctgggattacaggtgcccaccaccacacctggctaatttttgtatttttagtagaggtggggtttcaccatgttggccaggctggtctcgagctcctgacctcaagtgatctgcctacctcggcctcccaaagtgctgggattagaggcatgagccaccgtgcctggagtgctatacattttaaattatagttgttaaccactttctgtggagtttattgaaagctgcctgacccttatctttgctggccatgtagagtccttgtgtctcgagttggctagcatccttgcatcccagccattccttaggcttgacagctgcatattttcccagaaacagttgtgattggtgtgtataatgaatagaataacctgttctttccaaatatacatccctgttttgccccttagtacttgatttgactaattgtttcaagctgaaatatagacttcaattaaaaaattggaagccaggtgtggtggctgttgcgtgtaaccccagcactttaggagactgaggtgggaggatccattgagaccagcctgggcaacatagtgagaccctgttgctacagaaaattaaaaaatatatattatccaggtgtggtggtgtgtccctgtagtcccagctactcagaaggctgaggtgagagaatggcttcagcccagaaggttgaggctgcagcgagctatggtcgtgtcactgcactccagcctgggtaacagtgcagacgttaggatcttcccaagaatgtggccagcctacatcctgaccttggtcatgtggcacgttattaatcatggccatttaatgtgtaacaggttgcattcaagagcctagcttgtgttggtttggggttcttttaaatttgttttctgttgacaattctattttctagtaaattttaaataaaaatgttttttcattaaggctgattccaaaggtacttaagttcctttctagccagccattcttagctgggtcctgtgaaagcattatgccctatagaaaagaaaattgagtgactattttctcagttctcccaaacatggtactattctagatgcattgaagagaagtcaattcattacatacagtgatgctttaagggcagttgttctcagagtttgattcagggatgtcatagactccaatactgtttcagtgggtcccctaggtcaaaaccatttttaaagaaatgccacaacattattttcacttttcattcatagtctctcacaattataaaatagagatttccagagactatgctatgtatgatgctgcaattgctctgatgaccaaggagatgtgtggttgtatacacgtgtcttttaaatttttgtcttaatttctgatttttaatttgatttctaagcaaatattgaaagatattactcacataatcaaaacttctttgaagtttctcctaacttttaagagaaggagtcctgagaccaaacagtttgggaactgctgtcttaaggctgtaagacttaattctctgagagaacccctcctgggaatggctgcacacaagggcagtacagtaaaccagtcagttgctcaatagacattttaaaaattgaattaaattgagctcctagaatataacttttgagaccttatttgagattttctcccaaggcaatgtttgagcattgagagccttgtaacttgggccaggtttctgtgagatagacagttggcaattctcaatatcaagtcaatgatttcagaagtcattttcaaggaatacgtcctttaactggtagattaattatgtagcctgttggcattatgtggatcagtgccgtccaagagaaagagggcacatatattatttacaatttttaaataatcatattaaaaaagtaaaaagtggtgaaattagttttaatatcttttgtttagcctaatatatctaaaatattataatttccacatgtaatcaatataaaaatgtatcagggagatagtttaattcttttttatattactatctttgaaatctggtatatattttacatttatagcgcatcagtctggatagttacacgtggctggtgcctactgtattacactgtacagatctagatcataaaatagttgtagagctgagccgagaatgttctagagtagataagctttgtcataaaaatagagaataaaaattttgctacagaagttagtataaaaacataaccccattgaaaaaagcttacaatgacaaaatgtttgatatctgcctaaattctaaagacatttctaaaagaaatagagctctttccttaaaacaaattttttaaaaaaataagcttttcttcaaactgtaatgttttctctttccttctaaaaagcatgcagtctgctcactatattctttgaaattactgtatgttcatctgcataccagtgtaaggagatcctctttctcgtcttggaagaatttgagcccttgtgatctttgcatttccctcctacgtagttctttcttgaactgtccatttgtcctggcatatccctgaatccgtactatctgctatagggcatttatttctgatggggaagggtggtttgttttgatcttaatgctgaactgtcccttagttcattgtcttttactctgttgccgtatcttgcttacaaatatggtgtcagaatatgcaagtgaatttattgcctgttgtgaagaaaccactatttttttcagcttcattcactatgaacattattgtgcttacaaaagtgagttgagttaaaaagaactgtgttttttagaagtgagaattaaaagggagaaatagtaatttttcctctcatagaatgaataataaagaactatgactttaaatttggcatgatctaaatttaatttttttcctaccacatgccaattgaaacagaagaatttgttgaatgggaatgtcttgagtagggaaattaaggactctcacaatctgttatctctttagtagcatacttgatacagtgtcatgtttaattaatattagaatgtcaatttacaaaatcatgctctttggaagataaaagaattctgtgtagaacaggcaaacttaggaaatatatggtctcttggtaacatgttggaagttttctgctttgttataattttcatatgtaagtacaattaggagatttatagattttcaaccccaatataataacattctttgagagtttatcttttctttacctactgatttacctttgttgtggacacattcagtttttcaagcaactggtgtgtactttacaccaaaacctttattatatagtcttcagtaatctgtagctgtgaaactcatactcatttatctgtttagatattctcaaaacaatcatacctgtgtgccagccacctgctgtctgacttggcagtttctctgttccaactttatttttctgctttttagaaaactcccactttccagtttgcagctaaggtaggagctgagttcctttccctgttaagtggtcttatcaggcagttatgccattgccaagcaacagtaagttctctcctctcaggtgttagctagtaggtagggttggcaaggggagcctggcctgctgtgaagaagtagaccagtgtctctctgccacagccctcagggtcgggtcttgctgtgggttccatcctatggctcactgtgactttcctgaatggaatgcgtttattttttttccagctctgttctttccatgttcttcccacatcagctggcggcagccagttggttctgaatgctgcccacaaattgttagctattttgcttcttggtccctcaatttgtcccttgaataaggaattgatgtgtttcagatccaggattatgttgcttagtgaagcaaatctaatccttgccaaggaatgcctaaagttgaaggcttgattccagaagaaaataaaataacaacagcactacctgtaattaacatatattgcctgtttactgtgccaggcattatattaatcaggttgcatgtattagctttgttaatccccaaaatcactttaaagtaggttccattgttgcccacattttacagatagggagccattggaaaattaagtaacctgttctaggttatatattaagggatagttccaagattttgaatctaagtagcttgtcttcagagtccttgctttcagtactatattcaactgctaaataaagcttcactttggtttttttgttttgttttgtttttttgttttggagaaagtgtctcattctgttgcacagattgcaatgcagtggcgtgatcacggctcacttcacccttgctaggctcatgcaatccttctgtctcagcttcctgagtaactgggactacaggcacacactaccacacctggctaatttttttattttttgtagagatgaggtctcactttgttgcccaggctggtcttgaactcctcgcctcaagccatccgcctgcctttaactcccaaagtgctggaattacaggcgtgaaccaccgtgcctggcccaaagcttcacttttcaatgtcttctggaatctgaactctcactgaagagtagacaggagtttgatgttttaatctattaaaacttctttgtacgtgccttctaagaacagattatattcaatgcaatttttcctgaaaagatgaagtacatttgtttgtaaaattcatgtatgtatgtatttatttattatagtacatatttatggggtacatttgatattttgctgcatggatacaacatgtaatgatcaaatcagggtaattaggatatccattaccccaaacatttatcatgtctttctgttggtgacatttcaaatctccttcagccattttgaaatatgtaataaattattgttaattatagccaacaaaaggcattattgctagtacagatatttcttgacttatgatgggttacgtcccaataaacccattataagttgaaaatatggtaagtcagaaatgcatttaattcactctattgttatctacccacgtgattgtgtggctgactgggagccacacaatctctgtttaccattatgaagatcctattgcttcagaatgcaaatgaaatttagagtgagtgccttgtgaatcagggaggccccactatatgactccctgtgatctcttggaggtgaaagaatgcacaaatttcataagttaacctgaaggtcacccgcttttccccagttacattgtacatgccatcaattagtagggggtgggcagaggtggaagatttcaggcacaggccttagacagttgatgccctctgttattaaggtaaataaatcctagcagttcttcccaccttttgcacatcatggcatgcacagaaagttgagattggaggtgatccattattgcttgtaacccatttccaacacacttgtttggaagttctttttttttcttttgagacagggtctcattctgttgctggcacgatcatagctcactgcaacttcagctcccgggatcaaactgtccttccacctcagcctcctgagtagctgggactacagacacatgctaccatgctcggctaatttttaaaaagttttttagtagagatggggtttcaccatattgcccatgctggtcttgaactcctggactcaatcagtctgccctccttggcctccgaaagtgctgggattacagctgtttggcagctctgctatggggatatatctgcaagtttctaagcttgttatatttatgaaagcattctgtacattacaaggtgccattcacatgtaagattttattaataatgactattaagaccaagctatttgttctaggaagagacattgtgtaccatgattttttttgttgttgttttgggagctgtcctgagagaagcaggagcagatgctagaccagttgtggagttaaggtcttgtatgtgatctggtgcagtaatgaggagaagtagaaatgcaggtggtcaagggttatattatccaagacttcttacaggaaaccaagcagctggtgagatcctcattaaattctctaccttcttctctgcctatcccagttctctctgtagtgaaattctgctttctttgtcaagtctttcccagactttttctacctcttctcctgtaggtgaaggtcattcaccatcctctgtctgttgttatacctggtacatagctccattgcttgtacttccaatgctgcattgttttcagttccacacatcttttttcctttttagactgtgatctccttgaagtttaggctgtgtctgattaatccttgtagctccagccacacccagctcctttcatcacactccctcgttaggcatggcttgaatgctctttgagtacagctgaaatttatctccctgtgcctttctcccgtgggtcctcattttaacacctgaaacagcttcagataaagttacttttatgccagccatttatacatctgaataatctgccacgtatggctccaaacagtctttatttctctgagctaaacatttttacttttgtaattttgttttcctgattttttcctcagtaagtactgtatatgttccctttacctctctggtgcatagaatcttagaatgttaagatttggagaggactagagtttgactagtctaggttcttcatctaaccagtattgcttccatactgattacataattgaaactgagatatagacatattttggagcaacacaaatattttaagtatttcactgaggaagtttagatttagtaaatttttaaaagtccttcatcgttcattcttcattaaaatgtatttgctgatgagtatcttattaaaagggggcacattggaaagatatgttttatgatgcagtgcatgtatgctaaagaaagatcttcagattcttataacattcttattaagaatttgattctaaagccaagctacctaggcttcaatcctgcacctgccacatactaggtgtaaattacttaatcttgggttaattacttaatctctgtgtgcctcagtttctgtatttctaaagcaaggttaatgataaggtgggtgttaggaggtttaaatgagttagtacttccaaaccactaagagttatgcctggcccatagtaaacatttcgtatatggtagatgctgctactgctgctgccaccaccatcactgctactattattattattattgagttctacaagcatctggtgagatgtgtaaagcccctgtgaaagttctcatagaaccttagtaagacaccatgtatttatgatacaagcttcttgcctttttaaaaattttttattttatttaaagcttcttgtcttaatgagagaccctgtataccactctgcactgaaacatgatttgacccagaccgtaacgacatctatggagtaataaagtattttttcataggattttaccgtataagcaattgaagaaatggcagaagacccattagcttttggagtctgttcctttgagaccaacttgctaggaatccatttcctatctttttaaaaagagtaaattaattttcctcattgacattctgtaaacagaatactggcagcttatattttatggaacgtaatgttttaaagtgaacctaatttttcttagtaaactgcttttaataatgcatcagagtaatttttttccctctgttgtcaggttgctatcaagatcatagataagacccagctggatgaagaaaacttgaagaagattttccgggaagttcaaattatgaagatgctttgccacccccatatcatcaggctctaccaggtaggatcattagtgtatagcagatagctgcaaagaacccagaatattgtatgtatggctccctttgaagaaatgtgggtgggtgaacatctgtgactttttttgtttctatgttaatcctgctatctttcctacccttctgtttacgcgctcagcacttagtatcctcaagtttcccctggccatttactagtacgttttccttacccaggtaggtctttttaatttgttctttaaaatttgatgccattcttagcaacaactacacaaaatgttaattcagaagatgatgagaatttattttatttagttcagagttctaacacaggatgggaaactcaaaaagaagagaatttagagaggtgaaaagttagagatgaatataacatttttttaatagcattatttgaatactagtttctgtgatcatgttataaattgttatggcaaaggactgcttcttggatcaatcaaaacctacctcttttctattctaataggattgtagacttagttttccaaggtagtaattattttgataatcaagagaccagatcaagtgaccagatctctccaataggagagatttctattttagttttttttttttttggtcttcccaagaaacatgcatatttcatgccatcatcaaaatgattccctagcataactacaaaagcagtaaatctgatggctggaatttcaagcgggataggaggagaggaccttgccttagcaggctggtgaaagagatattttgggagaggtggggcttcgggatgcttctcaaattgcaatgtgttggcagccgagaactttgcctctgcataggcccaactctacttgctgctttctgccagaacagccatctcttagttctgaaggacgtggccacccacttggttattttgctgctgttagtctgcagtaaatggttactggcccagacataggaccatgtgtaaaagtggagaaagtacacccaaggctctatgggcaagctttcgtagcctcttagttttatggaaaagaaaacatgttgtgatattaacatgtgtggttaaaactacagcgttagagctcttccctggcatcagctgctcacataatgaaattaggtcaacaggagcagacctgttgaaatttatcagcctaaattatgttgaacaacgcctaccttctgccccacaagcaaacttatgaaagcttcctggtgctgcctgaagacctatatctgtgagctcacaggtgtctaacctcagcttccttcctatcctgatgggctgaataaatttcttgaccttaccttttaaaataaatcatctttaaataattgtggggcttaggctgacctttctcaagaggttgacttatagctattacccttgtaactgaattctgcaagtttgcctgtcttacccaagattagcctatgaggatttccacaggtccagtgctagctttgagcagtgccttctttcaagctttaattttgctttctggcagctgggttttttaaattttatttatttatttatttatttatttttgagacgaagtctcactctgttgcccgggctggagtgcagtggcatgatctctgctcactgcagcctgcgcctcctgggttcaagtgattctactgcctcagccttccaagtagctgggatcacaggcatgtgccaccacgcccagctaatttttgtatttttagtagaaacggggtttcactgtgttggccaggctggtctcgaactcctaatctcaagtgatccacccacctcggcctcccaaagtgctgggattacaggcgtgagccactgcgcctggccggaactgaatttttaattgtatttagttttaattaatttaagtgtaaaactaaaaataattttaaaaagaattgttgaaatgatagtattttggatatattggggtaaataaaaagtagtattagaattatcttcaccttttcctttttcctttttaaatgtggctactagaaaagttaaaataatatatgcagttcatattatatttctattggacagcactgttgtagaaagatatacaataagcagagaacagtgttcctctggggattgagatggaggagattgggaagaggaaagcctttggtcttttgttttataatgagtgtatgtaatcattattacttttaaaaatgtttgatggaaaatgtaaaaaggaagaaaggactgacaacatactacaatgaattttaaaaaggagcaacaaagggaccaagacaaaacacaaatcacttacgttactttaaaaggttgagtattttaaattactgttctctttttttcaaataaatgggcagtggaaaggaaagttgtcatttctataaaaaaaagaaagacatatgtgatttctgtggcgttcttatgtgactcccattattttccccaaaggcttctttttgctttagtttttttttttttgatttgatagggcatttttgtgcttcagatgattgatgttgaatctgaagtttaagttttggttcttgacaacttctttgcctctcagttttatggagcttaagagattgcagagacctcatggaacatcaaaaagcctatctctctcaagcaataaatgtttcctacttttaagaacttggaggaatatctaattttccctttcttcttaataacatttatatttgtttccccaaaaatgttttaaattttctttaatctatagtggttattaatatttcaaatgagaaaagaggagtcattagtttatcttcctgtatcagcctgtcatttgtgtcactgtctgtcactttcctgcctttgcaccaggttatggagacagaacggatgatttatctggtgacagaatatgctagtggaggggaaatatttggtaagtacatttattgcattctttaaacagctattgagcacactatggcaaacctaaaatagctgttcagtgcctttgtcacttgagcagcagtcacttgatgctgttcttcaatcctgccattttctatcaacaaaggcattttaatttgttttgattaatctagtaaaatccctttaacacatttgtttccttagcaaaggtgttttgtttatttcagtcaggcgctgacagttgagattaaagatctccaaaaacaagcatcctttctgaacgtgggacttagggtctttcctgtttgcaggttttaattgaggttaccaagtgcgacagaactcacacaagtgtgtgggcctctgttgtgtcagaaagagccacttagagcacataatctcacccgagtgcgttccttaaactttgtttaaatataacatgtaactatattatttaccatgtgttcacagttcccctcagtaattcttgtaattttgggggttctgccttcagtagctatattttcctctcacacttagctttagcacaatgtcagaaataagcaagagactttgttactgacaaatctgatttttaagatgctaaaaactgacaaaacgattttttttctaacagtgataaatggagccaagtagagttaaagggtaaacttccaaatctaaattgatgtgtcttttattttttcttttggcaactaactacagagaaaagtttctttatatactttatttgtctaatttcctcattttaaaaaaaatttatcaatatgaacacttgctagtttaaaattttttaatttttattttaaacatttgctccttcctgcacgataaaatgtatttaaaagcatagaatcacttttaaaatgaatcttcttattaatgactagtcagttgtggctgcatggatgtgtgtgtgtgtgtgtttgtgtttttaaagtttccctagcgatctagtgtttttttgtgtgtcaaagtatctttagggtaagtgctagtcctttttaaaagaggtatcattatttcttaattttatatttaattggctttgtatatgtgattagttaatgtcaaagctaatggtgatagaaatttatactcaatatagtatgggaggggatactttattttaaagaaatgaaagcattacaagatttgaaggatagcattgtttgtcaagaaggtatagtaggccttcactatgtatgataattatatgccaatcatgtgccttggagatgctgactcaattaagacactggttttcctttccgtggagaaatctggtggaaaacagacagggaaatcaacatattactttgaagatgagaatggaaactgtaaaactctgtatagtagagaacagtagtgcagatggcagtttggttaactcttggagatcagggaaatcttcctggagggcatggttatatggaaatttatgaaccagaaaatgaaagcacaagagagaatatttggagagagagaaatagcagtcatgttattgggagactatactatggtctgacattccaggcacatgttatgataaacctgccttaattaagatcacaaatgtatacaaaggcaaatagaaaactttcattatctagataaggttttttctttggacaaggtattgctctgctgccctggctggaatgcagtggtgcaatcctagctcactgcagcctcgaactcctgggctcaagtgatcctcctgcctcagccatctgagtagctgatactatagctgtgcactagcatacctggctaatttttaaatttttagtagagacgggggtctcactatattgttcaggctggaagatacctttttacaagttttattctataaaaagtcaaacatctcccaaatccttgagctgcctgttaggtattttatttcatagaacgacatttattggtggggaaacaatggtaatttggggagaaaaaagatcatgtcatcttaatgtttgtaataaaaaaagacccaaacacagggcacatcaatctaccttactctttaagaaagcagattttatttatttatttatttatttatttatttatttatttatttattcttttttgagctagggtcttggctctgttgaccaggtgaagtgcagtaacgggatcacagctcagtgcacccccagcttcctgggctcaagtaatcctcctgccttagcttcctgagtagctgggactgtaggtatacaccaccatgccaggctaatttttaaatttttatagcgattaggtctcattatgttgcccaggctggttgtgaactcctgggctgtagcaatcctcctgccttggcctcccaaagtgttgggattataggcatgagctactgcacccagcaggaagcagtattagagagatccgtttcttggtcctggacttcatgtgaatgtacctcaagggatgaacaaacagaataccacttctgataatgttattttaaaaacaaaatattttaggttggtgaaaaagtaattgtggcttttgtcattgaaagtaatggcaaaaaccgcaattacttttgcaccaacctataattatatattgtaacacatattatgtaatatataacaatagaatttgaaatgttattattgatactattaagtaatattattataaaagatccagatgtggaagaaaatagtgtattacctaaagaaattattgagactgcacagggatagaactgtctcatgagctctgatttttaaaaatgtctgtgtaaaaaagatgaaaggggcttagtcaagaaaacctgggctttggatgtatttagacctaggtttgaatcagatctctgtcacctatttgcccttttacttagagcaaattactagatgattctggtgcacaggttccaggtctgtataaggtaagatctagaatatttgtattatagttgtgaagattaaatgagatcgcatatatagagctctagcacagtgcttccttacgccttcatgtgagagagagatcaacttctgccgtcaaggtgtgaggagctctgctgacctgccttgcttgctgaaacaagtgaaaactattaaagaaaacaaaacccagtcatttaaagtctctggaaatcgtcctaagagtaagcagaaaatgaaggaacattattcaagaacatctgtgcaaattcggtaagaaacaaagtctggtcagcaaggtggaaattcccgtccaggctactgcagccaagaacgcagggcttccttctgtcaaaagacaaaattgcaagtttagtttgatgatcccagttggctttatttgcgattctagaatcggacaacatttcatttcatagaataagtgttccagtaagttgagcagaagagtttggcttatggacagaagggcttaagaagtctgaacagtgtattggttacttttaaacagaacaatagaaaattaaccagttaacatcaggttacttcgggctaccttttttagtaaggattaaagcagagggaacttcatcattgtgccagttaaagattttagactgggctgtttgggaaattggctgttatctctttctcctgatttctcaggtcagataacaacctagttttcgctttggaactttagcatgagtgactccattttgatatttagtttggtctgttggtgcctagtgcagaagtttattcgaaaacaatggtctcctgtaatttttatttgtcacttctcctcaattctctccagcatctgaatagcagctttcttcccaggaggatttggacatcagcaattctcattctgccccgagctgcctattgctgagtcctggagaagtgcagttaagagatgggggccccttcttctactcagcccccacttgtggaacttgatcaggtatgccgagaatactaggacccagatcactcttgccttgggtattaagacagtggtttcactgtcttttgctgctaggagaggcaagctgagaggaccccaggctgctgtcctcccccgctctccatccaccaaactctcagttcctagagtgggagcgtcactcagagaagtttgctgttgtccccaaccccagctccagagccctaactctgagatttttacctgtggagaaaaacaaaccataaaacagctcctaatttcttcccaaaggaactgacttcatttgcaacagggagtgaagaagttcaaacctgattgtactctcaagaacagtagagggaaaagaaaaaagaaaaagaacagtggaggttgtggtaaaggacatttgagaagagattcatgaaacaggccaaatggtaggtttgctagttcgcagggggagaaccaatgaattaatttagaaagagcttctctgggattagaatgaaaataaatcactggctgggtgcacacctgtaattctagctattcaggcaggaggatggctcgagcctaggagttggaggtcagcataggcaacatagggagaccctgtcttaaataaaaacaaaaataaaacaaaaaaacactgatggcaaaaattatttcttcaaaggaaccagaatttgattgtattgtttgtagaccaatttgtgccccagggcattattcaaaacaaaagggcaatcagccagcaactagtggagtttaacggctgagtatggtcagtaaatgagaggaagaaagtcctagcaaaaacactgtgatcccaaggtaactaactgtaggcataccgaagctgcctgttccagaggaatcacattagaggctgaacactgtaaatatggagaaataaacttcactagaagaatctagcttttagctgggcatggtggcatgcgcctgtagtcatagctccttaggttattgatacgagatctttctaactgtgggcattttacagctataaatttctctctaagcatgctttggctgcatatcatgagttttagtatgccgtattttcattttcattcatttgaaagtattttctgaattcacttttgatgtcttgtttcattatttatttattagtgtgttgtttaattttcacatatttgtgaatttcccgaatgtttcctactcttgatttccaatttcattccattatagttggttgtttttctatcctctatttcataatttctgctataatatttgttatttccttctttctgcttgcttcagttttagtttgttcttcctcttctagtgtcttgaagccaagcagaaagaaggaaataaagattatagcagaaattatgaaatagagaatagaaaaacaatagaggatatcagtgaaaccaaaagatagttctttgaaaaaatcgacaacattgacagatctttagctagattgacgagagagagaagagaaaaagagaagactgaaatgactagaatcagaagtgaaagaaaggaacattactacagtcccttaagaaacaaaaatgggctgggcatggtgactcacgcctataatcccagcactttggtatgctgaggtgggaggattgctttagcccaggagttcagtaccagcatggacaacatagtgagacctcatttctactaaacataaaaaattagccggatgtggtagcatgagcctgtggtcccagctacttaggaggctgaggcaggaggatcacttgagcccaggatgtcaaggctgcagtgagccatgattgtgccaatgcatttcagcctgggcaacagagcaagaccctgtcttaaaaaaaaataaaaatgattataaaggaatattatgaacaactatacatcaacaaatcagctgggcttggtggctcatgcctataatcctagcactttggggggctgaggtgagtggattgcttgacctcaggagttcaagaccagcctgggcaacatggtgaaacaccatctctacaaaaaaaaatagaaaaattagccatgcatggtggtgcacacctgtagtcccagctactcgagaggctgaagtgggaggatcacctgagcctaggaggtggaggttgcagtgagctatgattgcaccactgcactccagtctgggcaacagagtgagaccctgtctcaaaaaaaaaaaaaaagtcagcttagatgaaatggacaaattcctagaaagataccaactgttgaaacaactgacttaagaagaaatagaggccaggcacggtggctcatgcctgtaatcccagcactttgggaggctgaggtgggcagatcacgaggtcaggagatgagaccatcctggctaacacggtgaaaccccgtctctactaaaaatacaaaaaattagctgggcaaggtggtgggcacctgtagtcccagctacttgggaggctgaggcaggagaatggcgtgaacctgggaggcggaacttgcagtgagccgagatcgtgccactgcactccagcctggacaaaagagcaagactctgtctcaaaaaaaaaaaaaatacatacatacatacatacatacatacatacatacatatatatatatatatttccctagctaaagtaaaaaatggtgttctggttgcaaattgatagtctttacttcatttgacctctttgtagcatctgaattcttgactgtttccttctaaagctcttagttttgacttccacaaatgttcaacttctgattcttctattgttcggactgttccttcttagtatcttttgctgggcctcctttctctgactgctagaacatgttgacatgttgtagcatattctctgactttatatatatatataatatataaataataattatatataaaatatataaataattatatattgtatataaataataatttgtatataatatattatatataaataataatttatatataatatattatatataaataataatttatatattatatatatatttttttgagacgaagtctcactctgtggccatgctggagtgcagtggcgcaatctcggctcactgcaagctccacgtcccaggttcagaccattctgcctcagtctcccaagtagctgggactacaggcactcgccactatgcccggctaattttttgtatttttagtagagatgggttttcaccatgttagccaggatggtcttgatctcctgaccttgtgatctgcccgcctcagcctcccaaagtgctgggattacaggcgtgagccaacgctcctggcctggctagggaaatattaataaaatggcagaggtggagacagatgttaaagaagtggaggcattgggtgctattttgagaagcattgctctgaaggaaagaagggagaagacagtagtttgtacaggaagcaaggttgttgggagagagttctccacggatatctcacatttcttcatgtttcatgagtaaggcactgactgcctttgttctagactgttttctcaaggatgtttatatagtgagcacccttgaaagacagagatagtatctccctccacagctcaaagatctgtttattgcccagtgtgaaagattccctaagctccaagctcagggttcctctcctataatggacccgactgtgtgtgtaggcgtcatctggtcccctttgcagtgccctgtgaaaattagggcttggggaactgaagcaaatatgttgatgttcatgctgcttgctgtgccgtaagtgacaaagtcttttgtctctgacagaggggtttcctatcttctgccatcacccatgtaattgtggcaggttgagttattagcttgcagaaatggtgagatctcagaccctcttgatacttgacaggaaataaggaggggtttgttttattttgattcgtttaaatatgagacttgattacaggttgaggttgaagatgcagtagtggggaagatgagtttgaaaataattgatatggaaaacaatctctaaagcaagatcaatgaggaactgagggatgagcataattgcaagaaattagccttgcacatgaagaaggatagaagataaaggatgcatgtgggtgtaggcaattttttaggtagaagaatgtgaaaaagatgtttcatgcttttcatataattttctattgagagtagcagattatgttatcagatgaattaagggtgagagggtagagacctggatcagcatggagaaagtgaaattagctgcagggaggaatgagagagagggcaattaagaatagctaaataagttgattaaaggccttagagataggaaacagttaacttgttattccattatacagaattgagtgatttttttcccctaccaccaatgctcaattacctgtgtgtaaattgaataagacagacaattggactgatcctgtttagagtttacaggacatgtgcaaatgaagaggcaacaggtgacaagggttttgaggccactagcaataatgtaattaaagtgtgggcttttgggcttaggctgaagtgggttgggaaggcaagtgagaccaggatgactgatcttaaataagaatttttaaagctggctgggcatggtggatcatacctctaatcccagcactttgggaggcccaggcaggcagatcactggagcccaggagtttgaaaccagcctgggcaacatggagaaattctctgttatttaaaaaaaaaaaaaaaaaaaaaaaagaattcatgaagctacaggtctagatgaagttgaaaagcaagtgtgttagtgtgttgggcatatgaaggttggagagatgaaagtctaaaactacactgcccaacacgacagccactgtccacatgttgctgttgtgctcacgcctgtaatcccagcactttgggaggctgaggcgggcggatcacgaggtcaggagattgagaacatcctggctaacatggtgaaaccctgtctctactaaaaatacaaaaaatgagccaggtgtggtggcggacgcctgtagtcccagctactcaggaggctgaggcaggagaatgttgtgaacccgggaggcggagcttgcagtgagtcgagatccagccactgcactccagcctacgggacagagcgagactccgtctcaaaaaaaaaaaagaaaaaagaaatgtagctagtgcccctgaggaactgagttttgaatttaatttacatttaaatttaaaaactgaggtattatgaaaagttttaggccagctgtgagagttagccaactacagactaagagagcatagtctccaagatcacccctcactctgctgtcacctacaagttcaggaaattcccaaaaccggttcagtttgataaatagctagaaggattcacaaaattcactgaaagctaatatactcccggtttggtttaatacaggtaaaggatacagattaaaatcagccagggaaggaagtgcagagtccaggagaagtacgaaatgcagaacttttgttgtcctttccatgtggatacaagatatgttacactcctggtattgatgtgttacattgtgtacagagcagtacccatcagggaagctcagcccagcctctgtgttcagtgtttttattttacataagcctgattgattgattgattgattgctcacatgattgatctgtgtgtctcggtcaactgatgctcgtgacccaaagcccacacgtcaagtcacgctgttgtgcagccaacaatgtatatccagcctctaccctgagactatatgggtgtggcgaatcccagcctaaatcatgttattagactctctggcatgacccaaggctcccagacagagacactccgagcagacataacattccaagaacccagagactgcttcccagaagccaagggaaggccaggccttctctttgggtaaggccaagttcttcactctgcagagtctaaaatatttttctattaaacgcaactcttattttgataaaactacattacaccttggctatagacaacttagtattttagttgtgatacgcttataaagtataaaatacacagtggattttgaagacttactatgaaaaaagaaggtaccctatctcattgctattatttttattgattacattctgaaatgatcttttgatgtatttggttaaagtaagttactgattttcaaaatgagtgctttttttttttacttttaaatgtgattacaagaaaatctgaaattatataaatggcacacattgtattttatttgatagtgctaatttagaaggttaagataagagagggggaagtttagaatttcagagttaaaataatgtcaagcaaagacaagttcaagatgtggccataggaatagttgctatacattggtagagttctaggtcaccggagagaaagaaggctaaaggaaccatgaagcaaactgtcaaataagttatcctcattgatgttcacattccctaggtgatggcagaatttgagtggagggcgcaatagactacaaactaggtttcggtgagtgtctttgatgaatgtgaaggcaagagaggcagaaagggagtataccagctgcccaaacatatggcgtagtattgttagtggagaccttgaagaggttacattaattcctaatccctggtggaatattgtccctttttacctcaagaggcctgtaaaggaattgctagtcttagaggagttggttggaaaagtgattatcaatgggaggtgttggccccgatgtaaaagccctgctgcccttctttgccctctttgtccctccttaacttttgtgacccatctcaaatgttattccccctgtgaactctgctctgattttgccaaatagctaattacctttttttcttcactttgaacatacctctcctatagcactttttgaagtaattttttttttcatttctaagtttgtcttttactggtaatttagactctggtccatttctttttcctttgactattttccaaggggcttgattgaatccatgaatgtggtgcccacagatagagagggaagactatatatgctgaattcaatcacttatcaccacctccataactaccaatctggtctaagccaccatcatgtcttgctaagatcactgcagtagcctttaaatagtctctctgaatctgccctgacttcccccccgattatagctagaaggattcttttaaaattcaagtgggaccttaccactgagctacttctgttggctttcccatctatttggaataaatttataattcctactatagcctataagattatataatttggtctcctgctgtctctcaccacagctcctagcactctcctcctcacatcggcatctttctttttcattaaacccttcgctgtgctcccgctttaagaccatatattccatttcttcttcctgaattactcttttcctacatatccacatggctgtctctcctgtttcttgccagtctcttatcaaatgttatctcattagagaggtgtttgctcaccatgctgtctaaaatctcattcttcctactggcccattgctctgtagtctctgtcttgctttacttttctttttggtttttatcatgaactgacatatatttatttgtttttttactgtcttgagtcaataaaatttacgtgccattaaagactttgtcatttttgtttcctaccaaatcttcaatactcaaaatagtgcctacagggaatgcatgttccataaatatttattgataagttgaataaaatactaagtgaatgaaagaacatcactggattgctgattatggcgtttaagttttattcatctgtgtcttccttgtttaatgtagtgtctaacatatagtaggcactcagtaaatgtatttcattgtgtcataatgaaatataactaagtcaagcatggaatttgcatgttatttaataacatcttagttaaatgagtttttgacatggggaaagcaccttttttgggtaactgtatagagaaagacatattgaagattatgaattctaagcagtgtaataaatagacttcagtaattggttatttcatgaatatttactactcattcaattgacttatccagtttatttttgcatactattcagccttatattatgaaggagcagtgatgacagtgtgggtttatttaatgttacaaacagaattgagaaactggttagttttgtaaaccactaaatttataatttaaaacttccacactctgatatctttagatatatatccccaaacttcctatttgagaccatgaagtcataaatccagcactttatcaagcaaaatttcctgaataccaggcagaactcatgggcatttaaaacaaattactaatttaagaggagtctgttgaaatgtgtatgatttattatgaacattctcagtgtcttaaaaataatatttcttaatggtgccaacatgtatggaaccctgaacttctcacaaagccattcatttatgccataggtcactcaaaaactattaggacagaggatcagaaagactaacttgcataaccattgtgtacaagatactgtgttaagtgtttcacataggttattttatcttgtgactgcctggaagttcaagaatacaacacatttgtttgaacactactatgtactggtttgttgtggctttttttttttttttacatgtttttatttaatccgcagcatcctttatgtcttcacaactaaactaccattttcccactagtttatttactcctttgattattaaaaaaggtattttcggccaggcgcggtggctcacgcctgtaatcccagcactttgggaggctgaggcgggcggatcacgaggtcaggagattgagaccatcctggctaacatggtgaaagcccgtctctaccgaaaatacaaaaaattagccgagcatggtggtgggcacctgtggtcccaactacttgggaggctgaggcaggaaaatggcctgaacccaggaggcggagcttgcagtgagccgagattgcgccactgcactccagcctgggggacagagcgaggctccgtctcaaaaaaatcaaaacaaaacaaacaaacaaacaaacaaaaacttagctattttctaagggtctcctaacaagcaagtaaccatgctactgaactttagtcactctgaatcaaaataattgacttgtatttatttccctaattaatttcccatttattattattcattttttgttctgttttcttaatatcagatatgactaacatttattttatttatttatccttttttttttttaatgcccccaccaggagtgtgcaagtggagagatgcatggatgaaggaggggagctggcgggggtgggtctgtgaccagcatttatattgtaactggccaagatgtatgaggaagccacctgtgctttgacctcactttacactaaaacattcatttatagtctgatcatccagtcatttctaccatgacataaaaataagagccccagagaacaaatcaaattatttttgctgtattgagtatatataaatcccaaagggccaggcatggtggctcacttctgtaatcccagcactttgggaggctgagatgggcagatcacttgagatcaggagttcaagaccagcctggccaacatgttgaaaccccgtctttactaaaaaatacaaaaattagctgggcgtggtgacacacgcctatagtcccacctactcgggaggctgaggtacaagaatcacttgaatatgggaggcagaggttgcagtgagccaagatcgcaccactgcactccagcctgggtgacagagtgagactctgtctcaaaaaaaaaaaaaaaacaaaaaaaccttaaaggaatatttttgcctggctcctacattaacatttactttctctgaaaatcataaccctgtgtttgttattatccagtgtctacaaacagcccagcttctatagttaggtaaagtaaattcaatatcagttgttctttcataatcaaaacagaagtctacaatgccattcttacatacaacagcattgacagtaattccttactatcatgtaatagccagggcatgtttagctttctgcagatgtttcaaaacatcttcttatagtttgtacaaattacgatgcaagaaatccatacatccattgagttgaaaaatgtctaaattttttataatctaaatttttaaataatctgtgacaacctcatctcttccctacaaacatttactttttttctatgctatctatttatgtaagaaactggattgtcttaaaaaatgtcctacatttggaatttggctgatcatatatttattgtgtcattcaacatgttcctgtagttcagtgtttcttggaaagtggaagttatatttaggaatttgcttagttcagtttttggaggggaagcaggagtgctccatagttttttattgcatcacttcaagagttgtataatatctgattttcccacttttagtgatacttagaataatcttcaggtatagttattgttcaccaaattgatcctttataaagtttcccatcagtcttttacgtaatgttttatctactcctgtcatttagttgcctagctatttcattagaagttgcaaggccgggcttggtggctcacacctgtaatcccagcactttgggaggccgaggcaggtggatcacgaggtcaggattttcagaccagcctgaccaacatggtgaaaccttgtctttattgaaaatacaaaaattaaccagccatggtgatgcacacctgtagtcccagctacttgggaggctgaggcaggagaattgcttgaacccaggaggcggaggttgcagtgagctgagtccgcgccattgcactacagcctgggtgacagagtgagacttgtcttaaaaacaaaacaaaacaaaaaagaagttgcaaaatggtgattatttgaattctctcattcattcaacatttatgagttattcttcttctgtaaagaactttgccttataaactacttagaaattatagtaatgacaagataaatgcttgattctttcttttccttatgtatcagtttttagaataatgaattggttctctgcaatctccagtggagactaaggaagttggttttctattttgtaacataattatgcaattatggattttagtatattttatgtgcttcagtccattaagtcattcttcttttgaaactgaaattattccacttagccagtgggagcctggagcctcttcaggctgactcctgtgtccttttgatgtgagctcaatagtctttgatatttttgttgcttttaggcaagatgtcctatgcttatcttgaacatttcctgtaccagacatggaatcaaacatttctcctaggaattctggtttggtctcctctcctctcctctcctctcctctcctctcctctcctcccctcccctctcctctcctctcctcccctctcctctcctcccctcccctcccctcccctcccctcccctcccctcccctccccttccgtcccgtccccttcttttcattttccttttctttttctctccttctcttctcctctcctctcctctcctctcctcccctcccctcccctcccgtcccgtccccttcttttcattttccttttctttttctctccttctcctctcctctcctctcctcccctcccctcccctcccctcccctcccctcccgtccccttcttttccttttccttttctttttctctccttctcttctcctctcctctcctctcctctcctctcctctcctctcctctcttctcccctcttctcccttcccctcccctcccctcccctcccctcccctcccctctagatagagtctcactctgttgcccaggcgggagtgcagtggtgtgaactcagctcactgcagcctccgcctcccaggttcaagtgattctcctgcctcagcctcccgagtagctgggactacaggcacacgccaccatgcccagctaatttttgtatttttagttgagacggggtttcaccatgttggccaagctggtcttgaactcctggcctcaagtgatccacttgtctcagcctcccagagcactgggattacaggcgtgagccaccgtgcccagccaactctggtttctttaaatggaaaatagcatttaaagaccagaatttgggcctcagggatgctcgttagtgctactgggttattattgcttagaggaggggacagagctatgaaatatatatttttaatggagaggaaaatgaaacaagtttatactaacactccaattaaaatgtaagatttcagcatttttacttcttaaatattatatctttagttctcttttcccttatgttgaaaattgtggttccagatgacgttaacatagtcacttttttgatatgagtgaggggagagactgattgattgaaaacaataccagtagtattacaaataataaggagacttgtggttctttttgttcttaggatatatcccatgaagaattgtcttagtctatttgggctgctctagcagaatacttttaactttatgtatagttaggtattatgtaccgtaatctactgattttttacaggttgctttcaatttttagaaatgttcttctatttgattcaattctgaattgtttcagttatgtaagacattacttgtttccaaagttaaagctacaaaacaaggtgcattcatatgtctggcttccacaccttttccgtaagtaaccatttatttaacattattccttttggcaaatctaaataaatatatgcatatacatacacatgcatatttgtattttcccttccttcctacacaaacagaaacacactctacatatttttctacgtcttgcagtgcttcatggatataaacccatccatggaccaaaaatccatgggctaggagggaagacacacaagataagaaattactgtaatataattgtttgctgatgtcatagaggcagatagattaaatgtcattagacacaaattatggagcagtttttctagggcgggtgagtaggttagggttagcttcagagaaatgacctttaagctggactttaaaggataaccttgaattccaaagttcagctggggatggggatgagaataggagacaggcattccagcaagaagtaaaaccctgagcaaagtgtacagcatgttggtgaaacagcaagtacacatgcaggtgaactatgtttatgaattagaactatatattgtaggctgtgagattttgttgaaaagttctaagttaaatgaatgacacgaccaaagaaatgtgttagaataactggtaacaatgtaaaggatgatgggcagaaagggaaacctgaaggatagagaagaggaggcatactctttaaatgtaagtcgaaaatttagcgtattttgtaagtaattggatgttaagagtgaggaagaaagaggagttgaagatgattccaaagtttctttcatggacatctagatgatggtaatagggattcaggaggagaactaggttacagcaggaagataaagagaacgttagttcaggccaggtgctgtggctcacgcctgtaatcccagaactttgggaggctgaggtaggtgcattacttgaggtaaagagtttgagaccagcctgaccaacatggtgaaactccgtctctattaaaaatacaaaaattagctgggcatggtggcacctgttgtcccagtgacttgggaggctgagataggagaatcacttgaacctgggaggcagaggttgtgatgagccgagatcacaccaccccgcttcagcctggatgacaaagtgagtctctgtctcaaaaatgcaaacaaacaaagagaacgctagttcagtttggtccatgttaaatttagatatctttcaaatttttttaaattataaaaataaagatgggatctcactatgttgcccaggctgatcttgaactcctggactcaagtgatcctcccttcttggcctcccagtgtgctgggatcacaggtgtgagccaccacacctggcctaaatttagatatatttatgatacctagatgaagtttttcagtagacatttgaaaacaggagtttggagctcaggaggttagatgactagaaacagtgaatttggaagccattagccttatgtattggcattagttaccatctcatgctacataaaattccctggagacatgtacttgagctgttccctttggaagactagttagagctaggattgcaacattttgatagtcaatattttaacaaatcgaaaggtacctctgttgacttggagcatgcaggttatactaggatctgattagaacctctgttacaggattagcaaaccaagtattgctaataccttggtgtagcatgagaaacattggtactatatgagaaaacttgaataacatttttgaaaggccttttgtaatatatgagattctatttcaaagcctacctgggtttatgcttagtctagaaatactttttaagaagccataagaaaacaaatccttccttatacattactgtgaatggacttgatatgaaaaggatggcatgttttttatgaagacaacttaaaaagtgtgtagtttacaaaccttgtttaatagcaaaatgaagagtaaaaaaagtgtttttgtaaaagcttatagtctcttctctcattggtattccttgagttaatttataataataaattaataagtattaataatcaatataattaataataatttatcattattaataatagtttaaagatagggtcttgccctgttgcccaggctggagtgcagtggcatgctcatagctcactgcagcctcgaactcctgggttcaagtgatcctcctgcctcagcctctcaacagattaccaggtgcataccaccatgcctggctgattttgtttgtttgttttctgagactgggtctcactctgtcgcccaggctggagtgcagtggcacgatctcggcttactgcaaactctgctttccaggttcaagcgattctcctgcctcagcctcccgaatagctgggactataggcatgcgccaccacacccggctaattttttttttgtattttgagtagaaatgaggtttcaccatgttggccaggctggtcttgaactcctgacctcaggtaatccacctacctctgcctcccaaagtgctgggattatagaggtgagccaccgcgcccggcctatgcctggctgatttttaaattttttgtagcaatggggtcttgctttgctgttcaggctggtctttaagtgcggggattataggtgtgaaccaccatgcctggcctaatctataattattaagtatccatcataggcagagtactattttatgtgtaataaggaggcatagaaaaaaatagttctagttccacattttcaaaactaaagcatatcctgtgataatgtgtttcacgaagaaattgtgttgtctcaaaactctcagggaaaaagtttagtttatttggaagagacagaagaaaatttagtatactttttgcttgtatgccaagtacagacttggatatatgaagacaggtcatatatgttagtgtgcctttttagattagttgggaagactcttgaattcattgaggtgagcaatagcatttagcattcattttgctaataaaatctaaggttcaggaaatagttttaataaacagggataggaatgtattcaatcatcttttgttcttttaataaatacttattaagtgcttaatatgcgtcagataccgttcattgtactagacacagtattgaacaaaatggcaagaatgcctgccctcatggagcttgttttctagtggagaagacagatagtacaccaactaagtagggtagaatgtgtcatttgttagaaaatgataaagtgcgtaggggaagtgaatatgaaattgaaatatcaggaggtaagctgacaatagagataggaaagacctctctgagaaggttatacttttgtaaaagatcatgcagctatttggggaggagcattccaagtagaaagaatagaaagaacaaaggccctgtggcaggagtatttctgctgtgtttgagaaatagcaaggtggcatatgtgattatagtagaacaaaagagccagtgaaagaaggtaaggtcaaaggtcatgagctgggaacccatccggaggttttgacagaaaaaaatgatgtgatcttatttaagatttaagagaattaccctgctacatagaaatgcagacttaattgtttgagtgtaggagtttgaggctacaatgagccatgattgggccactgcactccaacatgggcaacacagcaagaccttgtctcttgagagagagagagagagagaggaaggaagaaaagagaaaatgcaaacttatattcatataaaattctatacacaattgtttaattgttgatagcagctttctttgtaatagctaagaactggaaacaaccaaaatgtccttcagtaggtgaatggataaggaaactcttgtacatctattccatgctgtactactcagcagtaaaaaggagcaaatggggccaggtgcagtggctcacgcctgtaatcccagcactttggggggctgaggcgggtggagcacgaggtcaggagtttgagaccagcctggccaatatggtgaaaccctgtctctactaaaaatgcaaaaattagccgggtgtggtggcgcacgcctgtagtcccagctacttgggaggctgaggcaggagaatcacttgaacccaggaggtggaggttgcagtgagccaagattgcaccactgcactccatcctgggtgacagtgagactctgcctcaaaaaagaaaaaaaaaaaaaaaaggagcaaggttaatagacacatcaacttggatggatcttaaggacattatggtgactaaaaatatcaggccagtcatggtggtttatgcctgtaatcccaacactttggaaggcctaggcaggaatatcacttgagcccatgagtttgagaccagcttggtcaacttggtgaaaccctacctctaaataattagctaggcatggtggcagatgcttgtagtcctagctgcttgggaggctgaggtgggaggaggtcaaggctgcagtgagccgtgatcttgccactgcagtccagcttgaatgactctttctcaaaaaacaaacaaacaaaaacaagaaaataaaaaagccaatctcaaaaggtcgccgactgtatgattctgtttatatagtgttcttaaaatgatgaaattacataaatgggaaacagattagtggtttctaggagttagggatggtggggcatagaggaacaagcatgactgtgtaggggtagtgcaacggagatctttgtggtggtgaaatatttttgtatctttttttgatacaaaaaattgaacaggggaaaggcaagatccgtttacacatgcaggcatatatgtgagagtactcagtaatgactgagtccgaatagttgtaattgctattgtagtaattgcagttgttgttccacaaatctacacatgtgataaagtgacatagaactatacatacgcattgtacccatgtcaaattctgggttttgatatcgttctataattatataagatttaaccattggcggaaactgggcgaagggtacacgggacctctctgcactgtctttgcaacttcctgtgaatctataattatctcaaaataaaaagtttttaaaaaaagattactaccttggctgctcttttgaggagtaatcctaggaggttattgcagaaatctaggagtgaggtagttgctgttaaatgaggctggtggcactagagtggagtgaaggcaggggtgagaaatagttggattctgaatatgatttgaacgtagagttaatagaatttgctgatggataggatgcagggtgtgagagaaagagaagaatgaaagatgccataaaagtttttggcctggtcaatggaggagcaaagaaaagagatagtaacaagaagcagcaacaagtcaagaagcccggtaagaggtagttggattcttggcaagaaagacaaaatgacaaaccctcttcctctagtcagtggcagccacgcctgggagttagaggacaataggatattaaagtgactgcactcttattaacctgcttagggggagctgagttatcttggcctcgccctgcttttttggaaagaagcgtttgtttgataaacaggaagtcgtttccatgggtgtaggaagaagaaatgatagaactgagtggcaaagcaaagaactactagctgtggttagtttggaattggcagaagttttttcaggtagtcacctaagatgaagatgagcacacatactgccttttcccttttctaggctgggttcattcttcactgaaatgtggtatttctgcctattgcttgtcctgctgtcagggtatgttcattttcagctagtgttttgcatcaactatgagttgtagacttagcagacaaatggagacactgtctgtttagagtggaaaagtgacttattttaagaaatgttggctccgcaccactatcccattagtggcatacctctgacactccattgaagctggcctagggaaggtaagactggcttctgtgtatttttgctctttgaaaggtcagaacctaaatgtaccacaagatattttcttcctgagtaagattgggacaaaattacaaacagtgaattctgaagcaaacttacgtgctggtgctctaatactttagaaaattcaaaatcgatttcctgtacttctaacaatattactcttcgtcgggtatgtaaatctcttagtgtcacttacttcttttcattttgcaaggaagggcagaccaaaaagattaaagaagaccaatgccaagtcatggtcatgggaaagtgagaaagagaatttaaaagtactttttacttttttttactttgttttactttttacttttgaaaagcacttgaaacaggagaaccattttttttccttttaaccgagagtcacctcatccctgtctgggtacatgtttggagtgaaattgtggtcaaagaaaactttaaatttgtcccagacctataatggcaactaaatagataagtagttgattgatggtgaaaaaagcttagtgtgatggacttgactttatgcagcaggtgtctacttgaggtttgtttagattggtgggggtggggagggggcaggactctagctaggggcatggctgcagtgtggatgattgggatgaggatatgggtagtatttgtgtctcagtatttaggagaggtagttcactgaattgcctggaagaagcagaacaactctggagttccttgcaattggagtttatcctgacaaggttcaacgtacattttactttgcgtattgagtggattcaggagccatttggtttcatttgccttctgaaagtactgcagtatttgtaaaaatgctgtgactatgtgttaagtccaggctggtctacagctctggatttcttcactgaaagttaaatatcacatttgaacttgaagaatgtttgctgcctgcctctagagcatatacgaatataaagcagctatttgtcagcaggcagctgaaaggcgattttcagcagggagtgaaaaccactgcaggctgctggcttcctggcacacccactagacctcgtaggtttacagtgaaagcaaaccaatgggagtaggggttggggggataagatgggcaaaaatcagggcagaggctgaggtctgaatgcgattgagccactggaaggagcttgcatgtgaagagcacagtgctcccaaagagaagaaaacttgaaccctaaacacaatggctaggagcaaatatctaatgtgaacactttaaaaaaaaaaagtgatttgttccgtaagtgtatttagagtccaggggaaaaaaaaaagtgatttgtttatcttctttgtatctataactataggggtactgaaggtaactttggggaaagtattatagtttaagctgtactacccagtgcgctgttacagctaccttttaaccagaaccattaacagtgacaatcgatgtgtagaaaatcacctttaagctctgcagaatcctgaaggactttgtgctctattgactagatgtttaagtattccctatatagtattcagtggaccttttcaaaaatgtcttttgcaacatctttgaaagtgaaagttttaacgtatgatactcttaatcagagtacacgtttattcccaaatattctgttctttctttgggtatagcatgcaacagagtttacttgtatttagaagatcaagaggtgggggtattggcaggataaatgatttgtccagggacaactgatgtgtcactgtagagataaaacagaactaggctgcattccagcagcttctggcccgtataacagttttgagaactttccaatcactttaggaaaacaaggtacttagaaatttataaagactttcttaataaaagaaatcacttattttggaaattgtgaaattaatcattctgcagcatttaagaagcactttgatgtgttctggtaattagtatttactgccagacaaatgtctcttgggcattttaattaatgggtagcttggccaaatgagcttctgatggtaaaccttcataagggtttatttttatgtttctcaagaatagctgtctcttcaaagctctttaattagacaaggtttagcaactaaaacatattattagaataattaggccttgggttaagagaaatagggggtcagaggagcaggtactgttagaaaatggcctcttaaaacatagcattctacctctgatggatggccagttctttcacagcttctgttaagttactctccctagtttggacttcgtgttgtttaaagttcatagcagacctcaccggaagcctaaacacacccgagtgggagcttacttatccccacctctgacctcccagggaaagcttgattctagtccttttaactgctaagtggaagacttcttattttctcctttttcttctattaaatcgataatcttggctataacaatgacttgtatttttgagggagatgcttcaaaagccttgtgtgtggcgaacaaaaattacaataattcctttgaggatctttcttaatgatttatattatctacatataagatatgttcttaaagtgactacagtatttgcattccagaatgttatatttcttgtggtcagaatgcagtttgaattattttgcaatctgctctgtagatgggctggcatctaactccccttcttcaaccttctcccctaccatttcttgccacaagcgctcagtcttggcagttattgctagtaaatatgtgctaccctgaacttcctctttgtggtgaaggaaagatacacctgactggtcctgtgagggagtgagatgtcaccaaaacaattgtgtattctaccaaaactgttgataaatcacaatatatttatctatattccctcatttttcactttcctactgtctcaggatgcttaggatggcaaatatgtccttttcccagctagatcagttgattaaaggacagtgctcatgagactattagacatttctaacagaacaactgtatcatagctgacatttctaatcccactagctgtcatgacctatatgtgttgttggtttgataaagaactgagtcaaagatatgtatgttgttggtttggtataaacctactgctattattagaaagttcttaaagaacctgctaatccatcaaatcatttttgaatattgaggatagcctgctttatagtattatgattttatcacatgtaaattcttttgatataccttagttaacaacatggccaatgaaatgattttatttgagttggtagaaacttcacttggtttttgattgatgttatctgtaaaaattatcattttgtaagaaccatttggtgagccccataaatgcagatataaagatgtaggtatatcgctatgcactccagagaacagttaccgagtaagtgtgtttttatgtcaaatcgaagaactttgagaaagcagaaagatagtaacctaaacagagtgctctgtcgaggagttttctccccctagcagtgacgaatttctgtccaccctttccttaaatgatttaatattggggccttgcttttttacctcctctttaacacaggaaatatttctgatacttatcttcatgtgtgtgtttgctcatgtctgtgcagtcttctgcagtgaggatatgaaaagaaaggtagtgagttctatgacccttgaaaaacaccagaactctcttttcctaatgaaagtacaagtgtgttcttatgcatacttttgtataacaggatttatacttaaaatagtttggatacttattactaatgaattttgatagatgcaaaccaggactatcaatgtgttgttctctcattgctcattttgcctctttaactcactcgagagggccccttgtagccctccttaagtctaccttttgaaattacacaagtgtccaaaatgaaaactgactgtattcttcttcaacacagaccacctggtggcccatggtagaatggcagaaaaggaggcacgtcggaagttcaaacagatcgtcacagctgtctatttttgtcactgtcggaacattgttcatcgtgatttaaaagctgaaaatttacttctggatgccaatctgaatatcaaaatagcaggtgagaactgtactgaggatgtcagatagggacaaaggagcttttccttggggttctataagcaagggattatctgtttccatctcttcagaaagaactattgtgaaagtaaggacaatttaagatgaaaaaaaaaatagcctgaaaattgataaactttaaaagtacttcccctcccctgccctttttttttttttttcgagactgagtctcattgtcgcccaggctggagtgcagtggtgcagtcttgactcactgcagcctccatctcccaggttcaagcgattctcctgcctcagcctcccaagtagctaggattacaggtgcgcatcaccacgcctggctaatttttatacttttagtagagttggggttttgccatgttgggcaggctggtcttgaactcctgacctcaagtgatctgcctgccttggtctcccaaagtgctgggattacaggcgtgagccaccacacccggcctgtttatttttaatgtagtatcagctggaactaggctggggagaaagaagggaaaggtgatatttaaaatactattactttggttaacgggtccttttttacataagaaataaaatatgtaataaagtggaaaggaaaactactaaaattgtataccctctcaccttcacttgagaaggttgatttatgtcactgctgacacagagcatacttattctaaaggctgtaattgtatgataatttaggaaaaatagatcttagagtggcttataggcagtccagctttttgtcttctcaaattttactagtctgcttatctgacagtgccttgagagcacttttcactgccttgatctgttcatgcttaattttagtaaactatcagcattttgcctaatgaatacagactcaccatttactaataaaattaagtgactgcaatctatagagaaactgtaaatatgaaaataagccatttatgtttgccgacactttccggtatagcatcgtgtatccccggtctcccagataaaaggaaggacatctcatatagaaaactaaaatatagctagaatgtaattgtctagaaaaggcaaggtataaagcagttctaaggattttcttccttagtagaggtgggatttgagagtttggatttttatcataggtcaaagttacctaagggtacctttgcagggtcacaattcttctgagagttgcttttgtgtagataagcctgttcacttttacatcctggagcatcacctagctttttatatatctgaaactgacagctacacttttgtttagaactttcatatcatttataagttctttcactcctgcactagcttattacagagtacacaggaattaaaggctttctttatcttatataaaatcatgtttttcctttgctctcatgtcggttttattttctccaaagctctatagatactggtagttcccacaaaggtgtgtggcatggaaaagcctggcaatttcaaaccttcttttgtaattatttgttgtagcttcaattaaattaatactaataatacctactaaacttcacaacccttaaaactgtaataaaagattgattagtgtcttattattactataacaaattaccacaaacttaatgacttggaaaaacacagatttgttagcctgtagttctggaggtcagaagtccaagctgggtctcacagggtgaaagttaaaacagcagcaagggctgttcctcctggaggctctgaaggaaaaatgtgtccttgccttttttagcttctaaaggtcacctgcattctttagctcagccccttccttccttcactccaacctgtggcttccattgtcacatctcctactcctaattccgaccctcctgcttccctcttgcaaggacctttgtcattacattgggctgtctcagataatccaggatcatctctctcccacccccacctttttttgtttttgttttcgagacagggcctcattctgttgcccaggcaggagggcagtggcgtgatctcagctcactgcaacctcaacttcctgagtatctggaactacaggtgcgcgcttctatgcccagctaacttttgtatttttagtagagatggggttttaccatgttggccgtgctggtctcgaactcctggtctccagcgatccacccaccttggcctcccaaagtgctgggagccaccgtgtctgtcctcatctccccattttaagatctttaatcatgttaatacaagtcctttttaccatgtatggtaacacattcacaagtatgggggattgggatatagatgtatttgggggccattattcaacatgccacagatgtcactgtaaggctctttggattatagattagggtagtgaattaaaagaaggccctctggacacgcaccacccactctgcactgaccagcccacctggatagcagaggacacccccagcccccaccaagcattgaagacatagtttatttcctcatatcctttctccttgggtgtagttggggtggggaaggagggaagactggggtcatctccattccttgggctctgtgcccgagtccatggtgcaccactgtgctgcgagctgtggggcctgctgcagtgggagtgtgtggaacaccttgaccaaaggggagctttgtcttgtgtgttttgaaaaaggcttaatgaagagaatgttgttcattcttagtagtatagtttgcaattcttaatgacaaatagtaagtttcagtagaaaacaaaacaaaacaaaaagaaggccttctttatattctctagttttattttccgtccgctgacccaagattaaaaattttcttaatgctcccttggttcttgattttgaatttaggatgattttgatttagttaaagaaatttcttttttttctttttttttttttgagatggagtctcacactgttgcccaggctggagtgcagtggcatgatctccgctcactgcaacctctgcctcccccaggttcaagcgattctcctacctcagcctcccgtgtagctgggattacaggcatgcgccaccacgttctgctaattttttgtatttttagcagagacgagttttactatgctggccaggctagtcttgaactcctgacctcaggagttcaagatcctgatccacccgcctcagcctcccaaagtgctgggattataggcgtgagccaccacgcccggctgttaaggaaattttatatcctttagtttttacattgagaaactcagagtaaaaacagagattattgataattgaagttggaaactctactgaaatatttggtaaggagatttttaaagacttttctgttgttgttgttgttaatagttaaaacaaattcaaggagtcacaatgagagtgtctacctgctgatatataattacagactccggggtgctggcagccagccttgggctctctctgtgttaacacatatactttggcaagatttttaagttcattaacccaaagcgtacatttttattatttgttttaagagcaaaacagaaaaataaatgagcacctctagttttgcggcctgctacaatacctaacattagctttgctcatgcagtctttctcttatatgccatcgttactcagtttctcagtcattgcctgaacctcctttcttgcacataaattaaatagaattatcattctcacctcccagttcttttttgaacttaatggactagtgggagaaatgcttctagttgaagccaactagaacatgactaattttggagaggtaggttggatgtttttgacaggataaggtcagataggtaacgaaatcaactttaattctaaaagccaaaagtaactttcagattcctgatcttttcaatggcctcccttttggtaaagtatcttaaatgtcagtaagaagaaactactatatatgaaagaaacatgcaagagagaaaaagggttttttggttttattttaagaagttagtcttggctgggcgcagtggctcatgcctgtaatcccagcactttgggaggccaaggtgggtggatcacctgaggtcaggagtttgagaccagcctggccaacgtggtgaaaaccggtctctacaaaagttcacaaattagctgggcatgatggcgggtgcctgtaatcccagctactcacgaggctgaggcagaagaatcacttgaacccaggaggcagaggttgcagtgagctgagatcacgccattgcactccaacctgggtgagagagcgagactccatctcaaaaaaaaaaaaaaaaaaaaaaaaaaagagaaaagaaaaggagaaattagtcgtaagcagctcatctttaaaataatcgtatatgttatagtaccaaaataacttggaactaataaaactcagattaggaagtataaaagattcatgttttctgtatgccattgtttaagtgattttaatgaaaataatcatgcatccagtttcgtgtagaagatgaataaattggtctgtggatatttgtgtttacattaatttatttttacattttgtattaatgtggtgatttacatttgatactgtttgtttgttttgtagagacagaatctcactatgttgcctaggctggtctcaaactcctggcctcaagcgattctcctgccttggcctcataaagtgctgggattataggtgtgagccaccatgcccgccccttcccccttcttttttaagaaactgggttaccttctgttgaccaggctgcagtggcataatcatggctcactgcaacctcagcctcctgggctcaagtgatcctcctgcctcagcctcccaagtagctgggactacaggcatgttccaccacacctcgctaattttaaacattttttgtcactatgttcctcagcctggtctcaaactcttggcctcaaccagtcctccctccttaacctcccaaagtgttagaattatgggcatgagccaccgtgcctggcctacatttgatatttgatactgtaaaaagctagctatcacaactgtccatactagttctcttcgagagaataagtgttccctggatagatagatattagttatagatattataagttataattatagtataagttatatcttcagtcataaatactataagattcagctgagcaaggtggcatgcatctgtagtcccagctagttgagatcaaggctaaggcaggagtcttacttggacttaggagtttgagtctagcctcatagtgataccttgtctactgaaaaaaaaaaaagattgaaccattgttccactgtttatgattttttttgtgcttaattcttatttatgaatttttgttctagttctgtttctagagagaataaagcccaggtgaataactttgttttctttctggttttagaattattagtaacaaatccgtgttcttaatggcagtagcaaacctgtcttctgtagaatttttaaagagatgtttctgtcattagtaatacagaagaagccttgatcattttcagaataaagaattttacgacagggagaggtggctcatgcccgtaatctcagcactttgtgaagccgaagtgggaagatcacttgaggccaggattttgagacctggggcaacatagtgagattccatctcttttttattaagaagaaaaaagaaaaaaaaagaattttatttctaaaggcagttaccaagtctagaactaagaatttgtggaggtaatctagaatcttacttgttaacgaagcctccttgcataatggcacagaagagaaaaaagaagcgtgaaacgtgactccagccctaaagaactgaggctatatgggcagcaaacattagatctttgaaaagttggtaacaccaaaattatgctttgcatatatataatgtacttcacaaagcatttttacatgtatcacctaattttattggcatgcaaatatatcttattaaaaaagtaaaatctcttcatcttctggcacttttaactctccaaaacttctgaatttcttgtaaagagcacccaggcaaggtatagagaaccccaatgctgggaaaagagtaggattcttggcctccgacttttaacttttcttgcctgagatgtgtaaggatccacagaagagcagttgaaggactgacgaggcacaacacagctcactcagcatggagccggcatcgctggatgatagtatccttaacagctaccaaattatagttggatacaatagaagagatgttacaaggcatgtcatgactcattatcacattaattgtacagtctaattagcataggagttcagaggatgatagaagtactgtagtttgtaagattccacaagattgtcagttccacaaggactgtaaccatgtcctgtttattgtcacactcccactggctcatacatgcctgttctgtagcaggtgctccccagctttgtcgaactgaagttcaggcggtactgataaaggacataaatattgtattgaggacatggcatttgaggtgcgtccagtgtcatgtgattggatgatcaggtgtagaggagagaattccagcaagtgttaataaggcacctgtcagttgcagacactgatacaggcacgggggtacagcagtcagtaagataaccccttggaacttatattctaatggggataaatagacagtaaacacaaataagctctcatagggctgtgacaaagataaactcgagtaacatggcagaatgatttgtgcgagaggtactgcttttagccaggatcttcaaaacattccacgcagaaagaagaacaatgcaaaggcctgagagagataaattcaacatagaagaaaggggtagaagaaagtccagcatggctggagataatgaataaaatggggattggaagaagttggggtgagagagatggcaaaggccagttgcacgtggttaggatgtgggatttcatttaggttccagtgggcactgagttggagcagcgtgggcagcagtagaatgcacaaggtctatttgaaaaaaaaaaaaaaagggtgagcagctcagtggaagggaaggctaaaggagaggagtctccccgagaaggcaggagcagtagatgtttatattagattgaaatcatttgaatataagatataaggcttaattaatccaattcagtatggagacggcaaaaagctggaagctgagggaagggaagggcctcctggtaataggaaggccagttaaaggctgtgaatggtaaaatcccgcatgagggtgatggtggcagtaaacatgcaaaggaagaaaacggcaacaaattcaagagagaaagcaagcgagaatttctaggaccagataaccaatcatatgtcttgaccaggaagagggaattttgaaagatatgtttagaaataaagaaatgaaattttcttactgatggattatattaagctatcaaaaaaatggtgttttgaaaatggttaatgtattgctattcgaaagtaattttaatgtccttgtccccaaagattaagtagcaaggtgtctatatttaaaatagattgcctgagaaaaaactgaaatgtagctggcttactccctgaagaaaagttctttcaaatgcttagacgttataagaatgttctgaaaattgtggaaacattttttttaaacctaaggaagttggaaacttttgtctttaaatgtcgactcccagaatggtctccatgagatagtttccactctcgtgttattgttttagttggcaatcagtagacagcaaagatcagaaatgcaactatagaaaggccaatatcctggaaagaattttcagagcatggatttaaggtaccatggaaaattttgaccttaatgcagtgagagctagaccattttattattttttagggagaaattaaaacatttcctaactcaattgacctttcacccttagtatgaatatactgagataccatcatatagaaaagaaaggttggaaaccttggatttttgagtacccttccacagtgtgttgactgacagtgcctctgactggtcacaggaagtagttatgcaatactcattatatcaatctaaattgtatttcatgattctaatgccctctttttaggctatcattcattgcacctcccaggttgacatgtccagtgaattgagaccagagaggcctttgtgtttgtcctgaattcataatagagtctaggaattttaatagctagacctgtgttcttgccctgaaatggcatatgaccattaccaagaagcggctctaaataaccttcctgcacgttgacccttgggaaaagaaaatttgaaatattatctctcttgaatcctattcctgagactagaactttacaaatttgtattctacttaatgtcatatctatattttttaatattaagattattaacttagtttaacacagaaaaaacgttgatgttccaggaaggtgcaccctatttagcctacggtttctcgtatatcttggaacactgaagtgtaacacctgaggctgtgtaaacagaggccagcctgagaagctgagaatcaagaatttgatgctcaaccatagattcctcttactcacacttctagtttgtgcagagtgacttctctattacttttcctcagcctcaaggattttcatgccattatctattaattgcacgtcacttattttggggataattagaaaaagggggaatgagaggttgggaatagaaaaagggagagaagcaaagggcagaaaagaaatggaagcttttgctttgaggtcttgtgggggtgggggtggaaaaaaaagtgtaggagaagcctgagcccaaaagcttgcctcctccctctacagggaaagggagttgagcggagtgtaagagggtggatggcatgcgcttctgacctaccaaagcatctggaaatttcagactgctctttgtctctgagactgtgttgggcacagcattgaataaagtgtggatcaataagtatgtgaagtgctggatatgttaattcactggatttaatcattcctcagtgtatacatgtatcataacatgtacgatgtaccctgtaaatatatacaactattgtaatttgcccattaaaataaaacaaaatataaataaaacatgagcagtgatgattaaaagccaaagtttcatcttaatctgtataatatctagaacaaagaaaaataattttatcggcattttattgaagctgcagaaaatgacagctttgaaaaatctcaagcaacgtatggtttaaggaaattaggtgtacacttaagctatagtttgtttgtttctccctttcctttcctttcctttcctttcctttcctttcctttccttccttcttcttccttctttccttcctctcttgtcctctccttttctttctttcgttctttctctctcgctctctttcctctctctctctctctctttcccttcctcctttccttccttgcctccctccctcccttcctgtcgctcagactggagtgcagtggtgcagtcatagctcactgtaaccttgaactcatgggctcaggggatcctcccacctcagcctcccaagtagctgggactacaggtgttttgccaccatgcctggcgaatttttaaattttttgtggagatgggactcgttttgctgctcaggctggtcctgaacttttgagctcaagagatcttctcaccccacctacctaactgttgggattacaagcatgagctactgtgcccagcctcttacctgtagtttctagtttaagaagttttagaagaacattgatattctatccatttagagtagtgttttacttttattagtggctatagaaactataagaactatagaaaagttatagaaacttacagttcttataggaactctaagaacgtttatataagtctgcccaaggtcatgtgtcctcatgaggatcgtaagctcctcaaatgcaagttgatgttgggaagggactaacgaatcacccagagtgctccttcactctgattctgagggagtctttattgtgttgtgtgaagcgtgttggaagccaggtgtggtcgcacgcacctgtagtcccagctactcaagaggctgagatgggagggtcgcttgagccgcagaggttgaagctgcagtaagctatgattacaccattgctctctagcctaggcgacagagcgagaccctgtctcttaaaaaaaacaataaaattttttactttttgtagagatgaggtctcgctctgtcgcctagtttggtcttgaactcctgagctcaagtgatcttcctgcctcagcctcccaaagtgctaggattataggcatgagacactgtgcctgacctaaaaaaaaaatttttttttttttttggctcacacctgtaatcctagcactttgggaggccgaggcgggcggatcacgaggtcaggagatcgagaccatcctggctaacacggtgaaaccccgtctctactaaaaatacaaaaaattagccgggcgtggtggcaggcacctgtagtcccagctactcaggaggctgaggcaggagaatggcgtgaacccgggaggcaaagcttgcagtgagctgagattgcgccactgcactccagcctgggcgacagagcaagactctgtctcaaaaaaaaaaaaaaaatttgatgtgatattatagaaatttaaaattaaagcaatgtcaaaaagagtgaggctgactttttaggcaagcctttgcaaggtggcagaatattagtaaaggtccccattatatcagaatctggttgtcatttatgagttctgaaatataccttatcagttctcttaaaatcataagagagtgagtataatatttgtatcagttttcttagcatcaaaaagtacagtttgctagtggtaggcatgggtatttcatctagtctttttaaaatatcctgatttgagtggtctttggctcgtctttgcggaggttatacacagaccatccttaatttaccatctcaagtagtatacaggatcttttcccagccagtgacttctgaatcctcagagattttcagtgttccaagagattcatgtcatacaaagtgataatgacttttctattttttagaagttaataaatgaaataattacttaggtctttccgcccttcttaaatggaatagtttgagagcctctgagtataaatcgagtctacctgctggcagggcgctaatgagcatgcttatgacttggtcattccatttattgttcaagtagttggttatcataatagctttgaccagggtacagtttttcattgtattttattaagtttacatctattatggatcactggattatataaagcataaagaacactaatgttgaaattcaaattgatgaggataaaaatgataattctgtaatgcctcaagacaaccttcaccaaattcatgatttgtctttgtttggccatggttcttacacagcacatcaaattgtttctagggcctcaagaaacaaagtttaaaaatgttacattacatacatacacacaaaatatgtatataccacatgtatatacattttttacacacatatccgtatctatatctatctatctatattatatccagtttgatttattgggaataaagactatctacattcatagtatattatttgcaaagaagtgctaataagtaatgacccaatatttgttaatccatttcattatttaaaagcaaggcatgaaaataattcatttaatcaagtctggtttttaggttcaaacatgtaagtgttccaaatcctaggtcatgaaaagtattcatctgttttgtgtattataatctcagtatatttgtggcttccaaagccaggtgccgtggttcatgcttgtaatcccagcactttgggaggccaaggcgggaggatccctgcataccagcctgggcaacataataagaccccatctctatcccaccgcctgcccccccgccccatcaaaaagaaaaaatacacatacacacacacacacacacacacacacacacacacacatatatggcttcctactaaacatgatatatcaattttaaataaatactttttcttgaataattgaaataaatagtgtgggtcacttgtatgatgggataatatgaatttgtcttaaaattcatagtgaacttttaaattaatttttaatgtactaatgtaaaataaaatgtcttttagctaaagtctcttctgtatcataaatcatagaaaaatgacaaaattatttttaaaatttctttcccgggaggtttttaagataatacattcctttgaaaggagtttgtgagtcagaaaagctggaaaataaaaaggtaactgtactgatttctttacattctaatccaagtataccatggttttcttgatcagattgagtgagtctctgaactgttgatagaaccttcttcaggaaagccccatttctctagaatataccaattgcccctctggaacttttccttaaaactcatccagtggttataattatatagttacatgtgtgcttgtttcatgtgtatctcccccactggactaatctgctacatgagggcagggaccatgtctgtcttgttcaccttgtactgagaatacatttgtggtccatcaaaaaattgaggaggcaggccgggcgtggtggctcatgcttgtaatcccagcactttgggacctgggcggattacctgaggtcaggagttcgagaccagcctggccaacatggtgaaaccttgtctctactaaaaatacaaaaatcagccagctgtggtggcacatgcctgtagtcccagctacttgggaggctgaaacaggagaattgcttgaacccaggaggtggaggctgcagtgacccaaaatggtggcattgcactctagcctgggcgacagagtgagactccatctcaaaaaaaaaaaaaaaaaaaattgagaaggggagtactttattcccattatcatattttcacatcacctttcagttgggttacttttcagatgtctgctctcatttgaagtttttttttgtttgtttgtttcctattagctttaatctaagatagtattttgttacctactcttaatttctaggtaacaccttagagcttcttaagtgacaatcctatcttcttttctctaaaagtaggcttctgcttatcagaccatatgtcttagtttttaatttggaaaaaggtttttgttttgtttttttgtttgtggttttttgtttatttgtttgtttttttgagacacagtctcactgtgtcacccaggctggagtgcagtggcccgatctctgcccactgcaacctctgcctcctgggttcaagtgattcaagagaatttaaggggacactgattcatcctgttctataaaaggcacactaaaattttgtataccatgctcacctatcattattagaaacttacctgattaaatgattaggcttttattgttcttgttgatattctttacaatcatgactatgatatactcattaatgtttttaagaattccgatgagtactgtttgcatgtgttgtagaaagtgtctcattataatcctttcctttatacatctagtcagtactgagtttgatgcaaagatcctatattgaggaggtgtttggggatttatatgagaagggttggatgttgctatctaaaataaatagagtggagaagactggtttattacttcatttaaaatagctgagttcagctattgtacctgctaaggtgttttgggataaaaatacataagtcactcattggaaatgccaatataatgctgatccaaatctccccccaaataagatgattacttgattttttttttttccttgaaggaattttctcttgtgtatatatgctaaggctgtgagtcaggagtttttggcattacttctctattagctcctagtgaggaagttcagccaggggttgaagtgattactaaatcctgaggacttcccaatatctgtttttaagagtgaactaatattgtgacttctgagaactttgaaactcatcctttgtcactaccacaattctgagatccacacacttgacttttgttttgttcaatttcaaataaagcccttaggtcatatggtttggccagtgacattatataggaaaagcagatttaattccttattagcgtcatgttccattttaatagtcaggagaacattctaaatcctatttatatactgttcttacaccagtcttgatctttggttctttgcatcatttctagcagcaacatttctaattattagaaatttctaataattggaaattaatcaaggacctaattatttctgtcttcatctttgggtctctaattgcaaatgcagtattgggattgtgaatcctcagaagcttttagctttgaaaacatgaaggatcttgtcacagtgatttttggtgaggttgttcatttagggtaagtaaatatcttcccacttcactttttcccctctgctccctgcttccaagctgtttacttatacagcaaggaagtgaagcacaagttacccttggaaagcagggttgtccgtcgctcaaagctgtactgtattgccttagagacactgagaacactagtactggctggaaagttgtgcctaatctgtttacatctgctttggattgttctttggttagccaaaaaagaagtcaagttcattgctctaaagtggtagaccaaataagaaaattgcctgttgcagttgccctgatttataaattaatgccgcccgttttgctcttttcccttaccacatagacatatccagttgatgatatacttatttttagggatatcagttatcactaccttatatatccccaggctcctgatctcacctccaacaaagaattccaagtctcaaaattgatagtaagctctggtatttaagccttcctagaagacagtcatatggttcaaattaaagtctcctgctctgtattaagagaaagggatttaagttgccatttcagcctgcggacaaatgctaaccaactagggtgttgggggttggaaagcaacttaacaaattatattgagagccacttgcgagtggagaaataaatgaccatggccacatgaagagaccaacttcgctccactcatatggcttctgttgtgtaggtgtgcgtatccatcttaaccagcttcttctgtttctccctgttcttccgtaactctttagaatattcatcattttaatgttgactctgtaggtcatacatctttcccattgccagtaaataagcagtaagggatatcaagtattttatcggcatcagtacctgagaattacataaaactaactgctcagtgtttttgttcttattgttcaagatgatgtcttaaagtctttatacttaaaataaaaattttagttatagaataatgtaagcatactatagaaaatttaaacagcaacaaaaccgttttaaatattcaagctgcaatcccacctctgaaaccattgttaacattttgaatgcattttcttttgtctttttactatgcatgtttttcatacttataatcagtgtatttacaattttatatttcccatgttgctccatatagtcatcattttttttttttgagacagagtctggctctgtcttgcccaggctggagttcagtgccaccatctcgggtcactgcagcctccgcctcccgggttcaagcagttctcctgtctcagcctcccaagtagctgggactacaggcatgtgccaccacacccagctaattttgtatttttagtagagatggtgtttcaccgtgttgaccaggctggtctcgaactcctgacctcaggtgatccacctgcctcggcctcccaaagtgctgggattacaggcatgagccactgcacctggcctcatcatttttaatgagtgcacatcaagtagatgtaccataatttacctgatctaccccatattgtttttgttttgttttgttttgttttaaaagacagggtttcgctctgtcacccaggttggagtgcagtggcatgatcatggttcactgcaccttgaactcctgggctccagggatcctctggcctcagcctcccaagtagctggaactacaggtgtgcgccgcttcaccaggcaccatattgttttatgatctcaccaattcttggtattagcacaatcctcactttttctttggcatttattactgcattctaaaacttcaaagtgtgtttacttaaccttttgaacgtacagggaatcctttctttgccttaagtttctgtgttttttttgttgttgttgttcttgtttttcacttacattgaagttgtcattcttctggattttttttcctttatatttcaccagcatttggcctgctagcactcttcatcttgagccatgtgaactaaacttcagcttatggtagtctagtttactttatgtcttctggaatccagctagtggtaatgatcccaggccttgtccctttctctttcccaggctgacttgagctggagcagtacagcactccggtgttccttagagcgatatgagctctggaatggtgaaagaagattgttaccaaatacaaagtgcctgtggttttggggagatgatgaggctctgtgtgtttactggctgcttacctttgggatttgaataacttaaagattataatcagaaaaaaaatagattcttaaaaaaaaatggggagagttaagattatctgaaagattactaaaactatgtcaactttcagttatacaggtttttaaaaatattatctaggtttttttttcttcttttctggctatgttttttcatttgatagtttacatattgaaggaaaagaaggaaaacctaattttttttagtgttcttcgttaacagctcttgttagaactaaggaagcaagtgatattatagacaaaaatgaatttttaaattatatgtagtgtatactagctttgtctcttactaatatgggttactgagaaatagttattagtgtgggagtaatactaatattttcaatcatgtgactaataagcatatcactcacacctaattgccattttagcattaatgattatacctatcactaaaatatttactcttcctttaaaattatatttaatgataactggaaacttcatcattgtatatattcttcctagattacagtttttcttcatatatgaaaattgctattttcaacaaaaactttagttgagatctctgtcttaccaagtagttcccagttcctacactctgagttctgatacattcatttcctatttcaaactgtatcgctcttttcttccctttctcccaccctctctgttcttagttagtcagtgagttgttttaagatatttattgagtgctttctcttcctgtcagcactgtgctaggccctaggaaatcagtggtgagaaaaacctctgccctcaaaagccctaatgattgtggagcttagatcccagagcagtggttccaagtggcgagaaatagcagtggaggaggaaaaggagctattcttgtctcttttgtctttcatttattatgaaatattatgtttatacataaattttctttaagcatctgtgtatactttagtgaatcactagaagcaaatacctgtgtagtaattggcactcaggtcaaaaaactagaaaatttcatcagccaggctgtacacctcatcacaaccatatccttcccccaagagaaaaaaaattttttttgtacttttgtgttaatcacttatgtgctctactttataggtgtttttttttttcttttagtagttttgccactgatgtaatgcattacttaggagttttgctccaagggatgccatttatactgaatataatgtgtagtgggtccatccttaaacaatatagttttgcttgttttgaatgatacatgaatagaatcatattgattatattattttttgtctgtttcatccaacagtctgtgagatttatccatgttgtttgtatagctgcgatttattcatttttatttctatatagtattccatgatatgaatataccacaagttatttttccattgtacctattaatagctattttaaaagcagaagcccctattgctttcagtttggggcacttactaacagctgcaacgaacattcctaaacatttatcctggtatactcttaaacattagtgtgtattcttaaacatttaagagtgtaaactgagaagtgaaattgctgggtcatatggtgtgtgtttttaggttttatttggtaatgctgaactgtttccagtaggtgtgagagttccacttgctccatgtcctctccagtgcttgttattatctactcttaaatttttgcccatctggcaactgtgtaatgattatcttgttgtggttttaatttttactgtttctctttaataatgagattgagcttctttttgtgtctcttggcctttttttgtcaattgtcaatagtcttttgctcatttttctactggattctctattggtcttattgatttataggagtttgtttctttttgatagtctggatacaagtcctttgttttttttgtttgtttgttttttgttttttgatgattgattggttggttggttgttgagatagggtctcactccatcacccaggctgcagtgcagtggcgtgatcacagcccacagcagtctcggcttcctaggctcaggcaatcctcttgcctcagcctctcgagtagctgggaccacaggcatacaccaccatgcctggctaatttatatttagtttttgtgaagacgaggtctccctgtatttgcccaggctggtcttaaactactgagctcaagcaatcctcctgtcttggcctcccagaatgctgggattacaggagtaagccaccacgtccagccgagtcctttattttataagttacaaatatcctccctcactttgtggtttctcactttctgtttaacgtgtgtataaattttggcataattctaatgtaacgaagtttaccacttttccctttatgattagcactttttgtttcttgtttgagaaattcttccatcccctgaggccgtaaagatacctgctttttttttttttttttaaataaaaacgtgatagttttacctttcacattagggctataatccacctggaattaatttggggatagagtgtgaggatggcagcctctgtaatttttttccatatgaataacgagttgttcctgtgccactttttgagaaatttatccttttcccattgatatacagtgtctaccattcttttctatgcatgtttttaaaagaaacttgacgcagtattcctgaagcattatgtgtctttgggaattaacataagcagagcaaagggtggcagtcaataataaaatgaaaaacagtaaactgtaataactaaggaatttgcaagttttttgtttttttgagacagtgttttgctcttgtcacccaggctagagtgcagggtgcaatttcgactctggtgcaaccctccgcctcctgggttcaagcaattctcctgcctcagcctcccgagtagctgggatttcaggcacctgccaccacacctggctaattttttatttttagtagagacggggttttgccgtgttggccaggctggtcttaaactcctgacctcaagtgatccgccagccttggcctcccaaagttctgggattacaggtgtgagccactgtgcctggcaaatttttaaatttcaataaaaataattatgggatgtacgtgaacttaaatataaacacatacatgatgctgaaagcacaatgtggggctggattttgagggcactgagaactggcgttataggctgcatctgattcatactaatttttctttaacctttatacttgggaatgttacttttgaacctcacgtctcaggcataaaacaaaaataatgctcatctcaatgaggtaataaatacaaggtgctgtagcgcagcactcaacagaaggtcctttgaaaaacaactgtttaatactgcaaagtgcagcacaaataggaaaactgttgcactggagagatgagtcaaggacagtccagttccaagtctttctgggatacatggctccctccagggctcttgccactcacctgcatggccacgacgttcgtttctaagtactctgaatatatttgtatataacttaggattagtatctgttggttgtcatcaatcttggtaagaaatgcctaattttattcacagcttgacattgtagataactctgaatggatctggattatatttgtagtccatttctgtgatgtagcctgtctttacaacaaataaacaaaaattctgaggggaaaatgataccatttctcatcgagaataattatgtcatcatttgttttccctcagatcaaagttacataacacttggatgagattacatggatgctgtaagccacctttttctgcttttctgctctctcggcttccttgttacattttcctgactttcttcctttagccgcgctttctctctcctttttgctgcatcctctttctgttctcgcacctagggaataggaagtacctctgggtgttttcgaagccttaattctcatccttcccttttctctactttttctttcaaaaatattttatccttttactactataattcagtttctcagaatatcttcacttaaatttctgatcaccttctcaaactcaggacataaagaaaaagtaattttttttcttcccaaaccaacttctgctttccttaagtctgtcatctgctcagggccatattctctacttctccttctttttcatcccatatattctgtttgttatcaagtactgtccgctcctttcagaacatcttttgaattgtttttttcattttcaatatctcatctgatcacagccttcaatattcacctcacacctaacctaatcttgctttctagtttattttaccacttcacctgcctgctcagaagtcctagcaactccttattgcctgtaagtgtggctctcaaacctcttcagaaagaactgtgttttactggtacctttatattcacaccaaaagcataagtgacaaaaggaaatacagataagttggacctcatcaacatttaaaacttttgtgcatcaaaggacatcatcaagataatgaaagtccacagaatgggagaaaatatttgcaaatcatatatctaataagagatttgtatccagaatgtataaagaacactcacaactcaataataaaaagataaccaattttaaactgcacaaaagatttgaatagacatttctccaaagcagatatacaaatggctgaaaagcacatgaaaagatgctcaatattattagccatcagggaaatataaatgaaaaccactgtaagatatcatttcacatccactgggacagctgaattgacaataataagtaataataataaagacaataagtgttggcaaagatgtggagaaattggaatccttgtacgttgctggtagggatgtataatggtacggccactttggatagcagtttggatacttcctaaaaagttaagcagagttaccatatgacccagcagttccactcccaggtatatatccaagagaaatgaaaccatatggccacacagaaactcacataaatgttcatagcagcattatttttagtcgctgcaaagtggaaacaacctgaatgttcaacagatgatgaatggataaataaaatgtggaatgtccataccatggatgttattcagcagtaaaatagactcaagtgctgacataggcaacaacatggatgaacctccaaaatattatgctcagtgaaagaagccagacactaaagcttatatattgtatgattccatttatgtgaaatgtccaaaattgacaagtctcatagagacagaaagtagaaagcctagggctgggccattggtgaaagacttgaagggtgttggggagtaactcctaattagcacagggtttctttttggggtgatgaaaatgttctaaaatttcttctttggttttttcactgccttttccttacaaggtgaaaaatgttctaaaactgattgtggtcatcgtcgcacaactctgtgaatgcgctaaaagccgctgggcattacactttcaatgcgtgaattgtatgggatatggaatacaagaaatatgttatggccaggtgcagcggctcatgcctgtaatcccagcgcttcggaaggccgaggtgggaggatcatgtgagctcaggagttcgagaccagcctgggcaacacagcaagaccctgtctctattttattctatgttttaaaatttaaaaattaaaaagaaaaaagaataacattttataagaaaatattttatgagagacttataaaagagacattaagaatatgaagtaatatatttcgtattccttatctcaataatgctgtagggaaaaaacaattgaaataaaagcagtaaatgagtggagcatggagagtgtgtcatgagccaaaggttataataaattcataatcaagtttttttgtatctgaagtctaataaaatttttaaatgtggaggaaaaaaaaaggaaagaaaaaatagtaatggttcacaggatgaagtccaaggtcttcattctgtcatttgaagctgtattttatctggcatgatgctgctgtgcactctttatttcttgccatatgcccctacaaaccctttattgtacccagggcagtgtcttgcttgtcacttgaacttagcgagttaattctaagtgttctgcccttgctcgtgctccctcctgactgccattcagagcaccctttccaccttccttcattgcctctccagatcctggccattcaaccaagttctgcttcctttgagcctttccctagaactatgttttatgcctttggtttgttagaagatctaacacattgctattcccattggaagagttccataaatacatgttacataaagagtgaaggaaatggaggaacttacttagagacttataaaagagacattaagaataggaagctttagtaaataatgaaagatattgtgaattagagtagctccagagccaaaataagatgaaaaagcctattaaatagaaatggttttctaggttcaagttcagatcaaacttaagctctaaagcttttcttggcttggtgcagtggctgttgcttgtaatcccagcacttacgaaggcctagtcaggaggatcgcttgagcctaggagtttgagaccagcctggacaacatagcaagacccccatcactacaaaaaaattttttttaaatagctaggcatggtggtgtttgcctgaagtcccagctacttaggaggctgaggcaggaagatggcttgagcccaggaggtaaaggcttcagtgaactatgattgtgccactgcactcccatctgggaaacagagcaagactccatctccaaaaaaaaagtttttctttacctttttctttggcatttctgacttaagccagtgagaattcttcctcattcttttttactcattgcttgaatttgtgttatgagaatttttttcctccaacttggatgatctttcaattttttccagttgtctatacatgtagataactgaaaacagcaaagctcttagtgattctgttccatgtctatctgttccccacctccatttcctaccacacaccccagcattcccctagtacatcactaaactatcaacagaacctaaaatagactagtttgttttaactgtatttttctttccagtcctcttaaaatgtgcagcaaaatgtccccaaaggcaagcagctaagagaatgaagaggaggtattctcccatcacagttactcagtcccagaagtattgattggaaggcactgaattttcaaaatgacttccagatttagtacatggtaataatttgaggctttcccacacggataatttaaatgttcagaaaataagttatgttatagctgaatgggcagcaaattagacagaattttaacttacaagatgcatagcaatagtgaagattaatgtgaaatactagtaaagagccactggtagggaagagaagacagcgatatgctttcaatgaaaccgtcaatttataataatatgtatattgaaaagggagagtggatcagatcctgttaggtttggtacgttaaagaaagaattaggataccgcaggctcagtaattaaaggaatctgcccataattggggggtaaaaggtgtcttgtaggcagggaatagcaagattttgcttgaatgtacaccttagagttgggagtaacaatacttggaatgattatagaagacctctcgacaggtttctgagactagaggattttgtttggtgcataataggagatgagagcaagccagtagtatttggttgttgttgaatcttacagaaatcttgcatttggttattgggtctagctgttgaagccagctgtttggatgtaacatagtggaagcaggtgcttctgcagatgtggctctctctagttgtctggctgtaatatatcattcattctcatacactcatttctcatataaaatccttataactattagcagtctaagcctgcagacattgctgaagctggttccctttgatattgttttctttgtaacagtttcctgtttggtagataaaataacaagctcacactattaggtttgtgccttcacctccctggcaaagtaacatgctagaaaggttactaaacattagtggttcaaaatgagaagtctgtacattttatctgcttataggcgaatttaaactcaactggtttaaattcattgcttagcctgttgcatgctccattgaaaacacaaacaaaaaactccatgattcttctagccatgattcttctagagtttgttatccagtcattccagtgccagaatccatcaggcagaacagaatcattcgcatttctcctctgcactggagagaagaggaaggctgatcatggaaaaggacctggtgaaggttttttgcaaatctaaggatcttttttctgtcttttatttttgcaaacctaaggatcttccttctggataattcccagagacgtcaactttgctgaatctcagttgttgggatttttagcaacctgttcccactctcctaagaaaaaaatcttaatagtgaccagtgtgtgcagactttaatttgtaagtgaaagttacggtgtttcaaaagttgcaggttagttggtagagcattaaatgcagttttgttcatagtcaacattaagtgcccactgtgttaaacactgttagatactgtgaaagagagaagaataaggtaaggaactagagagagagggtagatctttacaagagaggatgtttttcaggagctagaagaatacattatttatgtattcaaataataaagggaaagaaagtacagacagagtagataggggacatttcttgtaggggatccaggaggacttcacagaagaagtattatttatttccattaatgaatgagagtattcatcttctcatagaagaagctataatgattctatttgtggtcctgactgccacaccccttatgatcattaagttaattttagaaccttgggagggacagctaggaggcagaggctctcgttgctggccagctgccattgtcagtttgagaagtctccagtagtcaggaggtgacaagaggattggcccagttattttattgcagtttaatttcgtgaccctttcttgagtctctgctatgtattagaaccactgtgtagagactaggataaataaaacggtatctcctccatttactaattaatggagggtataaacacacaatacaattaagtataatataaggcagaggctgggcgcagtggcttacgcctgtaatcccagcactttgggaggccgaggtgggctgatcacctgatgtcgggagttcgagaccagcctgaccaacatggagaaaccccgtctctactaaaaatacaaaaattagccaggcatggtgatgcatgcctgtaatcccagctacctgggaggctgaggcaggagaatctcttgaacctgggaggtggaggttgcggtgagccaagatcgcaccactgcactccagcctaggcaacaagagtgaaactctgtctcaaaaaaaaaaaaaaaataaataatatatatgtatatgtatatgacagaacagtaatgggatgtagaggcgtaaacaaaaggctgtggaagcacggaggaggaagccattgacatggtgttttctggtggaaatcagttaagccttcatacaggaagtaatatttgactgggccttgaaaatgagtgatactttaaagatggaaaagaaaggaaaaggcatggtacagagaggaaatagcatgtggaaggcatgtaaacacaggatgtgaatagtctagtgatgctagcatggccagggataaattggaaacataggatggagctgggttgtgaagggccttaaatgacaatgctgagatgaagactcttctgtaagtagaagggaggcagcccatgttttttgagcgaggaggtaacaggatctggtttgtgtaactttgtgctatgaatggatagcttaggggaaaatgaaataggaagtaagcaatagcatcagtcaagctagggatgataagagtatgaactgcagtggtagaaatggaaatagaaaagaggaggtggagtcaagacacatggagttgaagcagtaagagttttattaccaggttgaaatgggaaacgagggagaaaggacttgaagatgactccagtgtttctagtaacacaggtggtgatgtcactaatgagggtaaaagcactgaaagcgcaggtatgactttggaaaatggtgggtttgaggtgtttcttcccaagcaagtattggggattcatgccaagaacttaagagtggtaccagggccagacatataaatttggggtatttatatcaaatgctggtagaagtagcgagattaaaagagttagccctgagaaaacatagagcaaggagaggcagttaaaatcagcagagcctgctgaaaaacaccttctgtagaaggtagaaagaaggaaagcaaatagcaaaaggagagttgtcaacaagagtaaaactggaaaagagagggacgggtttcagagagtaggtgggtgcttaacattttcagatgctgtgatttcagggagcatggtgtccctggggcatgagggatttctagcctgtcacatgggtacacatacataaataaaagcatttctacaccagagactcaatcctttggccagccatccttgctcattgtcttagtgtagctcctgaagactcatccctgctacctcccatctgctgcgtcttgtagcagtaggagagggagagaagaagggaggaaaattgaagcacaaggagagttaaaattaaaatgtaagcattcttgcttcagtttgtaaataagttgcatattcttccttttgaataaactacttaattataataatgtcactttgtctaatttttaaatggtcatagatgtgtttgtcataagaagtaaatataacataaaaattctgggtccaagccaaaagaacaaagctggaggcatcacactacctgacttcgaactatactacaaggctacagtaaccaaaacagcatggtactggtaccaaaacagagatatagatcaatggaacagaacagagccctcagaaataacgctgcatatctacaactatctgatctttgacaaacctgagaaaaacaagcaatggggaaaggattccctatttaataaatggtgctgggaaaactggctagccatatgtagaaagctgaaactggatcccttccttacaccttacacaaaaatcaattcacgatggattaaagacctaaaccttagacctaaaaccataaaaaccctagaagaaaacctaggcattaccattcaggacataggcatgggcaaggacttcatgtctaaaacaccaaaagcaatggcaacaaaagccaaaattgacaagtgggatctaattaaactaaagagcttctgcacagcaaaagaaactaccatgagagtgaacaggcaacctacaaaatgggagaaaattttcgcaacctactcatctgacaaagggctaatatccagaatctacaatgaactcaaacaaatttacaagaaaaaaacaacaccatcaaaaagtgggcaaaggacatgaacagacacttctcaaaagaagacatttatgcagccaaaaaacacatgaaaaaatgctcaccatcactggccatcagagaaatgcaaatcaaaaccacaatgagataccatctcacaccagttagaatggcaatcattaaaaagtcaggaaacaacaggtgctggagaggatgtggagaaataggaacacttttacactgttggtgggactgtaaactagttccaccattgtggaagtcagtgtggtgattcctcagggatctagaactagaaataccatttgacccagccatcccattactgggtatatacccaaaggactataaatcatgttgctataaagacacatgcacacgtatgtttattgcggcactattcacaatagcaaagacttggaaccaacccaaatgtccaacaatgatagactggattaagaaaatgtgtcacatatacaccatggaatactatgcagccatagaaaatgatgagttcatgtcctttgtagggacatggatgaaattggaaatcatcattctcagtaaactatcgcaagaacaaaaaaccaaacatcgcatgttctcactcataggtgggaattgaacaatgagaacacatggacacaggaaggggaacatcacactctggggactgttgtggggtggggggacgggggagggatagcattgggagatatacctaatgctagatgacgagttagtgggtgcagcgcaccagcatggcacatgtatacatatgtaactaacctgcacattgtgcacatgtaccctaaaacttaaagtataataaaaaaaaaaattctgggtccagctgagtaggcttacatgtgtttcctgattctaatgtggtcttaacatcatccagtttcatttgcattcttttttttttttggagacggagtcttgctctgtcgcccaggctggagtgcagtggcgccatcttggctccctgtaatctctgcctcccaggttcaagcaattcccctgcctcagcctcccgagtacctgggactacaggcgcacgccaccacgcccggctaattttttgtatgttggtggagaggaggtttcaacatgttggtcagaatgatctcctgacctcgtgatccgcccacctcggcctcacaaagtgatgggattacaggcatgagccactgcccccaggcccatttgcattcttaaaggaacaagtaccactcgctttattctgcctaggtttatgaagggagcagtactatttttgctgacataaactgatcatgtttatatttcagctcatctatatctctgtttcactattattgttttaagtgtctggctatgtggtttctaaatgttctctttttgcatttaatattcagacaatgatttggaatctttagtgactagagactagtgtttgctcagttataataaaaggttacaataatacgaattatgtccatttgcctttctagattttggtttcagtaacctcttcactcctgggcagctgctgaagacctggtgtggcagccctccctatgctgcacctgaactctttgaaggaaaagaatatgatgggcccaaagtggacatctgggtaagtaactgccttctcttataccccacagcattagctacccttggttgatgacagctattcgcatcctgaaggatacataatgatgcaacatgaattgagatcctggtcacctgttctttcaagtcccaattcctgtgcaaagcctttttttttttttttttttgaaacagagtctcactctgtcgcccaggctggagagcagcaggatgatcttggcacactgcaacctccacctcccaggttcaagtgattctcctgcctcagcctcacaagtagttgggattacaggcacaagccaccacacttggctaattttttgtatttttaatagagacagggtttcaccatgttggccaggctggtctcaaactcctgacctcaggtgatcctcccgccttggcctcccaaaatgctgggattataggcatgagccactgcacccggcctactcgtgcaaaatctttcctccaatacttaccttgtggactgagccacatatttcaaatttcccctttgcatttgcaaaagaagcccaagggccagcttggatgggggccgttgccaagaagagagattatttctactgtggccacttaccttatccccagagaatgagtactgagaaaaattcaggatgttaccctaaattaatgcctagaagcaaagaagattgttaactgttctaagatggaagaaaaagtttgttccataatcgtatgcatgactcaccatcatctgcatacacacactacagtagtcttttttgtttcccctgatgtgattaattgtacatcctctctgtttgggatgcagagccttggagttgtcctctacgtgcttgtgtgcggtgccctgccatttgatggaagcacactgcagaatctgcgggcccgcgtgctgagtggaaagttccgcatcccattttttatgtccacaggtaagggagtcgctagcacacagctatgaatgggttcatgaaagttagacccactcagttatcccaggaatttagtgatggagtataaatggcccacttacaaccttttttaactccagcttgctgacctgatgcctccaggaggcaaggttctgtagaaacagtatataggttttggcatcagagagccctacttgggtttgaatctgggccctaagtctgtctcagctttagtgtcctcatctataaattggctgagagttttgtgagggctgctattactgtaaggattaaatgagataatgtatgtgaagactcagtaggcccatggcatagcagtaatgcaataaatgcttttgtttcacttctgtcttcctaccctttttcaggatatttccacttattgggttctcattgcaatgtggttttaaatgccaaggataaagtaggctttgcatcttagtcttgctactgcttcatttcctatttctgtgctctttgtcctccagaatcaaatttaaaaaattttatttaacgagtgggcagtaaggtaggcaggtcttggaaaaatttaacaccgaaaatagatacaagatactcagaattaacagtattttatcaccatttatttgcacataagaagggaacattttagagaacgcaaaaagtcatatagttttgcttaatcatctgttttcattttaaggaagaacatgtgtccactgggttgacaacaaggtagaagcccatggtaattgcattttagaacaaagaggtgaaccttggagtagatttaacttggctcctttgaactgataacgtcatagtgtagaagatagtgctaaatgctgtgggacaaataaaatagagaaggagttaggatagtggttggtaagttacatgaaaaccccttcatggagaaagggacctttcagcaaagcctgaaagaaggtgagggtgaatgctgtgcagtccggggaagagcaccccctggctgttgaggggtcagcgcagaggccgcggggatggagcatggctgcatgtgaaggaacgggaaggaggcctgcgtgcctggaaggaaggagcggtgagagatgaggaagagagatgaggtcagagaggtaagagggagcttaattttagggcctagttaatgtaaagactttagattttactgtgactgaagtatacaggattggagggttttgacaggagtgatgtaatctgagttttattttttccaaattttatgatgaaaaatttcaaacatacaaaaaaattgaaaaattttgcagtgacttttgtttaaaaaagatcactttggctgctatgttgccggtaggctaaaaggtacaaaggctgaaggagggacaccagttaggaggagacttttacaatagtccagataagagatgttggtggctggttcccagtctggggtgtcgagatggagatggtaagaagtgatcagattcaagagatgctacctaccatgtgtggcaggcactgttcaaagcacttcacaaacattaactcacttcattattttaacaaccctatgagatacacaagattattgtctccattttactggtgataaaactgaagccaggagagattaggcaattttcccaagataacactgctaccaagtggctgaagtagaatttgaacccaggtattttggctccaataacatttagtgttggatttgatatgaaagaaagactccagagtttctatcctgagcaaatggaaggatggttttactgccaactgagatggggatgactggggaagaatacttacattttggagagatgttttagacatgtcatgtttgaggtgcacattagacatcagagttaagatatgaattggcagtcgcatttaggagagaattctgggttggggatgtatgtttggaatccccagtgtatagataatagttaaagccatgaggtgagctcactttttaggcagtggttacagagaagagaagaggtccatgaattaaactctggaacataccgctatttagagaacaagcaggtgaagaggtatcataagagttgctggtgaggtaagccagagggcctgctgtcctaggagacaagtgaagagactgttcccaggaggagggaggagggagtgaggagctgtggggagtgaatgctgctgccaagtcaggtaagaggactgagaactgaatgttgcatttagaaatgtggagatcgttaatgattttgtttcttttttatccccccacaccctcaccttcctagatcattaatgattctgaagtacacttttggcagaggaacaggagcaaaagcttaatcatgtggttgcaacaaaaaaggaatagaaggaaaatagacgacacgctctttccagtttactataaaaggaagcagagaagtggtccagtattgctctggccagggtcaccagtgatctcgttattgatcaactgcatatccttagtctttttcttaatcactgcccagcagtgattaacacttcacccttgccctccctccctctctcctttcctcccttcctccctaactcccttttttgggactgggtcttgctctgttgctcaggttggaatgcagtggtgtgatcgtggctcactgcagctggacctcccaggctcaagtgatcctcccttagcctcccaaatagctggagctgcaggcacacaccactatgcctgactaatttttttttttggtagagatggggttttgccatgttgtccaggctgatctcaaactcttgagttcaggcgatctgcctgccttggcctcccaaagtgctgggactattggtgtgagctactgtgccctgtctctttagagttatatgttagagcagctttagattcacagcagtattgagtggaaggtacacagtttgcatgtaccctctgtgctgtcctgcctccctcccctgctgacccctgtcataatcaatgtgccccaccagagtggtatgtttgttacaatcaatgaacatgcattgacacattatcacccaaagtccatagcttacatttgggttttctctcagtgttacacattctgtgggttttggtaaatgtatagtgacatgtattcaccactataatacatataaaattgtttcactgcccccaaatcctctgtgctctgcctgtttatccatttctccctaaccccctgcaactactgatcctttcactgtctccacaagtttttccttttccagaatgtcatatgggtagaaacatacaggatgcagccttttcagattggtgtttttcaaatagtaatatgcaataaggttcctccatgtctcttcatggcttgagagcccgtttctttttagcactgaataatatttccttgcctggatgtaccaccctttatcctttcacctacggatgacttggttgcttccaaattttgacaattatgaataaagctactgtaacatctttgtgcaggtttttgtgtggacataaatttttaattcatttggttaaacactaaggagcacaattcctggatcatatggtaagagcatggatagttttgtaggaaactgccaaactgtcttccaaagtggctatgctattttgcattcctgccagcaatgagtgagagcttctgctgcgccacatccttgtcagcatttggtggtgtcagcattttggattttggccactctaataggtatatagtgatatttcattgttgttttaatttttaattctctaatgatgtatgaggatgagcatcttttcttatgcttatttgccatctatatatctttgttgaggtgtctcttcaggtctattggtcgtttttaacttcaggttgttttattttcttattgttgagtcactcattacattttaaaacactttttctcattgcttctgagacgccatattctccagttttcctcctgtcctctggaagcaccttctccatcttctctaccagacttatttttctctgctcatcctttagatcttttcatctttacaacatctttctggagccatgttatttactgctgtagcttcactgatcactgtggtgatcagtcctcagttaactttttgtcccagacctctcgatctagggcgacatatccaagtatttgctaaccattatcttcactttcatgtattgaagtcagatcaatggagacatattcagaaatgaacttgacttccccctccctagatttgctctattctgtatttgctgccttagtgaatagcatcaccatctgaccaaggccagcacaagccttgatgtttcctctctcaccagtgccacagctgatcagttaccaaatcctgtcaattcaaccctccattcatgtaggcacttctaagaccatactatcatcttcccttgcctcaattaaacaatagccaattatatggattcctggctccagtcttgtccccctctaatctattgtcaactttgctacatgactaatctttccagaacacaaacatataaataaataaaacataccacacacacacatacacgtacattttctctctctttctctctctcttacttaaacacacaaatctgattatatcattttctagcctgaaacttttcagtggtttaccattgcctctaaggtaaagtttactccataaggtggcaaagcattggcttacaaacatttttggctatgataagaaaaaagtacattttatactgtgacccagaacacgcatatatagatacaaatgaacaaaagctttgtttgcttgatttagagatggggtcttgctattttgtccagactgaactcgaactcctgggttcaagtgaccctcctgcctcagtctcccaagtagctgagactagaggcgtataccaccatgactgaaaacaaaagacttttttttgagacggagtctcgctctgtcacccaggctggagtgcagtgatgtgatcatagcttcctgcaatctccagttcctgggctcaggcagtcctcccacctcagcctcccaagtagctgggactacaggcaagcaccaagcaccatcatgcccgtctaatttttaaacatttttttatagagatggactctctctctgttgaccaagctggtcttgaattcctaaccttaagcgatcctccctccttgacctccatgagccactgcgcccagccagcaaacaatttttttaaaaaagcaaaacttaccttactatgtacagtgcatttcaatatattttattctattccattttaaaaaatgctgatttcgacttactaaattgatctcctatctgctatttcagaaacaatgacatagaaatacctttataacctgactcctgcctagctcttcagccccagctcccactctcccaccagtcaccctaattttcttctcgttccctgaacaagttctgttttctggagcatttcccactgccgagaatacatcttccctatcccaccccactccacccactcctgtattctagaattcagaataaaaaaaattagattggatagaaataagaatctagataatttctattcactcttcatgtctctaaactttctcttatcgtggtgcttaccaagctttatattgtaactacttctttcattgtatgtcttccacaccagactgaacttagtgaaagtacagacgaaacatgtctttttcacaactgtcaataacctaccacaggatctggtgtgtagtaggacttagtaaatatgaaatctgaatcagaaccaccccatccccagtggcatttgtttacattcagaataaaattcaaggagtcattattactatggcctacaaggcacagctgtcattgccccttctttggtctcatttcctgttactgttcacctccggttctgagctccagtcacagggccttccttgctgtttctcagacttgccaaacacatacattcccctcagagaggagtcataggtcccctcagagaggcctgtcctggctacccccatcattctctttctgtaattctgctttttcttcatagcacttactttattgtctcctcacctcctatcaccacttgaccataataagcatttggtttttgtttactgttatgttcccagggctttggacggtgcctgagttctagtaggcactcagtaaatatttgttgaatgaattaatgcatagggttgttcgaacactgactccaaaagcccctctggagagtagtcttatccaaatcataatatcagtagtaatatcaaataattacatttgtttagggcttttgagtttataaaataatttcttttttaataggtttattttttgagacaggatctctgtcgcccaggctggagtgcagtggcgtgatcttggctcactgcagcctccgcctcctgggcccaagccatcctcccacctcagcctcctgagtagcttggtctacaggcgcacgccaccacgcccacctaatttttgtatttttttgtagagatgggatcttattatgttgcccaggctggtcttgaactcctggactcaagcagtccgcccaccacggcctcccaaagttttgggattacaggtgtgagccactgcacccagccaatatattttttaaaaatatttcaatttttcagtttttatatttttggcgacagggtcttgctctgtcacctaagctagagcctagtggtatgaccatagctcactgtagcctcaaactcctgggttcaaacaaccctcctacctcaggctccaaagtagctaggactataggcctgtgccaccattccaagctaattttttaaaagattttttgtagagatgagtctcactacattgcccagtctggtcttgaactcttggcctcaagcaatcctcccaccttggcctcccagagtgctgggattatgggcagaagccagcatacgcaacctaaattattttcttttacttaatctaatttgagctacataactatattttagaataggtaatagcacatattttatcatcttgctgatgaagttttggaagctgaagtttagagaaatgagttaacttgccaaagccacacaggtaataagtaactaggtcagtattcaaatttagtgtttgttttactacaccatactgttgcaaaaagagcaagataaaccacttcctttacttttccaatgtccacagtgtttcctgtgagcaacttggatcttttctatcctccacccccatcacctcacaccatggcaagagattcttactgaacccttcccggagccggcttcagatagggggtcctagaaaacagctaagcatgctgtcagccacactgtctattagtgcttagaaataaactaacagtctaactgcttagaactattatttgtaatatgatgttagttaacctgaaagcttcaagactcagagaaagccaacaggattatcctaaacgtagtcgctctttaatcccagttaaataattccctaagtagcaatacaagtttttgtatgattagtacagagaatgagaaacaaccagggtaggaagtcagtagatacttgctatattaccaatatgatctctctggcccttggtaatatacatgtgcttggcattgctgaatgtcataggcctaaatcccaaggcccattagagaatacttcaaaaggataaggcatagcagaaaatgaattcatcggttatttaggcttttcttagcttagacaaccttcaagtaccagaaagtgtcaggtgaaggaagtttagagtctgtcccagagtcctttttctgcttacgcctcgtgtttctgggcacagttgtatctcagtagacctggagcatagtcttctgatggaggcgagtgctggctgcttttcagcctgtgaggccagctgctattgctgtattacgggagatagcgtgattgagagaattccttatgcacaagatccttccttttctcagctgttgtcataggcttgagctgagtttatctgtttttcttcctgaagggtctagaaactccagcagagctggtatagtgttctaaatgatcacttggaagaccagagggcaaagcctctaccatgtagctgcttctagccaagttgaattccagagtagctacatacagctgtgtgggaggccatgctctgcaaatggatatagttagctcaagaattctaagctgctctctattgtcagtaatgtgtggaatgaagtatcctcacaattcatgtatatttctatgcctggtgttgtttgtttgacacaagtttcctttcataggcatcctgagatgtactaaagacatatattttcaagttggaatgacagtggcatacatttaaaagaggatttatttgaggctaggttgattgtataccacctagtttttataattatgtatgtgtcttcctcctctccccactagaatgtaagcctcttgattatcagagctgtgttttacactcaataccttccataaaacctgacagcccctggtaagacataagcattcagtaagtgtttttgaatgaaaaactgagtcatcactacttaactatggaatcttatatcagactcttgtttttttttttttttgggagacagattttgccgcccaggctggagtgcagtggtgcgacctcagctcacggcaacttccgcctcctgggttcaagtgattctcttgcctcagcctcctgggtggctgggactacaggtgcgtgccaccacacccagctaatttttgtatttttagtggagacggggtctcgtcatgttggccaggctggtcttgaactcctggcctcaagtgatctgcccgcctcggcttcccaaagtgctgggattacagacgtgagccaccgtgccctgccagactcttgtattatattattaacatgatctaaattatttattcatcaaaccacttggttttatatactttttttttttttttttttttagtgtagagacaagattttcatcatgttgcccaggctggtcttgaactcctaggttcaagcaatccgcctggctctgcctcccaaaatgctgggatcataggcgtgagccatcacgcccagccatggttttatgtagttttgttatatgagttattgtgaaggtgaccaagtcaaatgacttttaggtgtaaaagggtgttttgatctactgtagagtttgcttcctattccttaagtaaaataagtttgatccaggccagtgtttttggattaaacttctcagagcatcccaaagagcagtttgataaaaccctgagtctaaattatagaaggattaaaagttgaaacttgctgttttcttgagctgttgtggaaggtgaaacctggcctggcttcatgtgttggcaaatatttcctctgatctgcccttccaccgatggatgcaaataacttaaattttttgagcaccagattcattcaatatatttttttaacaacatacttaaagcctagtttaccctattcccctgttgtaccacctgctagcagacatactaagatcgtttatttaactgaaggaaaattaatttacagtgaaaaaactgcagcgttagtgaaggcatagagatctcttgtggacaatatttttgagtctttattgattagacttcattgtgacttaattaattgtaatactgcatgagcattttattactgggaacgcaaaacccaggcttacataatgcttctgatggagaatgtaacctgcagctactgccaaaaagcttctacttagaggcaaacaactctgccctgataggcttactcatcaagaaccacacagcatcttgcttggctaaaagcactttgtttagaaccaatggggcaagggattaaattggctcacccaccaagtctccatataccgaggggctcagagtcctcaaagcagttttctcataccttttgagacacactgcaccgccagagagaaaaatctatgtagtgctttcatgtcagtgaatgtagaaatcacagctgatgtcagaaaagaggttaagaactacttcagagtgaaacaggccagccgtgttcattcccatgacctaacataactaaaaaccagtagataaatagtggtactgccctatttattattagccttttcaaaccagctgtctcctggcttatggcaaccctaaatagaaaaataaaagaaggacattccaagtggaaggacttcagagatatggataatagtcaacatttattgaccactttctatgtaccaggcactgttgcattaccttatttaatgttcagaacaactgtctgaggtaagctgttttatgaggtaaactgtatgagaggttatttgataaataagaaaactgaggcatgataaggttaagtaacatgcccaagatgcacatctagtaagtggcaaagctgagatttgaacccaggcagtctggcttcagagaccatctaaccatatgtgtttgtattttcattctcaataaatacatagtaagttagtccaagaatcaagagagtcatagaatggatatatttgtctgcatcgggattacttactgaaaaacgagtagcaggaactctgtattggacctggaggcagaattttcttaaactgtaatgactgatactaggagtcaaaagatactagaatgtaaaccacaagatggacagcctcctgtaaaacagtatagcaagccaggatcttttcagggttgggctagagctaaatcttggcatccctaccctttaggccaggatttcctgatttctgaattttaattctggcagcatcatgcccacctagaaaaactgatcgaaagtaaggaagttcaagaaataggtgtcatttttctaataaatggatatacatgggtcaaaaccttttctttgtggtctgtctcgggttgataaacttggtaaaactgaagagaaaagcctctcagtgcatgtttattgattcctaaagaaacttttcttatgggctccatctctttgcgaaagtgttccaggccatctccctatggcctctatgttcagtcactgaaagtgtctcacagaatttagagatataaagaactttatttctattccaggatattctgattacaataatttgcagaaaccactagggttggaatttatagttaaatggataattctccaccttcttttctgatatcttactgttggaatatcatttttgaaattttactgaagtgtgggacttccatttttcttcccccgagcaactgaaaataaatgtttcaaaacatgacagttttttcttagtgccattgtgtcaagagaagctaatctcaatgcttattttttatgagtcggatcttactgcagtcagtgctgtcataggttaagttccaaggttgtgtattttctttgtttgtgtaaaactgtggcattgactacatccttgtcaggcttggtggcatgcacctgtaatcccaacaactcaggaggctgagatgggaagattgtttgaggccgggagatcaaggtggccagcctgggcaacatagcaagaccctgtctctaaaaaataaaaataaaaaaaatagccagatgtcactttgggaggccgagatgggcagatcacgaggtcaggagatcaagaccatcctggctaacacggtgaaaccccacctctactaaaaatacaaaaaattagctgggcgtggtggcatgcacctgtagtcccagcaactcaggaggcatattatcgtttatgaggcaggataatcatttgaacccgggaggcgaggttgcagtgagccgagatcgcactgctacactccagcctgggcgacagagcgagactccatcaaaaaaaaaaaaaaaaagccagatgtggtggtgtgtgcctgtagtctcagctactggagaagctgaggcaggaggatcacttgagcccaggggttcgaggctacagtgagctatgattgcacccagcctggccaacagaatgagactccatttcaaaataaaaataaataactagtcctttaacttggtatttagaaatgtttatttctattatagcagtaatatgtcaaaatttaatgtatagaataaaagcattccaatccttataacaccattgttctagcagtacccaaaataacaaaatttcagtgcaacaacaaaatccctgtattttgtattattatagttaacatttatacaatctctgaatgtatctataggttagcacatttactgtatgttatttatatatacaaatgtcattttttttttttaagacagagtctcactctgtcacccaggctggaatgcagtggcacaatctcggctcactgcaacctctgcctcccgggttcaagtgattctcctgcctcagcctcctgagtagctggaattacaggcacacgccaccatgcctggctaatttttgtatttttagtagagactgtgtttcaccatgttggccaggctggtcttgaactcctggcctcaagtgatctgcctgtctcgggctcccagagtgctgggattataggcgtgagccaccatgccgggcccaaatgtcttattttgaggaccatttgtctatttgtttacatttttaaatagtgactatgttaaataaataggtttgatcttagctggcagttgacattgacagtgtttcttgagcgtattaataaaacatcatttttagggcttagtccacaagcagagtgaagattcctaactctggctggcttcttagcaaaagaaggtatcttggcagaaaacacccctggtttcttattgatttactttttaattatttctgcagggatcatagcactgcaagatagtcacactgttctgtccatgttataacaagatcaggacattataacagactttattttcttttcatgaggaaaaacagcatgttttgtgtgcagtttgtcttttaggaaaaggcaggcagcattaaagaggtgctctgagacaaacattttttaaatccagaacatctaaaatacagggatagactcttatcaaagccatgtggctccatcctgagattgctgttgcaggccatccattggtcttgttctgtttgctataatagcatcacttctcccccagggctggtacccgagctggacaaagtgagtggataacagcatcaagcagtgtattgcatagcatccttgttctgaaaactttaagactttaatgtcatttaacttttaaaaggtttttgtcaagtaattcattttccatagaaacatgtttcagagatttaatcgccaatttatttttgtttcctttttagattttgaaatttagaaaaaatagaaccctctttgaagtgagaattgtgccagaagcaattcattactaagaagtaaacatttttaagaagtttgtttaaattattgaaaatatagaactcttgggctgggtgctttagaattacctttgaacacacctaccattgactggaccaagtacataagaaactagatcatccccttcttctgagcacctgtaagcagcatgcactttcttgcctgcaagaaagcctttctgtgccttctggtacacagatgtcttctgtttccaccagctcaaagcagctttatgtggtcagaaagaatccatgactcagtttcttctatgccattgctcaccacagagctggaaaggattgttttgccatgttctgttctttggtgtcacatgcagggtttcagggacaaatggctttccctccttcataggatcagcctgaagagtctgatgatctggttccttaaatttttacctatctcctcttatctttgatccttgattcgggaagccttctgtttcaagccttccatcatagtcttcatcaccttgcaacaactagagtatataaataagtttgctctaccacagtgtatttaatcctcaccagcaaaattatgaataagacaacgctccccatttagtgttctcatgtccctgcctcattaatccatccaacttgccgtctccccttaaagctagttcttggtctttgcaccatctatttgcctggcccattttgtactaacctagcttgtgggtgattctgtcatgatggaacctgtgaagatgacatggcatctgatctgccagaggagagaattgttttggtttgttttcataacccagaataccaataatgtgtttattttaggtaccatgtaggttaagagctccctggagtaagactgaccagaatttgtattctgctttggcctcttattatctgatcaagtttctcaacttctctgattttaaattctctttgtctataaaattgagataatagtattgggttggtttgtgaagtagatgcttaaattaacttaaagggtttagcactttgcctatcatgtaaatggtcaataaatgttagtaatgattaaataatattgttgaatgaattgctctattagtctttcattctcttcttccctattttttttactcttttctatgtatctttctctcatttttgctctcttggtatgccaaagggacattactattttcagtcaaatccacacggcttatggagaagacttatctcccaagaattgttttggtttgttgtaaccacttagagaaatttgttttattatcaaggacaaaaaaaaagaaaaaaaatgttgctttcacagatacggactcacactggctatgtcaacttaattctcattttaggaccctgcccatacagcagctctctccccacaaagtcatccaaatgcctggcagcgcagcagggcaaggcctgtgctgaacatcctctagttaacgttctgttggcagatcaggtttcctgggcccacagtgactctcactgcggagaccgcttggcgtcttgcatggagcagatgaaagcagctctgaagggaagctgcttctctggcacacacaagcagaggagcatattcttgcattgcccaaagtggttcagtttcatttagcatcagaggccctgccttttgggtgggagcaaataatggggcccttttattttttatttatttatttattttatttatttatttttttagagacggagtctcgctctgtcgcccaggctggagtgcagtggtgcgatctcggctcactgcaagctccgcctcccaggttcacgccattctcctacctcagcctcccgggtagctgggattacaggtgtgtaccaccacacccagctaatttttgtatttttagtagaaacagggttttaccatgttggccaggctggtctcgaactcctagcctcaagcaatctgcccacctcagcttcccaaagtgctgggattacagacgtgagccaccatgcctggccaacagggaccttttagacaataaaatagagtagttcttggtatctggaaaagttgatgttttgtttaatgtgagggctccatctttccatgcttgtaaattgaatgtcctgtgggtgattgtgttcttaggtttgagagcatctattcccctcgttttcaccctgtttccatgttttatgtagaatggtgtcttcaaatctcatctgaatttaatttcatgaactacatgacacttaggaaatatgaattgatgatgatactctagctttctgcattttgtcatattttccatctgcaccacatatgaaaaatgttaaatttctgttccttggcacgttcgatattatgtaggatagtcaagattaaaaagctcttgcccttgacactgtaaccaagaattgttttggttcttaatctggggcctgtagacaccagggtctgggggatctatgcaggcttcataggacatcgttgagtagtctaaagttacatgcaaggtcttgtgtataaattcttgtgcagatttttttttttttttggagaattttcaaggcatctgaggccaaataatggttaaggatgactgaatagaggtttcaagatcctgaaattgaactagatatatcttctaattaggaattattatggtactgtttttggtttggttgtgtgtgtggtggtgttgttgttattgttgtttgcttttaaggaaattgccttggaaaaaatctgttttaaagcaagcctgtaactgaacaccattcagctttggtcatcttatgcactaaattgtgtgtggagaccaaaggaaaacaggagagtgccatctagaggccttaacaacagtttggtcctagccttctccctacacaggagtctttaacaacttcctaaattaagaacacttttgtcctcttaagtaactgcaaacgataaacatatgtgtcaatgacatttataatctatacaggtgctgctacagttgtggctctagccttactactctggaaatgtaattttaataaagcgtactgttgtagatggcatttactttattctataggaatgtagaagtctttgagatgtacactgcatttgaatatagttttaattgtaaagcaacaacaaattgatgcctgatgtaagaaatcattttgatataggaactttgttgtattatcttttgaagttagagtaaattaaaataagagtaatttatcttagttacttgtagtattcttttcacaacagtaatatagaatggtgtttgccaaatggtatagaaattgaagagttgaattcaccctagaaaagtagatcaatttatatccatgtggagatgtataatagggtagtcaagagcacagcttagaagtcccaactttaccatttctttgccatgttgaatatgttaactttcaaaatcttgtttcttcttcatttataagtggagctaattatagtctctaagttaaggttgttgtgaaggttaaatgtaataaagttggtaagcacagtgcttggtatatcaaaagtagttttttgtaataatgtcttactgttgttgttattttcactggccagttttgttttcaggacggttgtgattaaatagaagcagaaaatttaaaaacctatagaaaattttattttaaaaaaattttcacaattacaatctcatttgattaaatactcaacaaatatttatttacatattcagtagatatttatgcagctcctaagtgtctagatataataaccattttaggtactggagagttgatactgggtacaacagaaagaaagacatgggccttgcattgcagtggaggagtcagacaataagtaaatacataaacaagatggtttcccaaagaaatcatttgcgtgaagacaatgaatgtgatgtaatagagagtgactggaggcccatcttagagtagatggttaaagaagagctttctgaggaagtgacgtttaaactcttacctgaatgacaaggagccaatcatatgaagatctgaggaatggccatttccactaaaggaaaaaacaaacaaaaaaacacatgtaaaggccattggatgagagtgtgttaaacatgtgcaaaaactagaaatgtgcatagtggcaggaaaccaggtcagagagggaagtagggggccaagcgcggtggctcacgcctgtaatcccagcactttgggaggctgaggcaggcggatcacttgaggtcagttgttcgagaccagcctggccaacatggtgaaacctcgcctctattaaagatgcaaaaattagctgggcgtggtggcacaggcctgtaatcccagctgctggagaagctgaggcaggagaatcacgtgaacccaggaggcggaggttgcagtgagccgagatcgcacactgcactccacagcctgggtgacagagcgagactctatgtaaaaaaaaaaaaaaaagggagagagagaagtaggagccttggaggcccaggactttagatttcattctgagggttatgggaagagattggagagttacaggcaaagtggtgatatgcccaaatttatgctttggaaaaattccttttgcctctctatagaaaacagattgtaatggagaaagaatggaagcagaaagaccgggtaggagacttttgcagcgtgtaagtcagaaatggtggcttggataaagatgttgaattaatggttcagtgctgaattagtgttgggggatttggatcccccaacaactctgcaccacaggggcagggtagcattgtggttaagagaaccaggtgaagagtcaggctatctggtttgacttaatagccatgtgaccttgacaagtttctttacctccctgtgcctggtttttgctattcctaaaatgggaacaatgatagtacattcctcctaggattgctgtgtagattaaatgaggaaataataattgtaaaatgctcagaagatgcatcaatagtgctgttttggtatcatcatcactgccttcatcacaactattactctcatcaccctcagtagccacattttatagatgagaaaacttagagggtggttttgaaatcagaatatacgtttcttgattttgaatccattgttctttctgcaatgtaatctgtaatacgagctcccagagaaaaatttctatagatctgaatatctgtagctcacagcccagttttaaatacctatgactatttaaataacattgagaagaaaatgataaataaggctagctgaatcccagggcataggagagaagtagcctgtggctctctccccacacaccttgtgccatcagaaattcaagttccctgagttttgaagaagggtattgcacacctaagccaaaagcattagtatgcgcgtggtggtacatttaggaggatagaactgaatattttgagaaccttgtaagatactgaatctctttagaggccattctactcttcattacttgtgttaaatagggccatatacataatataaataaatgaaatccatggattatccccagaccttttctggtcagccttttggtgaaggcaacaaccagactaccacacttgagtttctttttctccacctctctctgcctttgcttagccccttctggtggcataagcaacagaataggtaaggatcaaagagcaagagagacaaaattagaagcagggagttggatagcctccctgctggctttgcccctggttcctctactcccctggtgcctcccctcaccagagactgaaggcaggctgtttgtccattgcagaatgtgagcatttgatccgccatatgttggtgttagatcccaataagcgcctctccatggagcagatctgcaagcacaagtggatgaagctaggggacgccgatcccaactttgacagggtgagctgggaaccgctgctgcaggggactcctctgaaagctgctgcagcctcctttgcatgtgattgtaatcaggccataacctgaaaggcggacactgggaacaaactattatgtaacactaaagcagcacgtgaagcaagcaagaaggaatgtaaaaccagttaaactgctggagaatagtgatcatggttccctaccatgtgtccccaaattatcgtctgtttttggcttttgagatagcacagcctgcagttctgcagcttacctaccatggggatgtcgccttcctcttgtcttagtgtgctcaattcagtggcttctgtagcatgcttttatttaaaccactatggccatgccaggtatgccagggagctcaggaaacagtgagttgttgtctgtttacagctgatcactcagggctctcttccttagactttgtctgaggccaaaaatatcccaagccagagggcatggaacaggttggtcattatatatgctgtgccacatttgatgtggttaattggggggttgacagcttcctcctttttatgttacagttaatagctgaatgccaacaactaaaggaagaaagacaggtggaccccctgaatgaggatgtcctcttggccatggaggacatgggactggacaaagaacagacactgcaggtatctccgaaggagtggagaacaaagtgggatgtagcagttcctctaacctgctttttccatttttcgccttctcgggaacttgggccttttttttcctcctgtttttcttcctctgccccttcctgggccttggaaagaaggaaagaaggtgctttggctaatgttattactgaaagggttctggtcatcaacatgccatttcaccagggttttgtactcttttcccttctctcttggtagtcattaagatcagatgcctatgatcactatagtgcaatctacagcctgctgtgtgatcgacataagagacataaaaccctgcgtctcggagcacttcctagcatgccccgagccctggcctttcaagcaccagtcaatatccaggtgggcaataactccagtgacctagttcaggacaagtaacaccaggggggtaaaggttagctgttgctcactaaccctaagtcgagagtttcttgctcttccttacctctgtctcctcccatttgtcatctcttcctttgtcagaggccaatcaaagatctgaaccttttttgatggagaggagggatgagcaacaatagttgtgccttttgtttttttgaagaaatagcaaatcatgaggcgatgctatcctcttcacaggatgcttccttgttgtgacttctaagggccgatgaaccaaaaactttagtaatcagggaaacatagactttagcaatcaagactacttggaaagactcattatttctctctagtgttaaaggtatgcgtgtatatgtatgtactgctttccaggcggagcaggcaggtactgctatgaacatcagcgttccccaggtgcagctgatcaacccagagaaccaaattgtggaggcaagtagcaacctgtgggagctgtcagctgaaaccactttctttgccatatccttgcttcccttccttctgatttctaactcgatggtgtttccctccacctcagccggatgggacactgaatttggacagtgatgagggtgaagagccttcccctgaagcattggtgcgctatttgtcaatgaggaggcacacagtgggtgtggctgacccacggtgagtatccggccaacagccctcactaacactggggcaaagaattgtcacctgactttcagtgtctaccatggcacatttcctactacattgtatccccagaggagatctaatccagtggccaagtggacaaatgatatgatgtaacttatgtatgtagacaattaaaatttaaatgaataaggatccaaaatccaataacaacagtttcccaaagtgttttcccaaaatagtctttcatgatgttccctgctgcctgcacactggaaaaaatggactgaaggccagctcgccccatttttgttccacggttgaagactctcaacattaaaatagccttacctcttttctggattttttctttgctgagtaggaagagaaggttgtgggaagaattctcctgagaggtcaaatcagggcaaagctggttttcttataaatatctcttttcttccagtgaatttccaaaaaagactcccatgcctgctgatgtgcttgctttatgtctcttgttctcagcctatgatcaaataggcaataggggaacattctggctccacagactgagatagctttaaaggggtggagccctgagtcgctctgttagtggaaagatgtcttactttaaagtatgctgtaaaacctatcattgtagcaagatagccctgtacatctagtacttatctgtcctatcagcactgacaagagtaattgcattctttccctggtgaatcagttgctacttcaggcagccattatcttagtggatggcccatgttctccagaaacttggtgttcacctccaggatttgaaaacctgaactggactggtgccactatttcctcttggctcagagctgttggttttacatgaatggccaataaagaatagcaatccttcgtcccaaatagtaaaggagcagagagttaaattccacactttaggcttttgctttgctttaggatcttaaagagaaacataaattcaggaagaaaataaaataagttgtactgaacatagcaatgccatcagttttgggatataagcacttttgagtaagaatgttaactaaacttctctgtcattctgttttgtatcagcacggaagttatggaagatctgcagaagctcctacctggctttcctggagtcaacccccaggctccattcctgcaggtggcccctaatgtgaacttcatgcacaacctgttgcctatgcaaaacttgcaaccaaccgggcaacttgagtacaaggtacctagacatggaagagggctggctccagaagaaacaaacttgagcttcctttgagaggctatgaggcaccttccctaggacttaagggtttacttatagagaaagatgatttatcttgcaaagtagctcgggtgagcgggaagcgtcctctagtctctgtcatgacccatggctcccttaatttccatagatgagtggcttgcccctttctccccgccttcccctcatctcatggtccgtcctccccactctgttcctggcaggagcagtctctcctacagccgcccacgctacagctgttgaatggaatgggcccccttggccggagggcatcagatggaggagccaacatccaactgcatgcccagcagctgctgaagcgcccacggggaccctctccgcttgtcaccatgacaccagtgagtagcagcacagagcccaattcactgtctcagaggcttttgataaaaaggttgtgagcctggggttgggaacccagggccaacctacatgtctgaatttcctttttctccaaacttaggatgctccagcccattttcttcaggccagtagagttttccacactttatttttggcgaacttacttacttagccaagttatttctacattgaactccactcctggagagctttttcctcaatgggcgctcacaggtaccctggttaagtccagctgcactcctgccagcttggggcaggtagcagcctaactcagagccttctcccaggcaacctttccctgccagaaggccaaagtgcccttaaattaattggtttctagactggcttccaaaattgccttttcactaatgctttctccattgataaacacacctcacatgtttggcataacctggatcacttgatgatttgctcccacagctttagccgagtcagttatcttagtcacatgtccttcatatgatagtcacattcagagattttttttctcccttgggttctgtttattttcctgtcataggtcattcattcattcatttattcattcaatctcatagtaccataagattgggtagtaaatatatccatcacccttggagatgttgtaagggcagtgctgctttgaggacccttttccctcctttaatccatcatgggttaatcccttgtaaaatatagtaaaagtgaaacattagaacagtgaaaatttaaacacatataaaatacaaggcattttttattgagttcaacagacaaaattactctgttaaattgctaaaagtgtctctttatttatttttttaaattgctaaaagtttctgaaagccttttgttgatttctgtacttaccttatcatgaattggtaacaaaacagtttgtgggcatgggtccatgggccacactttcagtaatgaaagaattatatatcatagcccttgccatcactgacaagatcaacatatgtgaagtatttgactaatagtacaagatcatatgtgattaagtaccacagtaataacatggaaaattaggtggcagaggcattcagagatgggcaagacaggtttggaaggatcatggtcagctttatgggacgtggggtgacttactgtgtctactgtaactgtttttgccaaggtcgctaacaagttcttgttgataaattcagtggacatttttaaccttttatctttttggacgtcccaactgtattaatcactgttgacttcttttttccttgaaatattttctgttcttggtgtctgtggcaccacattccctgtgttttcccccacctctccttttcacatttcctttctgcttgttccttgaggttggcaaaacccagagttttatcctaggccctattcccatgtcctttgatgtactctctctggatgagtttgtccactcctgtaatttcagttactctctgattctccagcccagaatgctcctctgagttctacacatacgtgtacatgactgcctatgggatagatttagttggttattccacaagtattcacaactttaattcagcatgtcccaaatgaacttaccatgactctgtaaaacctgctcctcctcttgggtgacagtgaatggcactgtcattctccgggttacacaagctagggatgtgaattttatctttaactcttgtctttcttatttgccatatcaagtcagttgtccagtgcctgtgaatgaaacatcctctccactttcctttccttaactcaggtcactgtcatccattgtgtagatgaacaccacggcatcctaactgacttctttgcttccagtcatgtcccctgatccctgccaccagcccttttcacactgcagctagagtaagctggcttttgcaaatataaatctttataacatcatgcccctgcttaaaatcctttagtgattcaccactgttcttcctcaaacttcttagtgtgttattcaagaccatttgtcactggccacagcgttcctctcctgcctcatctacagccacttcctgcctcaccctgttcactccacccttgtagaactgtgggaagggatccaggaaccctgggagctttccgacaaaattattccaggagtgttttgttttgttttgttttgtaattagccattttgtaaaatactcttttataataattgaagtgtgatttttgttctagtgactggggcatggtgatgatgtgggcacccaggctatgggtagctagcaaggatgcagatgggaaagtcacagtgatacaagcattgtggtggttctcatttcactcacatgttttggcgagtaacaactattttaaagcagtgaattgatactacacaattgtatcttatgtaccaaaatgtaatttcagtaattcactatgctttcctggagttaagacatttaaactccggaaatcacattaatatgaaacaacaggtcaagtcctagacatttcaggtaaacaatcttctactgtattttcgggtcctcaaacacctacaggccttctcttttcttctgcctggaaacctgtaactcctgtccctctttgcctgaccagctcctgtgcatccttcaggttcctgctaggtgctacctcctccaggatgccttccttaattcccaaacacccccattagaagacttgatcatgctattttgtaattgtttacttgtctctatcctctactagactgtaaaatgagggcaaggtctatgtctgtaaattcacattttatcctgtaacagtaagcatttggctatttgttagattaataaatgaatgaatgaagataaataagaggaagaaattctaattagtattacctaagcaaggtaaaaatggaaaaataggtatatgaaaatcctgtataacccaggagtctagaaaagttctgtaaataagaaagttaacagaaagtcctgccccaagcccagttactagagtaagaggcatgacagaataagctgccaccttgagcttttccttcctgtctctcttcaggcagtgccagcagttacccctgtggacgaggagagctcagacggggagccagaccaggaagctgtgcagaggtaatgtgacatctggcagtgcttgcagaagcccctgggcaggctcccctgcaaccagcgaaaggtcacctctgcccaaggaggtggtagagtgcagcttcaacatttgtgtggtctctttgctcaagccagatggcatgttccaccccacatggaagtaacagaagactacccagaaaatgtcatttctgtaagcaccattggaagtcccctaagtgacagcaataaccataagaactttttctttcctccctccttcttccttgtcccctgccttcatattgcaactctgatagtattcacaaggcacaaagcctgctcgtacctgccaagaactgtttactgaaaaggaattggagatgtgggatgacagtgatcctagctagtctggccatggacctctggcatggacttttcctttccaggagaatgaatacctcttgtactgtttgctgtgtgcttcttccacccccttgtaccaacaaagagatattgaaaaagagaatatgggattcgggccagggacagatgcaaatatccattgtttacagaaccttgttgagagatgcctaactcacagagaacggcagtgaccatcaggcatgctgtactgttcatttggcctcagttccgttagccctggtccttagctccatgcatgcccccttgtgggagttgattttcttattatccggggagggggtttcaccagaatccagcatgtattttcccagaaatacaggtgttcttcaagattatatgttttttcctttgagggaagttgaaataaaatggttttcatgggcttttggggaactttgggtgtctttatccaatggttattaaaacattaatggcttactctttggcaagttcacataacactgattactctacagtctgttaactgattttagctgaaaggggcaagatagttaagaatgaaatgagaccattttttaagaacctgccagttgctggctaggactctcatcctatccccagtagctctgtgtgagagctgctattcagaaagcagctggtcctatgtggaaagaaaaccatggcaaacaggggtgttggcaggtgggccagctccttctacagcttggccaatagaaggaaaattctggtaacttttttttttccttgatgctgttgtttctatagtttgctgataagagggtatataaggttacaaatgggccctactgggtcatgaagaaatgagaaatcaggaaatttactgcctttctaccttaaaagagacagcaatattttatcttctttgtcttagactttccttcctccaggtctaccttctttcttctttagaccaacatttcaagggtataatgcccatcagttttgatgtaataaaaaaggtgtagtgcctcttttattcatgcctccagaagagcagcagcggtggaggaagtcatccaccagacaaagagggacaatatcttattgatggtattaactaagtgctgggtctgaaagatcttccgaataaaagccatcagtttgggaactcttcgtcttgtgagactcttctgtttttattttttgccttgctttttccctccctaactaaacatttcatgtggttttatttcttcatcctccacagaatgttggttccccaaggacaacatcagtttttcttctctgatgattgagttatagtcaccaagcgagagggaaagggtggttttggaattcatttatcctcaaatggaaggatcagttttctgtgacctgtagtgaagaaagtctcaaacctggggcctgtgagatcgagagacatgcacagagtccttctgaatatctccccaggttcatctctaggaatagtccttagggctcatttcctctgacttgtattttggaaatttggagggaaaagatgaataaattaacatggagaaaataaattcttctaccgagtagaatgaagcaaggaaaagtgatctcatctttgtgagctagatctactttctctcttctcttcaatggctattcttaggttcaaaattcagccacttcattgtcaagccaacttctgttggccagttagacgtgtctcacttccatccaggcagggatctgtttgccatcaagccttcgtgagctctggcactatttcattgagtgctttggattaacttctaatgcttcttgtggaggaatattcctgtctgtcttttttactatgaaatgtgctcctgcttgttgcaggtacttggcaaataggtccaaaagacatacactggccatgaccaaccctacagctgagatcccaccggacctacaacggcagctaggacagcagcctttccgttcccgggtctggcctcctcacctggtacctgatcagcatcggtgagtagccacatgagctgtgcgagctccttgaggctcatcggacaggcacccttctgattagtctcacagcgacggtgactagcatcgtggctttaaatagaagccagctgtcatcctgaactcacatcttctcagctccttgcagtaagcaatgcacagggcaaaggttttttactgcgccctggagcaatgcgagattcctctctcccattaccttgcagacctgtttattgtctgcatttgattcccatgattctagatgttgattcatagataaaattgaacttgagacctgcaagaaagtgaaactctcagaaggccacctggaaacaggaagatttttagccatatcgatagacttgacctttaataatccatcaccttcaaaagaatgagcatttcatatcgtgttaccattgaaccgccagcctggaaatgaagacaaagccccttctgaatagtagagcagagatcctcttgagcgatgtatttaagaggtcattctttcaatattctgatggcaaaaatcttttgctaggttcggttatggttataatccattctcttgaagaaataaaagcaagtttaaccttcctgaccaagaaaacttcattgactccaagtaagcctggaagcagctgcggaatgacactttgctagttgaagaagatgattatcttctgtgactatcttgatgactaaaaatctcagtcttggccactccgaagctatccccaagctcatggcccacacgttcaaagccaccaccagttactagagcgtattttatttctgtcttttggggaggacactgaaaagcagccttgggaaggttgaaaagcaatcagattccaaggaaactaggtttatatatgtggtgttatgaaatcttgcagccagcttgcactggcaagcttgacacattttttttactgaggctggttacccatttggcatcaacataatcagcagaggcaagtgaactctgagcagagtgggacataattagtgccacgttggaaccctaaaagaaggaagataagctttcataaatgactatgagtaacttggtaaaaatggtctgtcaggagtagcaagaatgacaattctcaaataaaactctgatggcacagaaagacaggctttttctaatgaaagtctctcaggacttacagtgttcgtacacactaaagagcactttgaggccaggcacggtggttcacgcctgcaatcccagcactttgggaggccgaggcgggtggatcacaaggtcaggagttcgagaccagcctggccaatatggtgaaaccccatctctactaaaaatacaaaaattagccgggtgtggcggtgggcgtctgtagtcccagctactcgggaagctaaggcaggagaattgcttgaacccgggaggcagacgttgcagtgagccgagatcatgccactgcactccagcctgggcaacagagtgagactccgtctcaataaataaataaataaagagcactttgagtgattactggagacctgccttctcctcccctatacgtttcctgtgatttctcataacttcaagctctacactggtatctaatacaccctttattccttcttttctccttgtctccttcttcccttcctccacagcctgacacttaatgtttcagcccttgtctgagtctgttgtttagctgaagtcctttaggtatccttgttgaatgctaggtgttcctcaggaggtcttcttatgaggggaacatgaagatcgtcacatttccagagtcaggctttatcacagaccctatattctgttgacatttgttactcaaggaggtccacactggaccacagctctgtctgtgtgatatccaccctgcctagagtcattgtcaaggccttgcctgctggaaatctatctgctgtctgttttcatgtgaacctttttggtgttttgagggttgcctgtggccaagcctatttgaattggaagaaaatgatgttttatgagtggcaaattgcataagatggggcatttgtgcaaacccagcatgtcttgatgggatcactatacaaatatgcagcaaaagagattaaagccagtcttcaggggaaatgagaaactttccaaggctataaaacatggaatacgggtggcctgcatgggttcttgaattcctttcattttctggaggaaatgattaaagaacagtatatatagctatccttctggggtagaagagatgaagttcaacatggaaacagaagagtggtctaatcaaccttttcatttctggaaatgtgtaatttaaggttaaaaatgttttaaaaagtgtaactaaaaaatttttttaaactaacacaagatagattttatccaggtgggaaaccaagtccctccttgaagagtatagtgtgggagtatcagcctaatgcgaggccatcctgaatttgagtgtgattgcaaataaaaataaaatcaagcacaattgatacttatcagtgcttctcaaatgagcaactgcatcagaaccgttcctctgaggttactgtgctggactgacctgggtatcagtctcttcacaacctgagcttctgaaaaagtcatgaaatacctggacctgggattttctgtgatgggagagaattatttttgtgcagaaagactgtattgctacttgaagaacatggctttctgaggggatcagaaacatgtccatttcagaaaacattgaaagcataggaatcaaattttaggagaaaatagtacttacttgcttctacttcaacctgaagtagaaacagaaatgacaagttataaggaaatgcttctcaacacagccttcatgatccctgttcctggattgtggcccgccaaattcatttgttttttgtgttgctgaaccaaatacatgttcgtgctcatttcattagctcactgctgggtcaagcctcaggtagagtctgaaacaaaagccatcattagcaaagacagggtaaaaggctttcacctgctgccagaactctctggatacctctgcacggtcattagattcctcctggtcccgcgctgtctgcattgtatttgaactcgcttgttaacctgcttcctgagctgtggttctgcttcagtcccaaatgaatcactggcaaggtagcacatcatttcatccaaagttcagtgtaatggcatctctgccctggacatgaaaccctgatcctttccatctgctactggaatgctgctgccttggcagtcttttatctgcttacctcagcccataaacatctctttctgatcatcaggtcacaagagtaggtgttagcttctaaccccgatgctgtcttaggcattccttatcaatagcttgttctttctttctgtaagattctggctgtgttccagttgagcagtggggtctttgaaggtaatccatatgattcctctttcattaggaggttgggtgagtgctgctgctctgagaagttgattttcacagtaggtgaccttatttgttgaccaggtacgtgcaggatctcaaggcccacattccttaagaatttgttgtctccatcccaggatcagaagtcttcattttcccccaccccaatcgccaccttctattttctgtcacagaacctatgagttctaggccagacctttgaccacaaaactgactgttgtttccctctggccatacggagatcattgctcagggaaaactttggctcaaatggtgaatttaaggtttctaaaggcactagatagacatatgattataaaagcaagagcttctgtacagtctggcctggaggatattgagaagcttttctctctggcctagtgtatttataagaactggatgtacttgatctcgggacctcaccaggcttggaaagtaagccaaccgaaggtaagtagaaatggaagatgtacacctggagccctctaaagggaagcaggctagggaaacgactgatgtctggaaatggcatgaaagtggcataatatgcagggctacctgggcagccagccgtctttatgttcatctggaacagcagtccctgtgtgatttggtcaaagcccctgagtcctagcctctaaccttctcttcccatatattcagctctacctacaaggactccaacactctgcacctccctacggagcgtttctcccctgtgcgccggttctcagatggggctgcgagcatccaggccttcaaagctcacctggaaaaaatgggcaacaacagcagcatcaaacagctgcagcaggtaatggaagaggtggcaggcatccctggaggagcatgggtgacagaggccaggattgcaggaggactggggtggtaaacgtaccccttttatgtcagcaacattgcagttttataggttaaaaaagtatagctttctgggccgggcgcagtggatcccgcctataatcccagcactttgggaggccaacgtgggaggattgcttgagccctgaagttctagaccagcctaggcaacgtggcaaaccctttctcccccaaaagattaaaaattagcatagtcccagctactcctgaggctgagatgggaggatcacttgaacctgggaggtagaggttgtagtaagctaagatcacacccctgcactccatcctggcaacagaacgagactctgtcttaaaagaaaaagaaagtatagctttctaatgcactttctttactttgtgttatgtacagccctccccaggatcaaacttccttcccctgtgaagggactaaatttttctcctgtctctagttcattggaaaggaatttctgggcttgggtttctgtgggaaccaccagagaaggtgctactttttttttttttttttgagaccaagtcttgctctgtcacccaggctggagtgcagtggcacaatctcagctcactgcatcgtccgcctcctgggttctagagattctcctgcctcagcatcctgggtagctgggactacaggcgtgcaccaccatgccagctaatttttgtatttttagtagagacagggtttcaccatgttgaccaggctatgtctcgaacttctgacctcaggtgatccgcccgtctcggcctcccaaagtgctaggattacaggcgtgagccaccttgcgcgcctggcactctgcgcatgatttaggatgctgggtcttgattaaacctgctgtacattgttaccacctggcattctctccaggtggtatggaacggcactctcagaggaaggaaatgtacctctatatgtttctgtactataaagattctataaagagccaatttcctttctgccttcctgatgaccaagcttccaatggcgtgtgctttgtacacagatttcacattggacacttgtactcatacaaaggccatccttgatgttttccattcattcatacagaacaggatgtgaatctatttagtgcaccagatacttaggtaaatgagttaattgctcatcaaggacactgttctcttgcggctctttctgcccatgagagcttggaggcagatctgcatctgctgaaatcactgcatgaggcgggtctggctgcatcccatctgtattaactactttcccttcaggagtgtgagcagctgcagaagatgtacggggggcagattgatgaaagaaccctggagaagacccagcagcagcatatgttataccagcaggagcagcaccatcaaattctccagcaacaaattcaagtaggccctcactctttgctttctccaacttgtttggagtttgctttcaggctgatttgcctgtgcattttggaggagaccactcagtgcaaagtggatttgaggtctgtttatggttgacatgtttgagtaaaggtaatcagaccttctggtgaacaacaaaagcataaatctgagacacagatagttctttctgtttcttcccttcctgagaatagctctgagtaatcttcaagctcacaataatttttttcctttccccatatatgttttaggactctatctgtcctcctcagccatctccacctcttcaggctgcatgtgaaaatcagccagccctccttacccatcagctccagaggtatgagtcattttgtgttgtgcctaagccattgtctcgatagcctggtacccttggcttgactcactgggagatatggactgacttgagcattcatcttgcaagaatctatttgaaaaggagagaaaccactgtaaatttcaggagccttcttgaaatcccaacttcctgtgccacttcatttccttagccccatgagcaaagtaatctgatatctaatacaggagccagacataggcccacaatgaactctgccattttggctgagttcttttcaaacaagatgtagataggttttaaatacactgtggtggatggcttatgtatatttttctaacatgaggcttatcaaagtaaaaaaaaatagtttccactgatatatgttgtatggctgaaacttaagattgtactgtcaccttaggaagcttctttgtgtatctcttttgttatttttaaggttaaggattcagccttcaagcccaccccccaaccaccccaacaaccatctcttcaggcagcccagtaatagtcctccccccatgagcagtgccatgatccagcctcacggtgagtggagaggttcagaccaaacagttcattttatgccacatgggaaaaaatgatggtctcagttttgagcaccataaaccatttgaaaggcagaataacatagtattcaggggtatggactctagagccaagctgctttggtttgcatcctggttccatcagtttcttagctgtaaacccttgggtaagttaacttgacttcttgaattagtccatttcacactgctctaaagaactgactgagactgggtaattgataaaggaaagaggtttaattgactcacagttccacatggctggggaggcctcagaaaacttacaaccatggcagaaggagaagcaaggctcatcttccatggtggcaggagagagattgcacaggggaaagcgccagaaacttatcagacaaccagatctcaagaattccctcattatcatgagaacagcatggaggaaactgccccgtgatccagtcgcctcccaccaggtccctcccttgacacatggggactacacttcaagatgtgggtacacacagagccaaaccatattacttctcaaatgtcaactgaggataattatggtacagtatgtagatatacgtaaaacacttggaacagtctctggcacaaaatagttctcaataaaggtttactattattaatatttttaacaaaacctccagccctaccaaataaaaagcagctaccagaaccttccttatagacatgcctccgtttggctgtctactatacacgtgggcccctctcttgtgggtgtacagatgggagtgaagataagtataatgtgactgtgagtcttcagaggtcagccgtcttaggatctcttgagtaacactccacgagctacgtccctagtcagtctccctaggatccttgagaagagtctgaattggcctctaggctcttcctacttaaagtggggtcccccagccaccaatattgggagaaaaagtaagatctcaggtcgtattccagacctgttagagtctgttttttttttttttgagatggagtctccccctgtcacccaggctggagtgcagtggtatgatctcggctcactgcaacctccacctccgggttcaaatgattctcctgcctcagcctcccaagtagctgggattacaggcgcccgccaccacacccagctaatttttgtatttttagtagagacagggtttcgccatggtggccaggctggtctcgaactcctgacctcatgatccgcccacctcggcctcccaagtgctgggattacaggtgtgagccaccacgcccggcctagagtctgcatttttaaccagatgccaggccatttgtgtgcatgtgaaagttcaagaagcactgcctagatccgagttaccccatgtaatccatggaccagcttttaagggaacttgttggaaacacaaattcttaggggcccatcctgacctactgaatcagagtttgaaacagaattatatagataggacccaggaatcttctgtttaacaagttctccagacttgtcctatgctcagtgcagtttgagaagcactgttctagctggtatgtcgtctgagtattctcattagctctcattacttctggctggctggtggcctgggcacttggtcactctgaggttcctttctctccaggggctgcatcttcttcccagtttcaaggcttaccttcccgcagtgcaatctttcagcagcaacctgagaactgttcctctcctcccaacgtggcactaacctgcttgggtatgcagcagcctgctcagtcacagcaggtcaccatccaagtccaagagcctgttgacatgctcagcaacatgccaggcacagctgcaggctccagtgggcgcggcatctccatcagccccagtgctggtcagatgcagatgcagcaccgtaccaacctgatggccaccctcagctatgggcaccgtcccttgtccaagcagctgagtgctgacagtgcagaggctcacaggtaagaccgcctaacgtcacccagccatctatgcatgggatccaggtgggaggaagccccttagcagagtgagagaaaaggagggaaggagaatgggtctgactaggctgtgctcttgtttcacgctttctaaaatcaggatgctgggtttggaatgaacttgtcagctttttattgacccagggttaaaattctaatgagactgaggtggaaaatgggaaagctaccttattatttgctaccttattatttgcttgcaaagaagaaaatggcctgttagaggaatgtataaaaattccagttccccttttcttgaagggagcatcttgaagttgcttccttcaaaatgagctagatctattacccacgcagtgccctcagtcccttggaggttactggacaagccagtaatggaataaatagggacaatgcatacatctgccacttctctgtcacaccacagttctctgtaccagtgggttctccctactgaggaggaggagctgttcccaggaagtctagtacttgttacatggatgtctggtactcccttttgtgtctgcagcttgaacgtgaatcggttctcccctgctaactacgaccaggcgcatttacacccccatctgttttcggaccagtcccggggttcccccagcagctacagcccttcaacaggagtggggttctctccaacccaagccctgaaagtccctccacttgaccaattccccaccttccctcccagtgcacatcagcagccgccacactataccacgtcggcactacagcaggccctgctgtctcccacgccgccagactatacaagacaccagcaggtaccccacatccttcaaggactgctttctccccggcattcgctcaccggccactcggacatccggctgcccccaacagagtttgcacagctcattaaaaggcagcagcaacaacggcagcagcagcagcaacagcagcaacagcaagaataccaggaactgttcaggcacatgaaccaaggggatgcggggagtctggctcccagccttgggggacagagcatgacagagcgccaggctttatcttatcaaaatgctgactcttatcaccatcacaccagcccccagcatctgctacaaatcagggcacaagaatgtgtctcacaggcttcctcacccaccccgccccacgggtatgctcaccagccggcactgatgcattcagagagcatggaggaggactgctcgtgtgagggggccaaggatggcttccaagacagtaagagttcaagtacattgaccaaaggttgccatgacagccctctgctcttgagtaccggtggacctggggaccctgaatctttgctaggaactgtgagtcatgcccaagaattggggatacatccctatggtcatcagccaactgctgcattcagtaaaaataaggtgcccagcagaggtaagtgtctcctcacagtggaagtcctgggccagtctgccctaatcaactgactcagtaatgttatcttttttcagctagtattctgtgttcctaagaaaaaaagaatttctgagcttcacgaccttcttggggagaagcatgtaggaagtgggtattggtgggcaaggggtccattttcaaaatcaaaggaccatgatacaaaattaacacttagtcaataagatagatgatccatttcccttattcataccacagtttcttggaatccagaaattcctgactgccatccaaacagctaactttaaacttgtgcaatagaaaaaaagtcagcccaacataatttagtgtaaatagtgtgggaacaagagtcagagcaccttaattctgctcttgcagctatcataaatacgataactttgtcatttaatccctctgattctgattttcctcatctgtgaagaaggtgttggaggaacaatggagtatcttacggtgtatctgtggagatgaaaacatgtatatatgtgtttgtttctacataatgtttgcatgagagagagaggcacattcagatcatctgaaatgtttgagttcagtgcataaatgtgaggtattattactctggtcgttttattagtgagctaaatgcagaatattacagcatcataagggcccccattatcatttcattttgtaccactttataattaatgagtatattcattatcattctgaaggagatcaggattgcaattagtaagttatacttagaaaatatagttccattagcatcacggcattcatcctagacaaaatcaggaatcttgcaatttaccactcctcaccattgccatccaagggaataaaaagcaatttatctgtaaactgtacaaccctgagactgagcagtttcttccatccttccctccccggaactacctgcatctcctgccctgtcatttaaagtcagtgctgaaaactcagccccagggggaattcggtcctgcagcacagagcagtagagaaggccttgctgtaaagcggtgtctgtgaaaacgccttggtggtgccaggttgtactcattatgcgctcttaggggggaattgttgcctgaaatgccaattcaatcctgaccttttgaacagatgggtgtcatccagctgagagattggctccagtgagatgtactgtgttcacctgtggctgctgtattcttagtagacataggagggtgggagctttcagaaccagatcataggtggaatggttaacagacctgagggtgtttaggattgggaggaaaaactaagagaaacatcacgcttgttagatggaagaagggattagatttttctgggttcatattatggggcagaaccaagatcaagatagaagttgcagcaaatttcaacaccctgtggaagacctttataagaactctccagaacaggctgccttagcagcctgggagctttctaacagaggtgggataatggtatggggatgttgtggaaaagattcccctgcaaatggaagcttccagcagattagcacactatagttggcatgaaaaggagatgagctcacgtttctttttttttttttttttgagacggagtcttgctctgtcacccaggctggagtgcagtggtgcgatctcagctcactgcaagctctgcctacaatgctcacgccattctcctgcctcagcctcccgagtagctgggactacatgtgcccgccaccacgcccggctaattttttgtatttttagtagagacagggtttcaccgtgttagccaggatggtctcgatctcctgacctcgtgatccgcacgccttggcctcccaaagtgctgggattacaggcatgagccaccgcgcccggctgagctcacatgtgccaggcaccaaatgctgttcacatacggattcatttaatccttacaacaaccctacaaccctagaataaccaactcttattcccatttaccagtgaaacagcggaggcacagagattaagtaacttgtccccaaagtcaagaggtagtcaggggcagctgaacataagagtactcacactagctgtcactgacacgagagatgctcaccgagcaagtcccgggtgtgcagggcactgaggaaggagcatagctgcagcaaacagtgctgctgccctccacccctgccccaggctgagttaccgtgtactttcaatacttcctgaaatgtttttcttcaaaaattattttctctagtttctctttaccttccttcctgtgtgacttgtgtgtgtagaaagtctggagagcataattccccattgtcccctgattgtcagaggaccccttcttcggcaggcacgctagtctgttgagtacccactgttggtgcaagtgctgtgggcgcaccagaggagggagagattacttcaatccaaggaacaacgtaggtttccagcaataagtagcctgtgggttgggtcctggtggatgaagaaggtttgccatttggatctagaggagaagcaagagaaaagaacaatgggtgagactgtctcaaggaattttccaaggacagcagcaggcttggctggtttgaagtacagtgtacatgaaggcattagtagaagctaaggacagaggttttctaaaatgcatcgtctagattcagctgtactgtgaaaaaaactcaagttttttttttttttttttttttttttggcagagtctcacactgtcacccatgctggagtgcagtggcacgatctcggctcactgcaacctacccctcctgggttcaagcgattctcctgcctcagcctcctaagtagctaggattacaggtgtgcactaccgcacccggctaatttttttttgtagagacggggtttcaccatgttggccaggctggtcttgaactcctgacttcaagtgatccaaccacctcggcctcacaaagtgctgggattacaggcatgagccaccatgcctggctttcaggtttcttttaaaaactccagagcttacatttttactttactgaaaaaatcatcagataatttgctgttcacttctgtcacgaaaggcttataatgctgtgcccccaccactctgcaggcaagtgggggagctcactcttctcaacctttttgccaggaaggaatgcctgctgtttcttttaatggtccctccatctcaactgtgttgcacaagactctactgtaggtgctgtgagaatgcagagatgaaaggataacctgtcctcagggagcttctactctactaggggatgtaaaacaagctcataaacagctttgctatgaagtgctaggtactgagtgctgcaagaagtatcactgagaagagcagagctagtgtgatcttcttagcatttcttaagggtagatgaacagggattgttggtgttatttagttactttttgagtcagggtcttgctctgtcacctaggctagagtgcagtggtgcaaccacggttcactgcagcctcgacctcctgggctcaagcagtcctcccacctcaacctcctgagcagctgggactacaggcgcgtgccactacacccagctaattttttttttcctttggtatagatggggtcttgctatgtcgccggggctgatcttgaactcctgggctcaaacaatcctcccttcttggcctcccaaaatgctggtattacaggcatgagccaccacacccagccatattggtattagtaaaggaaaattagatgccatcatatcagtgtccatggttacctatttccttgatggcgatttgccaccagccagtatgaggccaggcactgtgagagcactaagcaggcagcatgccaaaggtttcttcccaatttgtagaagtgtcaggatttcacatgccccatgctgtccgtaatctccctgcctgccaccctagaaggaaaaacaaggtttgtctttcttctatagtggtacacacacttgatctttttgactttgcaaataaacacagcagcataaccaatctacaccatgagattaccaactggaactcacaaagaaaaccacatcctcttctctgagctcagtcagcctcagctttattactcaggcctcatagagcagtaaaatgctgacagagtgggaggggttaccccagaacctttaaggggagtatgcagtcacgttattgctcccattttctctcaaaacccagtaagtgagtcaggacgagtcaacattgacagattcaatagagaattgtgcaggttgccccaaagttccccgggaaggtgggtggcgtgcattgtgtccatttgtgcacttttccccttgtgtgatcggacgatcatcccacctctgcactctcttagctttagtttgataaatattcgagcatgtagctcttgggaaccatctttcctccatgactttggtagctgctgaattggcataaagggttgccaaagatttgatcctgaatgtcatgttccttgggcagtgggttagtctgtttgtaccccccaaaatggtcgatagggtcttatttatagagtgtcacaaaggacttctagactcagggtcagcattcttaccaaaaatcagacttgacttatttggtcttttacagttgattaaagactctttcacatgtgttgtcttttcgagcccccaaacaaccgtcatttttcagatcaggaaccttgaggagaagctgaaagatttgccaacactttgctggtgagggagctgggtcctgacttcaagttttctgatcccctggtcatgtattttttcctttacgcctccttgcccactctgcaccctccaagcacagctgccaagtgaaagatgctagcccttccaggtctttgacctactgatgatactgaaacttgagcagacagagccctggggtatcccctgactcctattaatactctttttcatctggcttttaactgacatttgtctgtcctgaatcagaggcttctcctggaaattaaagtttccctgagtcatttgttcatttacatatgggtatattgtccctcataattctgcaagcagggttctgtgattaaatcaatttccttgtttgtttttgtcagctgactcagcacgtccttatgcactcagaaataacatctctaaactgaatataaatcatgctagactttattgagcctttacagtgtagtaacctctatgaagcactccacacccatggagtcagtccagttgtacagataactaagacccagcaaagcaagataacttgcccgagctcctgctcctcaggaagcagctaagccaggattcacggccaactcttcctgaccccagaacttgtgctcatgacccttgtgctcaactccagcttggctgagggatgagctctgggctgggagtcaggaaggccccctacatgatttgtcaggtggttgcttgctctgtcttggtgcctacaggcatcagacctgaaggcggggaagacagcagacaaggcagagcccaaaggagggtgggtgttttggtttgcagaggccccattctcagggataaaaacaagtctgagagagggaaggaaaagagccttaaaagacacagcaaacaaaccaaaacactgaggcctccagaagaggcaggaaggctccaaccaggactatatacattttgttagctttgctgtttcctcatggttagtaatgatgttttaaaaatctttaaacaggagagcgctcatgtttgtccttgcggagagcaaagagatgcaactgatgagatttgcatccaactatataatcaggcttaaaggaaaaaagcaccccgaggaattgagtggatgatgttagttatcaaagaagacaatataggtttttgaaaaagtaagaagcggctgctcgcattgcttcttggcaaagcagacagaatcaccatttcctcactcccacacaaccatgttgccccacttcctgccagtggtttttggttggccctggcgccaacatgcgagcagtgcccactgagaggaattgggcagagtgggtaggacgggcgggctaatcccacagagcaagtcctggtgtaggttttcttttatcttctctctgctggcttttagctttctgtagcaaaatagttggcttctggctgttccttttacctctttgctcagagaactttcaaaagatttctcacttgccatcatctttggtagctgggaagctccctcctctaatttttctccagaatgtcttgcattactagcaatgggcatgtcagttagctcccctccctttccatcctgcctctgcccctaagtcccagcctaaccttaatcattatagaaaaccattgaaatacagagacctgaaatcctttacccaacattcaagaagtatgctttactttcattatttaaatagatcattggaatggcacagttagcattacagctgtgtttgctattaagagcttttgttttaaacttagtcccaccaagagtcagttcatccaagataagctcagtagtttccaagaagctttaactcagaaaaccaaccaagcaaacacaacttattttcaagtcccaggcttttaaagactgaagtcaaaagtgctaccaggaggatcctgtcaacataggtgtggctttgatagtcttcttgactatccttgatcaagaagaagtactcattcctttttctctccaattctagtccatagaatggtatgctctgacaggatagtaacccatattaagagagtatttatttttattattcttttttgagatagagtctcactctgttgcccaggctggagtgcagtggcatggtcttggctcactgcaatctctgccttctgagttcaagcaattcccctgcctcagcctcctgagtagctgggactacaggtgcacaccaccacacccagctaatttttgtaattttagtagaggtggggtttcaccatgttggccaggctggtctcaaactcctgacctcaggtgatccacccgccccggcctcccaaaatgctgggattacacgcacccggcctaaagagcatttactgacatcagtgaaagagatcataatactgggtataggacaatgttctagaacactgaagattcacagacatacatgagatatagttcttgcctgcaaagaatttatagtctaatgtgaatgattaagtacataattgaacatggtaccaaggataatgttagagcaatcagagacaaagtcttttgaagtttaaaggaagagatgatctatttctgtttgaaaggaaaagtttaataaaaacaatagcatatgataatggatgtagaatgatgagttgctttggattggcaggagtgaaggcagaagaatcagttatttgcagatagaaggaacagtgagggcaaatgcatagaattgtgcatagatggggaacagttaagtggtcccatttgactagagcttagaatgtatggagaggggaatatgagacactgattggaagatagcccagggcagtgttgtaaaatgaaagtgaatggactacagaacggttggtctttgtagggtagtagtaggggattggttatgaggctagcataataatccaggcaagaggtaatcaggtttccatgagattggcaacaaagggactgaagtgaccagcattgcagagttagattcagcaccaggagtaaggaatcaatagtggccccaagagcttatgcctggaagatttggaaaatgaggcatcaaaacgacaatgtctgaaggagtagcaggttatgggggaagtggatgggtttggaattggacatggtaagtgttacatgctggttagatatccagggaaagatacctagtaagtagctggaagtatggatctggggcttaaaggagcacttcagtaattctttacataaaggcagtacagccatgaaaatagatgatgttgccagagtaagtgtggggagagagaaggtcaaggacaaaaatgtggagagtacttgcttagaaagggtggaggggccatcaaaggagtcagaagcagcagttagagaagtagaaagaggagagtagcagcgtggtacactgaggtcaccgggggaggagagaggacgcagccagccacagaacagatgcatcctctagggctagagggtcctgaaagctccgagagtaattctcatgtgcatttaggtttgggaatagatcactgttaattcaacagagaaatgaaagaagagaaggttcggtggggtccagccatgccctgttacgtggaattttttccctaagggtgtggtcccctcccctacagctcgtcttttggagggctggtccaggctcctctaagccatgacgccggctgaggatcagcggttggtgtacatgatctcctcagccttgcccattgtcccttgcaagacatttcttggatgggagtttccagtgctgggagaagttccgccccactgactctattctgctgtgtctcctcagagcctgtcatagggaactgcatggatagaagttctccaggacaagcagtggagctgccggatcacaatgggctcgggtacccagcacgcccctccgtccatgagcaccacaggccccgggccctccagagacaccacacgatccagaacagcgacgatgcttatgtatgttggtcccacctgctgcacagaggtggatcctcccagtcccagccttgaaacagagtatagtgatgtggggtagcctctcttggccgctctcctcagtcagcattcagcctttctggaaacggtggggagcatttctttttttttcttttttgagatggagtctcactctgtcgcccaggcgggaggacagtggcgcgatatcagctcactgcaacttctacctccccagttcaagtgacttttgtgcctcagcttcctgagtagctgggactacaggtgcctgccaccacacctggctaatttttgtatttttagtaggcatggggttttaccatgttggctaggctggtctcgaattcctgagctcaggcaattcgcctaccttaagagcattttctttgagtcaccctaacagaccaaaccttaattcaagtagaatctatgctccaaattttagaccaaagaatcagaaatagttgccatctgttccctgtagttttggttattaaacctcttctcagtctaaactcaggccccagcaaatgagcccataggcttctggttatttttcagcagctacattgagcttactcagatcaggggagctggtgggcctcagcaaagttttgttttcctagggtggtgctagtctagtagctagccacatgtggctattcaaatctaaaccaattaaaattaaaaacaatttaaaattcagttcctcagtcacaccagttacactttattttttattattattattttttgagacagagtcttgctctgtcacccaggttggagtgcagtggcgcaatctcggctcactgcaagctccgcctcccgggttcacgccattctcctgcctcaacctcccgagtagctgggactacaggcgcccgccacccttttttgtatttttagtagagctaaatttttttagcccagctaatttttcgtatttttagtagagacggggtttcaccgtgttagccaggatggtctcgatctcctgacctcatgatccaccagcctcagcctcccaaagtgctgggattacaggcatgagccaccgtgcccagcccagtcacactttaagtgctcagtagccacttgtggctactggttaccatattggacaggacagagaacatttccatcactgcagagtgtgactggacggtgctgtcctaagacaaagtcccagtggagatggggataggtcagaaacctggttttagaaggccatgtaggtatcaagatgtcaccaccagctgagatttgccacatccgccccaccctcagcccccccactgggcagagccaagcagcttcccacactgtcgctgtggagcaccccctttgggtggtgctttagaggaaggagtctggagtggggccccgggctgtcttttgcctgggctccttcagaaggaccagctgtctctaggggttgcctgagagtggtgtcttgtgtgcttatttcttctcttaactgttttctgcaggtacagctggataacttgccaggaatgagtctcgtggctgggaaagcacttagctctgcccggatgtcggatgcagttctcagtcagtcttcgctcatgggcagccagcagtttcaggatggggaaaatgagggtgaggagccttatgcatggggcactccagagaagttcctggaggggcctccctccatcttccgtaactgctcctctcttcgtaggaagagctcatggggaggtagagccacagcatcccacaggttctggacacagcccctttccccactggtcttccctgagtgtgggtgtgtaaaggaggtgtggcttctggccagatggcacagggctctcccattcctgtctctcatctctgtgatgatatgccttcaatcactttttccagttctgcttagagggcatcaggtcctaatggcacatttctacctcttcttggagccagtcaagggagggtgtcataacaaataataggcgtaggccttgggcggggcaggtctgccaccagtcccaaggctgtccttttcaggctctgcaggtgaggcacttggctttctggaccccgagatcctcatctgtaaagtggcaaaaacgatagagcctttatcctacattgtgccctgagggctggctggcttagtgagtatcaagtgcttagcacagtgtctggaagacagacagtgcccaggaatgggtgcctgcaggcagtaaaattattctccctttcactctttaagaggtgatcctttctgaaggagtcctctatcttctctcacactacagtagttgatcttacctaaggatgggaaagggtaaaggaaaagggaaaaaagcagaacaggtagaggagaatataggaagaatcttggcccccgcccatcgtcactcaacaccttgagggcctgctgtgagctagaattcagggctgggagtcaggctgtgggatgctcgacaggttgccttcaattcctcctctctctcccccttgctctcctagtcccccagttccctgccaacctcatacgttctttttggtcttgcagaatgtggggcaagcctgggaggtcatgagcacccagacctgagtgatggcagccagcatttaaactcctcttgctatccatctacgtgtattacagacattctgctcagctacaagcaccccgaagtctccttcagcatggagcaggcaggcgtgtaacaagaaacagagagtgagtgtcaccctggccagagccaaaccagccctgtggcccagtgcctgctcccaatcccatcaggagcttcagcccatgtgttgtggtggccagtgcagtcgacagtaccacgcctcccctcgtggccttcacagtttcttgcttttcattaacgacgctgctagttttagggcgcgaggtaggggtgggggtgtgcagaagaaatgctaaacacagtctcttggttcggttatgggaataagacacaagactcgccgtgtgttacaggtgctctagccttcatagcgacagaagtgagctacggctccagaggatgcaggtgacctccggtcagcataatgaggaaaggaggaagtccttaaactcagtcctaaaagacaaaacctggcaggaaaatatgtccagccatattttttaaggccatacagaagcaagtggcaggatattccagattagggaaatgtgtgatgagaggcccatggtagaaagaatggggaaattggcttgtttggctggagtaatgcaaagagtacacagcaggcaccattggttgtatctggaaaatccttgacagaagaggcctgatgaaagggaagccacttggcaaatccacatcagagcctcagtatggcaagctacctgaacacctgagggaaagtaaacccgttgcattttttaaaaggttttaaatggaatatttgagcctttctcttttcaaactaattctcctctgtgtctgctttattccaggttttgtgtacagcttgggaatgaaaaggttgattgtaaacccacagtatctagcagcgttgtgccaaattgcccttgtgtttctctccacccaaaatatcacagctgctttcctcacatttggttcatccgtgtgctgttcttttgggttctgagagggttttgccatgtttgcttgtatgaccaagtcaccaaggaaataaacaggaaggaaatccatgttctccatcttttgtgaaagtatatttgagttggtggttttttgttttgtttgggggtttgtgttttgttttgtttttggtatgttttcttccagaggtgatatactttcttttttttcttcctttcttttttttctttcgttccttttttgaaacaggagagcaaagcagttagagttcagaggccagcggcctcagggccactccctccctagccttcatcagcagagcaccctccatccccctgcattgctcttctgtgaaagcaaatactaaaggatgccatcctctggaatcctaatggcaggcaaagggagagaggaagggtgacggcttctggcacttagaaaacaaaaagaacaaaaaaagagaaacccccaagcctggaacgcagagaggtctttactgctgggatccacggaaaacatgtctgtcctagccaagatcatatgaagagtttggcacggaggctgagaatgacctggcatagatggtttgccagttaggatgtctcaatttgagcctttgcttttggtggataactcagctcccctcttgtaacctggaaagttggttgcctttatcatcctgctggttttatccatggactgaacacccaacagcagtgcactatgctttctatggcatctttcattctcattttatattgtgctataaaaaggattgtttctccatatatatattatatatgtgtgtatatatataatataatatatgtgtatatatatattatatatataatatataatataatatattatatatatattatatatataatatatatataaaatatatatatatatgctctcctctttcagcctctttgtcacagggaagaagtgtaggaggttgccttgggccctgcctctctcctaacctcctcttccccactgggtaccctcagcccctatattttaattcttgatcatgtagaaattgtttttggtaaatgttgatattattgttattatcattattaataaataaagagaaaaggaatttttgtttaaatgagaaatgtttaaccagattctgttctatttgaattgtgacttgcaccttttgttcaaagtatttcctttaggcattgtaattgtgaacagctcttacttgtgccagtgacagatgcagtggtctcctttccccagttgaagcagtgcatacgcagtagctattatttgtgttatctttatttctcttcattgttagaaaccaaagtcttctctgctggctggggctgagagagggtctgggttatctccttctgatcttcaaaacaagagagagaccttgaatacactgactcttccaccctttttttttctgggaaaggagagcaagaggtcccgagtcccctcctagtctttcatcctgaatttgcacagaggaaagcgggtgcccggcatggccatcctgatgttgctggcgggatccccatgcaccttgtccttctccactgatactggcagctcggctcctggacccaagatcccttgagtggaattctgcagtgcaagagcccttcgtgggagctgtcccatgtttccatggtccccagtctcccctccacttggtggggtcaccaactactcaccagaagggggcttaccaagaaagccctaaaaagctgttgacttatctgcgcttgttccaactcttatgcccccaacctgccctaccaccaccacgcgctcagcctgatgtgtttacatggtactgtatgtatgggagagcagactgcaccctccagcaacaacagatgaaagccagtgagcctactaaccgtgccatcttgcaaactacactttaaaaaaaactcattgctttgtattgtagtaaccaatatgtgcagtatacgttgaatgtatatgaacatactttcctatttctgttctttgaaaatgtcagaaatatttttttctttctcattttatgttgaactaaaaaggattaaaaaaaaaatctccagactcaagttgctaa

SEQ ID NO: 15806 - DNA, 252845 bp, Homo sapiens
ggaggtttcactgcacaacaagatggcggcggcggcggcgagcggagctggcggggctgccggggccgggactgggggagccgggcccgcgggccgcctgctgcctccgcccgcgccggggtccccagccgcccccgctgccgtgtcccctgcggccggccagccgcgtcccccagccccggcctcccgcggacccatgcccgcccgtatcggctactacgagatcgaccgcaccatcggcaagggcaacttcgcggtggtcaagcgggccacgcacctcgtcaccaaggccaaggtaccggcgcaggggccaggcggcagtcggagcgtggcggggccgggagaggtccgcgccccccagccggggggtcggggcggcgagcgcggcgcgtggtgggagcgttgggggccgggaggcgggagggagccagccgcggcggggcgggcgcggagctagggacacctgggactcgagacggcggaactccaagcagggggccgagggcacagagcaccggcgcccaggagccgggcgcggggaggggtcctcggggctgagggcaggcgggtaaaggggatgattggaaagaaggggtcggaactccccgagggccgggagactgtaagcccagaagactctggaaccagcagctagggaatcataagggaatgagggcaggggcatatgaaatgtggacccggaggatggggaaaaacaagggtgaagtggcagacccgggcttgtaaggggacccaggacggctggggcacggactgggaatgtgcacgtctgcagggcgctgggaggtcccaggatcctggtgccttaagacagagacaggaatccgcatttgatcatctaagactgatagatggtgcgaaggggatcccgaggagacacgattagtggaggaggcaatgaggaaaatggggaaataagggggaaattgctttgcttgtccacaggaaggggcccagggaatgggggagtgaggtgggggtgggggctgtcccaggtttatgatggcactaggtagtcaggggttaaacaatttgggagagctgattgctggttatttttagttgttggagggtcgggaattgtgggctttgtagaacccagggtgggcttttactggttggggggaagcttgtgattgaagaacccagacaccgggagattacactcatcgagcccttagttctcaaagggatttgaggcgctataggagtgaaattggccaaggtcaattaggaagctatatatgtatgcatgtaaaattctttgaggaaatatggtagcactttcatgtagccttcgttgggaggactggaatctaagacatcaggaggaatcttttggttttggtggaacccgcaaagcccatttttactctaaaattttctttgctcaatatcttacttgaatgaatacttttaatgtagtcattcattatgtttagaactgcagcttgtgttttccctcagcctgaggaatgaagaacccttacagctgctgccgcctcctaccaaagccacatcaattcccctcacctcctcagcctagcctctggttgtcatgacctaccttgtttttgcttttttggcagtggcttgttttctgaagccagtgacttatctaggccttctctcctgatcacttgcaacctgaagttccttccccaccatctttctgcctgaggctacaaggggcccttcttaccagggtgtcagggtgggtggctgtggcgaattgattggtcagtttcacttcctctggagggccctcttcagcctttttgtccgtttttatcacagggcctccagtctgcaggtcagagctgaatgagataccaaagtccagggctccctcagaccctgaggggaagtcaggggaagtcgattgagccaagactttggtgtgctcctcacttgccaccccagcccctcaccgtgtttccagtctagttgactattagccaaggcaaacttacatttacaaacaatatgccttgttccttgttttgctatttctttcctttttttctgcctattttctgtgtaatcactttgtgctcctgtggttattttgctctgacctctgggggatagtctccatgaacttaattggttgcctggtttatggtttcatgatttaaagaattttgaatcttccagcccttggatacaccaaaatattgataaaatctgttacagacagggttgaatgttttcgtaaatgtaattgcaaacagttgattcttggctttaatataaaagagacatttctatcttcagtagtcagcaaagccagtgcctaattatggctggtctgcccgctttctaattttcatgtgtgtgtatatgtgcgtgcgtgtgtttttcatagtttttctctgagaccttggtatcctttaggactgcagcattttaaacactggcttgtttacaaacgggtgtcactgtttatgttggtttttatctttgatcatttgtggtatgcagttgtgcaattcctatgtatggaaatattcaaagtcttgaatgagactgaaatggcttggacaatgagttgcatgtgtgaaggagccacaccagcattcatttgtgtttctgtagcagtgtgcaatttcctagttacagttacaagtgctatatcttttgctgcttaaattactctgactacatgagtgaagcttaattcacaaggagttgtcacgtgctctgggtgaactaggagcatattttggcctgctccatgcttctctgaatccactttggaaggggttctcaaatgcggacagcttagatgtgcctaacagctgtcgacatacagtacgatggcctattaaggttatggtttggttatataacaatggtgaaggtgcataggtactagaagttgccgaagctgctgcttcagttaactcaggttgattttttttctccccatgcactgcagcctttatcttacttctgcagaggggtcatttggaaacagagagttatttttttcccccatctgtctccagaatgtgtcatttgttgttttgtcttttagaggtgtgtgatttttttttccccttgtaggaaatggtctgggttttcttataaccatatataacagtcagacagaggtaattcagatgatacttgtgttggctgaaggaggttaggtaataggtattttctgaacattagaaataattatgatccccctcctttttttttttttttttttttttaaacacacatgacccattccaagaactaagagactaaagtaaacctcatttattgagtaggatactgcactccatccaatactgcgtggttaagctggccctttcccaaattctgttaactctcaaaccgtctagagtgggatcctgggatgaataaaatcagtagagaaaagtgaagcttttcctatttggttgttggttacttttgcagcacggcattcatgagctcagacttcatattggcagcactgcagtgcttagagcggcactgcagaacagttaccaggagagaatgttcagctgtgacatactttggttagtagctcaccctggctgtctttgtcctacctgctttgatttccttttctttggaagagccttacttagcctgaggttctctggctctgtttttttttttggtaggaaactataaagtattacagatatttttaaaaaagaatgttttctgctctcaaattgcaggtagtctgttgcctgtgcctaattataccttcactagttggatgattgggaacaaagagtagatagattttgtatgcattttttttccttttttaaaatattggggcagggtcttactctgtcacccaggctagagtgcagtgacactgccagagttcactgtaacctccaactcccaggctcaagagatcctcctgcctcagcttcctaagtagctgggactacaggcttataccaccacaccaggttaatttttaaattttttttgtagagatgggggtctcattatgttgcccaggctggtcttgaacttctggactcaagtgatcctcctgcttcagcctcccaaagtgctgggattacaggcatgagtctgtaacccaaatgcttggcccatatgcattttttaaagtatgcatgactataaaagcctttggccaaatacgtttaaactatatttcaacaaatatatatcacttgcctgttattggtttgtggtaagagttccagctttggataaagcaacctgagtttgaatcttttgctgcttaatagttggatatttttaggctgtgagaagttatttaacttctgtgtgcttgggtttcctcatctgtaaagtgggatgacagtagtacttacctcacaagtttaggtgttatgaagattaaagaagatagtgtatgtaaagctcttagagcagcatggtgccctaatagcatgacgtaaatattaccatcatcatcatcgttatcagatgttttagtaacataataatattatggacataataatagtcctcctttttttgcttctcaccccttgggcacgattcatgaatgtatatgccattagttttgtgtaggtagatgccatcctgacgatagactttcctggtaaaaaaaaagtttgctactattgcaggtgccactttgagatagttggatttaatttgtatagggtacaggctggctaatctcatgaaatcagcattttaaaacataaattttcattagttaaacttttttttttttttttaaatagcaatgtgacttatctaatgaaaactgtgaccaacactggcttttgctttgggctgccttgaattttcagtgtgttttgtgtaactaatttttgttatgttgatgatggaacagagttgagtgcagtcttttctccagaggtccacttaaattaggtttaagtgaaatatttaagaaatgtttctgcaagcttaaggacacatttgcccttgcgtgcacaagcaaaggccttagacggccaaggtcagaattcttaactttaaatattacacagagaagacattttgccctatgacccctttccaaatattgactagccagacacatcggtgtggtttagtgcaaactcatttccatgaggagaacaagtcaaagtgggctaaaagcattattttcacctctaaagaagagtttaacgaagcacatgagatgatgctttcacccattagaaaactgaaaacaagattcatttggtaagtaggagagaattatgtcaaaaagaaattgaaagcagaatttacattagatacatttgaggaagatagccccatccctagacaatctagaagtgactattgaaagatgattatgttcagtttgatacagtggtgatggggttgctaaacgtttttgaaattttgtaaagagctaagactgattgagactagtctctccagagtcaaaataccagtattccattttctacatcaaagatgtttattttaacattttgactttggtgccagctccctagaaagtcatagatctcgctcaagccagaggtgcccagactagttatttctgtgccagaagtgctgttttcatttttcaggcttcagtctggctaatgttttctagttcatcgcgtaaaagagaacaaaatggatgctttgaaaagaaaaagaaatgctttctactcaccagagccactgtaactgtaaaacaacacctaagacatctgcatagagatggaacctttcccttaatcatttattcattcaacacatttattgaatgaaaattttttgtcaggttccattctagggtctggagtgcaccaatgaacaagggagacaaaaagcatctgcctttctggagctttctagtagaaggagacagacaagggacatgtaaaaaaattaaaaatttcatataggaatgaataccaggaagaaaataaacggactagagaatccctggggggggctgctgcctcagatagagtggtcagggaagacctttctttccaagatgatgatatttgagctgagacctgagtgatgagaaaaagccaacctgggaagatttggaagacagaagattccttacagaaggaatggcatgtgcaaaggccatggggcagaagtgagtttggtttggtcaaagattagacacaaggtcatgatgccatggtaccttagcaaacaagtggaaggatgggaaaagatgaggccagacatgtaggaggggccagatcatctgggtcttatggccattttatggaattgggtgtgacacgggggtgacatcagagagtatcaagcagaacactaatatcacctaatttatgtttttaaaacgtggctggatgtggtggctcatgcctgtaattccagtgctttgggggggcatgaggcaggaggatcacttgaggccaggagttcaagaccagcctgggcaacatagtgagatcccatctctacaaacaatttaaaaattagctgggtgtggtggtgcgcacctgtagcctcagctacttgggaggtggaggcgggaggatcacttgatcctgggagtctgaggctgtggtgaactatggacacaccattgtatcccagcctgggtgacagagtgaaaccctgtctcaggaaaacaaaccaaaagaaaaacagcaactcatgctggttattttatggttaagagcaagaatccttttctgatgcatttcttggcacaagggaggagttcagttttaacaacttatattctttctcactgtagaggaatattgacataaattgcacataaattaagcatgatcaactaacaagtatttgttgatttattgggcatgaaaaagaccttagagaggttctattctagttctgtcttctccacagtctggaaagacagacttaacagaatttataatctcaggttttgcctggcatggtggctcacgcctgtaattccagcactttgggaggctgaggcaggtggatcacctgaggtcaggagttcgagaccagcctggctaacatggcgaaaccctgtttttactaaaaatacaaaaaattagccaggcgtggtggtacatgcctgtaatcccagctacttgggaggctgaggcaggagaattgcttgaacccaggaggcagaggttgcagtgagccgagatcgtgccgtcgcactccagcctgggcaacaagagtgaaactccgtctcaaaaaaaaaaaaaaaaaaaaagaaaaaaaaaacctcaggattttacggacttttaaagtcatttagaccaattatccattagattcatggctcatctctctcctcactcccattttcccggagtcttataggtagttagtgggggagctggagttagaatccagttatcactactcctacttaattctaccctgacttctctaatcacagaaaacagtgcccttgccttctgagcacttgcttttttactggggaagcgagatacacctataccaattaaagtctaagatatttatcctttctataagacaaaccaaaagcgagatgtcatgatgagaggaaacatttccgagtagagaggaagagtaaatattccaaccctgtatttcacctgtcctttggcattataccactctgtcacctttgccactaacttttagtaccctatgggtccactgctttgcctttaaatctgctagtcagatgccccttggcatgactgagatatgaagaaaatgaaaagggaaagaagtaaacacagcatgcaatgaccgtaaaagtagtctgccttacgtagttttctcatgtcattatatctagctaactcctagggaatattggtaattatacatttgttctgctgggctggtctgatctacctttgagggtatgtttcttagatgggctcctcacttactaaatgactaacactttccagggatggtgacatcttataactcattaagagaactggtcatctagatatataccttgatgacacaggtgagggtcaagagaaccatttatatcaagggttcctcttttttttttttttcattatcctaagtaaacacaagaaggaattcttcttaatatagttctagtttctggtctgtgggctatggctgttctccagatgaatgatctcacctatcaggtaggtgagtccctggttcctcctaatagcgagtagcttggtccctttctgggataataatgtagtcatacagtcccgtggatgactgataacatcaagagggtgaaaattatatacattcaaatgggcttttatcctaatctaataaaatattgctaaataaatggcgtaggcaatgtccttgagaagtctcaacagtcttgaatgaattagcttgaaagacttcttttggatctgttcagaatagaattgcggaagcgagtacggaactgttggatgagccatcagtaagttatgttaggaacatatttgtgtttagcaggtgtgtgatccgtggtagacaaggagcctctggacactgatggtattttatctcagacttaggcttttcaaagaggtaggaatcagattgtgaatacttagccacatttcccagaagttgaaacggaaagagaagcagactcattgcctgttgaagcttgtctgtgtgggctgagctcactcagttggatactttcggccagttattttaaactaaatttaggttttgatgaagttctgaaaaattatcaaatttctgtctagtttcagctccagcgcatgtttaccagcagtatactttacttttcatagctccccccagaattgaatgtgaaaatgtaggttagttgcccacatttcttgagacggaattttttggagaagaaattttttattccatccatccatccaataaacgtgcaaaattatcagaaatagaaatggatgatatatggcccaaaattcaaaaggtacaaaggagcattcagtgaaatgaagtcttcttgccaccccaatacctgagtcacacagtttcttagtcttttttttttttttttgagacggagtctcactctgttgcccaggctggagtgcagtggcgcgatcttggctcactgcaagctccacctctcgggttcacgccgttctcctgtctcagcctccagagtagttgggactacaggcgcctgccgccacgcccagctaattttttgtatttttagtagagacggcgtttcaccatgtgttagccaggctggtctcgatttcctgacctcgtgatctgcccgcctcagcctcccaaagtgctgggattacaggcgtgagccaccgcgcccggccagcttcttactcttataaacatttattaagggcatctctggattagtccaagtgctagatgccgtttattttctgacagtgctttgacatacttgaaatttccaagcataattttacttaaaagtaaaaaaagaaaatacctggccagatgcagtggttcacgcctgtaatcccagcactttgggaggctgaggcaggaggatcacttgagccccagagttggagaccagcctgggcaacatagtgagaccttatctctgcaaataataataataaaaataaccaggggtgtggtggtgcatgcctgtggtcccagctactcaggaggctgaggtgggaggatcgcttgagcccaggaggtcaaggtttctgtgagctatgatcgcaccactgaactccagcctgggcaacagagccagagcacttctcaaataaaaaaggaccaaagaaaaatacctaacctaacttatactgctcattaggatggcacagtgtgataatctaatgtaagccctgtgggggccggaattttaatctgttattcactgctgtattccttatgtttcgtgcaatgtctgcagatattcattgagtacatgaatataaggattaaaaataagagctgagtttgtttttatacccttaatacatcttttgacttttactattggaatttcctatctatagttaagatgttaaagaaaagtaattttctacctttttctcacaaatctccgagtaaggagatttcacagcttttctgggctagtaattgatttttggcatatctcaaacttttactattaggaagatcagtgtatctaaagtaagtcttgcaatttgaattcaaatcccttagttttttgttttttgtttttatatttttgagatagggtttcgctttgtcacctaaggctggagtgcagtgatgtgatcatggctctctgcagcctccacctcctaggttcaagtcatccttctacttcagcctcctgagtacctgggactacaggtgcatgccaccatgcccagctaattttaaaaaattttatttttagtagagatgggggtcttgctatgttgctaggctggtcttgaactcctgggctcaaatgatcctccctctttggcttcccgaagtgttgggattacgggtgtgagccatcacgcctggccaacatcagttttactttaccataacattgctgttattttttgaatcttttttataattttatttctagtttttcactttacaaattttctgtgataaccattgttgtgcacaagtctttgatgtacttctgattttttgctccggatatattgttgaaagggaaattaccgtgccaaagggaacacatgcttgtacggcacctaatatgtatattgccacattgctttccagaaaggctgcactagaattaacctcctgagcagtgtatgagcaggcttggctcactgcaagccacactggctctctttatcttatctgtctccccatctgcctttgttggcttgggggtgtagggcttttaagtctctactacacctctaaacctagtcccatagatatagtacaagtcaggagaaggttatagcagctgtgtaatccatctttccctgtaccaaacctggaagaggaatgacaagaattcaagtgtaaatctaacctttttttgaggcagagtcttgctctgtcacccaggctggagtgcaatggtgcgatctcggctcactgcaacctccgcctcctgggttcaagcgattctcttgcctcagcttccctagtagctgggattacaggtgcccatagccacgcctggctaatttttgtatttttagtagagatgggtttcaccatgttggccaggctggtcttgaactcctgacctcaagtaatccaccccccgcccccagcctctcagagtggtggtattacaggcatgagccaccgcacccggccaagtctcaccttttacttgctttttataaatcatcattctctcctgatctttgataaagggacaaaaacccaaactggagaaattgctgaagggaagaagaaaggttaatgagaaacagactcttgatcacccaaaccattgattttttttttttttttttttgagatggagtctcgctctgttgtccaggctggagtacaatggcgtgatcttggctcactgcaacctctgcctctccggttcaagtgattcccctgcctcagcctcctcagtagctaggattacaggcacgtgccaccacacctggctaatttttgtatttttagtagagacggggtttcaccgtgttagtcaggctgctctccaactcctgactttgtgatccacctgcctcgacctcccaaagtgctgggattacaggagtgagccattgcaccttgcctctccactgactttttttttttttgagacggagtctcactctgtcacccaggctggagtgcagtggcgcagtctctgctcactgcaacctctgcctcctgggttcaagagattctcctgcctcagcctcccaggtagctgggactacgggcgcccaccaccacacccggctaatttttttgtatttttagtagagacggggtttcaccatgctggccagggtggtcttgaactcctacctcgtgatccactcgcctcggcctcccagagtgctgggattataggcgtgagccactgcacccagcctaccattgatttttaaataactattttttggtaaaccagcgtgagaatttcagagattaataaaagttgtaaattgctcctccctcgttttaatggtgaaaagatagtcaaggagattgtgaaggagaaagttatatgaataaatatggtaatgcagcagtcctatcatgtttaaatttgctgtgtgcattgtactttatgggttaagagattttcaagggtaattgggccatataggatattgtgcttagtatgttgtggggttatgactgtggaattatctgtgttttggacatttggtggtaactgcttttcttttatctccaatagaagccctcctatacagtaagttttggttatgatgtgcttagttaattgaggggaaaaactgataaagcaggaaaatcagaaatatatattcatgcattaatctttttttggtttttcttttttatgtagacggagtcttgctctgtcgcccaggctggaagtgcagtggcatgatctcggctcactgcaacctctgcctcctgagtagctgggactataggcacatgccaccatgcccggccaatttttgtattttttgtagagatggggtttcgccatgttggccaggatggtctcgaattcctgagctcaggcagttcgcctgcttcggtctcctaaagtgctaggcttacaggcatgagccaccatgcctggctcatgcattactcttttaaaaagtatgtattgtggaaaatttcaaacataaatgaaagtagagggaataatataatgaacccctatgtgcctgtcgcctagtttaaacagttgtcatcttgtgaccaatcttgcatttatacctttcccacttccccgcttttttcctggattttgaagcatatcccagaatcctttcatttcatcggtagatattttggcatgtatctctaaatagatgaagattctttaaacaaacaaacaaaaccaaaccccagggctgggtatggtggttcatgcctgccatcccagcactttgggaggtctaggtaggtggatcgcttgaggctagctagttcaaaaccagcctgagcagcacggtagtagtgaggccccatctctaccaaaaaataaaaataagtgagcggtggatggtggtaagtggctgtagttctagctacttgggaggttgagctgggaggattgcttgagcccaggagttccagattacagtgcagtaaactatggttgcgccactgcattccagcctgtgtgacagagaccctgtctctaaaaaggaaagaaagaaaagagagagaaaagaaagaaagaaagattgattagcacataggttaatatcaaaatatcttaacctatgttaacaaacattaatgttttttgttaatattaaatattaatgtttgttaacataggttaatattttgttaacctgttgatgcagggccaaggctttttctttgtgtgccctagttggagttccttaattttgtttccattaaatacacccataattcattatctataatttccagttttgtttgctttttaaagcagaacatgaatttaatggcatttgtgaagcaatattagtacagcatccctcttgatttttatgactccttcccagtcttttatactcatctcattcacgtctaatttactatgtctttttaagcatttgatgaagttttcatagaaacgtatctccttaatttttcatcagtttacattctatttaattaaattacataactgtaataatgagcaactggtataaataggtttgggaaaaaaacagttaattattggtaagaatataacttaataacgggaggctgggcccggcgcggtggctcatgcctgtaattgcagcactttgggaggcccaggcaggcggatcacctgaggtcaggagttccagaccagcctggccaacctggtgaaaccctgtctctactaaaaatacaaaaattagctgggtgtgttggtgcatgcctgtaatcctagctactcgagaggtctgaggcaggagaattgcttgaacctgggaggcagaggttgcagtgagccaagatcctgccactgtactgcagcctgggccacagagcgagactccatctcaaacaaaccaaccacaaaaaaaccaaaaaacttaataatgggagcagcagaagcttataagagtaagagacagctgttattagttggggccagtttgcatgttgggggcattggttgctttactgagacaaggagaagcattgattattttggcaggttggttgagtgaaggtgggctaagagagcttctgcgttaatttaaaatgataaagaagtcaaagctgttagaaatttgaggacaagttattttatagaatcttttattatttatagtgtgtacttcgaggtggtatttttgtccacttatgttagaatttgtgtgaactgagctgaatttggtaatgagtcagtggtattaaaaacttggtgaagaaactggccaaactctttagtttaagaggtttatatctgttcactgctagtgtagtgttctgtggaacaagttgacattttcttgtagtaagttgttttctgtttctggcggaagcaatcttggttcatatgctgcaagaaacagaactgtttttattgtggaagacaggagcagagctgtgtgtttcttattaggatgagttggacacctgcaggatttcttctctctttctgcttcttgcctcctgttgtcttttccttctgttagaatgttctaatattgcataagcagcattccgacaatagttgaatttttttggtacttcatttttttaaactctcaaaataatgtttttagtgattgtatgttcttggcttactttccatttctacatcaacagggatattgttattctagtcaaatggggtagttgtattctggcaatgatctttgggtccaagtcagctgcagaaacaacactttcatatattatacctaaatatcttacatgtgtatggtaattctgggaggtaattaaatgttgggatggtactttaggatctctttaaaggatttcacagttctcaggaataaaataacttgtttgaagcatgttactcattggcctttgaccatgcaaaagggtagccagtgattttagcctactgcctcttccgatctcattttcctcctttcttttgaggcagcagctgcatccagtgccctgctctaattgagctcttagtaaaaggggtattgttataccaagtcacaacctcgtatagcagtgaggttacatcaatggttgttagatttttaggccacgcatccattttggagtcacattaaattttgaaaaccaaaatttagttgcattacctaaatttctcttccttttcttatcctgataccaggataagaataggttttctgtttttccagctctttgtggaacctttttggcccatcagagttgcttgcgacaatctgtagttaaagaactgagactggtgcgggaatcgggatgtttctggttccagtttttactagccagcagtttgactttgggcaaattacttaacctcagggggcttccagtttctctttaatttataattttttcaactgctttattgaggtacatttcacagaccatacagttcacccaattttttttaagtgtattcatggagctgtgcgaccatcactataatacattttagaacattttcattatccttaaaagaagcatggtacccattagcagtcactgcttatttcttcaacctctcttctcagccctaagcaaccacaaattaatttttatcgatttacgtcatctggacacttcatataaatagaattatgcagtgggtgtcctgttgtattttacttctttcacttggtgtaatgccttcaaggttcatgcatgttcttacatatgttggaatctcattatttttttatggctgaataatattatgttgtatggatacgccacatttttaaaatcaattcatgaattggtgggcattgtttctacttattggcgattatgaataatatggtcttgaacatttgtgtacaaatttctgtgtgatcatgttttcatttttttcttgggcatatacctaggagtggaatcgcttggtcatgtggtgactccttgtttaaggttttgagcaacttccaaactgttttccacagtagctgccccattttatattcttacctgcaatgtatgagggtttctgttctgtctacatccaaaacttattttcttttttttgattttagccatcctagtggatgtgaagaagtattgcattgtggttttgatctacatttccctaatgaacaatggtagtgagcatcatttcatgtgccagttgatcatttgtatatttcctttggagaaatgtctattaacatcctttgcccatttttgaattggattatttgtctttttattgctgagttgtaagagttctttatgtttgggatacaagtcccttatcggatacatgatttacaaatattttctgccattctgtgggttgtcttttcagtttcttggtagtgttgtttgcagcacaagtgtctttaattttgattctctagtttcttaatttatatagttgtttaaactctgaaactatatgttttattgagattattttcctctgtgctcattctgtactttctcccatgttcatatagctctctctttcccgggacgttttctagcctcaaagactttatttttttgattaatttatttattttgagacggagtctcgctctgtcgcccacgctggagtgcagtggcgccatctcggctcactgcaagctccgcctcccaggttcatgccattctcctgcctcagcctcctgagtagctgggactacaggtacctgccatcacgcccggctaatcttttgtaatttttagtagagacggggtttcaccgtgttagccaggatggtcttgatctcctgaccttgtgatccgcctgcctcggccttccaaagtgctgtgattacaggtgtgagccactgcgcccggcctctagcctcaaagactttaaaaacatctgtctatgtatttgcctctctaatacatgtgtcttacaaaataatcaaaccttacaaaatgtataacaaagaaagtgaaagttcctcatctctccagagaaaacattaactatttataaccagattttttccccattcacatggtaaaaattttttttaattaaaaaagggaacataccacaatctagtttgccacttgttttttcatttaatagtatatctccaacattattccatgtcagtacactttgtccttgtctcaatcattttaatggctgcagagtattctattttatggatatactatactttacatagtagcctattgatagattttagggttgtttctagatattgttttatttttttgagacagagtttctctgtcacccatgctggagtgcaatggcatgatcttggctcactgcaacttctgcctcccagattcgagtgattctcccacctcagcctcccaagtagctgggattacaggtgcgcgccaccacacccagctaatttttgtatttttagtagagacggggtttcaccatgttggcttggctggtcacgaactcctggccttgagtgatccccctgcctcagcctcccaaagtgctgggattacaggtgtgagtcagcgtgcccagcccagattttattgttttaattacaaattttacgtaagttgtttctgcacatttatatttgcacacttgtgctagtggtttttttttctattccatttatttgctattgcagtatttactattcaaaacacgtagacttattttaaaaaataaaagaattttatttagtgtgacctagagtcaacgtctcaaaagttatgtattcttttccatcatgatatatacaatgttctgatcttcttttaaagccagagtcttcattttcttggtaattgtatagaataatttactagaagtggaatgcttggatcaaagtatgagtgcttaaaatcatgtaagatgttgccacatcaccctccaagtaaggccatgccaattcactcagcttgagagtgtatgacagtgatttttctgttctttttaaccctggcaaatagcctttttagggaattaatctgacaggtgaaaaaatgtcattttattatttgtagttacttattagtacattcgagcatcatttaatttgtctgttggttgtctttctgctttgtctacttttctgttgggcttttggctttttcttattcatcagttgtcatagctttattattattattaatgttttaaaaaaattgagttggagtctcactctgtcacccaggctggagtacagtggtgcaatcttggctctctgaaacctctgcctcccaaattcaaatggttctcatgtctcagcctcccaaaatgctgggattacaggcatgagctgctgtgcctggcctgtaatagctttttaatattagggaaattagttaccttataaaatatattactgatatttttctttgtcttttgactttgtgtgtgtgtctaatataaaatgaaaatgcttttatttttatagtcagatttttctgtttttttttctctttatggcttgctttttaaaattctaattatataaaaatatttacccatttttttcaactacttttatggttttgtttttaaatgtaaatctttgcttcatgtgaaatgcattttgatataaaccaaatgagataggggatgagttgtagaatttattagagttgtaaatttacatttatttttgtgattattaatggcttattcctacttgactgtaagtctcatgagggcaatgtattgtgttgttttgtttttcccttgctcttattttcagtgtctagcacaatgcttgccttgtaatacaccctccatttattgaataaatgagtctaggtttttctccaggtctctagcttctcctgacacaattaattgcataattgctcttttccttcttgatttaaaaagcaacactatcatttacaaaactccaatagatacttaggtacatttctgaattctaatccattgagtgtgctgtcttttcttgctttgatactgtacagctttaattatgatagctttatacaacttaaagtatatttgggaggccagctttaagcactcttaaatatattataccacagtttgggaagctctataatctcctttattaaactttttgctatacctttggaaacattcatttaacttaacaattaaacacttaatccattctgaaagtcagcctgcaaagcagaaatgatttttggggtgttatttggtgtaaagagtttttttttttttaggatatcatacttaattctggcatgacctctttagtgtcttttaaaaaactctcattttataactttgggcatttctagaaaagcaacatttttctcacagttttctaatgcaaaatacacagaggggtaggtggcagaaaaggtatcgagatgattgtgttggcaccccactgatgtcgaagcagatagtggaaaagacattacttaaaagtgttttgcagatttcgggttaaattaaaaatatgacaattttaatttaatttaattaaaaatatgacaattctcaggccgggtgtggtggctcacgcctataatcccagcactttgggaggccaaggcgggcggattgcctgaggtcaggagtttgagaccagtctggccaacatggtgaaaccccatctctactaaaaatacaaaaaaattagctgggcctgtaatcccagctacttgggaggctgaggcaggagacttgcttaaccagggaggtggaggttgcagtgagccaagatcatgccactgcactacagctgggtgacaaagcaagactccgtctcaaaaaaaaaaaaaaaaaaaaggtgttatgcagatttcagtttagccaccttgatcctcccaccttgtgcatgacacgttaccttcctgtggcatgcagtatttgactgattcattggatgtgacttgcattaagttcagataacattgctgaataatcactttcttattctttagtgtagcctcctttctctgtagaacatcagaaattcttaaactctgaaatacagcattctcttgggattttctgtaatgtctttctcatgtaggaaccaacttcagggtcttgtgagcatcagagaagtttaaggtctagggaactgagctaatggaacaaggcatgcctaatgtgataaaatccttgctttctttgcaattgaaattgtttattctaaataactgctaatttacaaatgtattttcacatgattacccattctgttctcaaagagcataataggggttttgtgactttcagactttcctgaaaaagcctaaccgtggattttagaattattaagctagaaaaatacacacatacacacacaggtttgtttgggacccttagtctccaccctggaattaagtgacactgaaaataactctggaataaaaggtttttatgtagcagaatagttgacttacaggggttcttccctttgcacattttctctgggtagaaaatgagcttgtttttcttttagttgtattacaattttttttttcctcaatgctagtcttaactgagagatttttaggcagttaactctcccagcacagcaataagcagcttattagtagatattatctcttgttgatttgttacccttgagatttactgtgcttgcaaaacacctgtctgtatttgagctttgctaggtagttggcttttgtgtttgactgaagattttttccaaagaaagcaaatagctattaggaaaagaaagagtcagcaaatttctgtatgctttcatggaagagatttcccaattagaaagcttttgtaggcttaaccttttgccctaaagtaacccaacatttcattatgtattccattgaggttttggagctcggcaccagaaagcgaggaccaaggttgaatgtgaaaggaatattcagaggatgaagctcatagtcaacaaagtgctgcttcataggctaggtccaaaaataacctgcttgccatagggagcaagaatggaggtagcattagctgctgttttgagcagtgtttcatgtcctgtcatgtcattccagaatggttttttggttttgtttagagacagggtcttgctctgttgaccaggccagagtgcagtgtggtgtgattgtagctcacagtcacctcaaactcctgggctcaagtgatcctcccatctcagtttcctgaatagctaggactacagacacacaccattgcacttggctagtggttttatttttagtatagacagtgtctcggtttgttgcctaggctggtctcaaactcctggcctgaagcagttatcctaccttggccttccaaagcactggaattataggcatgagcagccacacctggtctcattccagaataattaaaattatgtttaaggcagccgggtgcagtggctcatgcctgtaatctcagtactttgggaggccgaggcgggtggatcatgaggtcaggagttcaagaccagcctggccaatatggtgaaaccccgtctctactaaaaatacaaaataaaaatacaaaaattagccgggtatggtaattagcgggtgcctgtaatcccagctacttgggagtctgaggcagagaattgcttgaacccgggaggtggaggttgcagtgagccaagatcgcgccactgcactgcagcctgggtgacagagtgagactccatctcgaaaaaaaaaaaattgtgtttaaggcaatatcatttaaaattttattttgggagaatgttgccttggtaaattggtaaataacagttgttctgaaaggtttcggaagaatgcctttctgctaaattgaagaaattaacataatttactcttctgtaaatagggggatggtctgcattgtgctcatttaatcattggagttcaaattaatgatttgctggggtcctgtggtgaatcttgagtgattaagagggagaactcagtccttggttcagaaaagttagcattggaatggatcctcaacaggccctgaaggtaggaagtgttctgatttagagagctcttccaaggcttgtgatggaaccctgcaacggtaagttttacgagtatcagtaactggccgggtgcagtggctcacacctgtaatcccagcactttgggaggctgtggtgggtggatcacctaagatcaggagttggagaccagcctggccaacatggtgaaaccccgtctctactaaatatgcaaaaattagccagccatggtggcaggcgcctgtaatcccagctactagagaggctgaggcaggagaattgcttgaacccaggaggtggaggttgcagtgagccgagatcgtgcattgcactccagcctgggcaacaagagcaaaaaactgtctcaaaaaaaaaaaaaaaaaaaaaaaaaagccaggcttggtggctcacgcctataatcccagcactttgggagccaatgtgggcagatcataaggtcaggagatcgagaccatcttggctaacactgtgaaaccccatctctactaaaaataaaaaaaaaattagccaggtgtggtggcgggcacctgtagtcccagctccttgggaggctgaagcaggagaatggcgtgaacctgggaggcggagcttgcagtgagccgagatcgtgccactgcactccagcctgggcagcagagctgagattcctcaaaaaaaaaaaaaaagaaaaaaaaataatcaataacatagaatgtggatatacatagcacatagatacgtatagcaagtcaggaagtttgcctagaaggaataaattaactcttgttacttggtgagatcatggaagggaatgtaatttgttttaggtggtggtaattgtgagtttgaggctggcccaggaaatgagttgtcagatatgctgtcatcctcattaatggttcagcttatttctcaggtttatagttgtatgaggagatgctatgcctaccccatttagggaactattaggttcaaaatcataaaagctaaagaagagtgaaatacagtgaaaagtatcctgttcacacataccccatgatcatccagatttcccttcccaggggcagttgatattatctgtgtcttatatgtcttgagatagtttatgtgtatagaagtaaatgtaaatatctactacttatttcctcttttaacacaaattatagtaaataatatacaatagtctgcatcttacttttttcactctcgtatctaatgttaaaaaagctacgtggtattccaatgaaaggatgtattatatatattttttagatatttcatttgagttgttttttttttttgttttgagacggagtctctctctgtcacccaggctggagtgcaatggcgcgatcttgactcactgcaacctccacctccctggttcaagcaatttccctgcctcagtcccctcagtagctgggattacaggctcatgccaccacacctggctaatttttttttgtatttttagtagagacagggtttcaccatgttggctagactggtcccaaactcctgacctcagggaatcctcctgcctgggcctcccaaagtgctgggattacaggcgtgagccaccacgcctggccttgagttgtttctaagctgttgctaataaaacaatgctagaggatttaaaaaaatatgttagggttttatattgacaagtaaatattgtcataatagaaacttgctatacttataataataatacatctatagaacatgttcataaatgtctatttgagccttcctgtaaggtaagtacaacattttatcacttcataactagtaaagtggcagaagtagaggtagaaccaaggtcttctgactcctatttgagtatctgtctactttacccaaaatacatatactgttgtggggctgtagggaagtgggggtgggaaaataagaggaagtagacctaggtggggcaagcttgagatagggatgtatctgtcattctagaaattgggatcctgtttgctaggagtaagtggaactggacatcagcctgttacagggacataaaggcacttaggcactggcagagcactatggtttgattgccatcttggagtacagtagtatggtaagccaaagagtggtagttctggagaagctggggactgtcagagctccctagaatagactgagagtgaaacagcattcacgatttgctaaggaggctgggctactaggaaggataaggtaggagcccaggagttcagggctgcagtgaattatgattgtgccactgcattctagccttggcaacagagcaagaccctgtctcttaaaaatattggtcaagaccataaaacaagaacataggccatagtgaaaacataaaattttcttagcagctgtggtagcaaacatgttaatggtaaggagataactgtaatgttagtcaattttggcttaagactgaggactgagaaacagccttcttcctccggaggagcagttaagtcatcttacaactgggagtagagagacaaggacgtgtgaagctgattcatgctttcattatatagttaatactatttggaaacctgtgtgtaggtctggtcaatagacttccatcttaattgctgtatgctaagtgcctcctatgttctgtatacttcatataattcttgctagccttcaacagctttttacaaagtaactattgttttacctaatttctattgagaaaaatgagcttcacttaggtaacttgtccaaagttctttaccttgtaagtggtagagctgagatttataagtaggtctatatgactccagggctcttgttctttccacgataccaggtattaggcatcaaaattggacagtagaattctaatcacagctgtacataaccagaaagtatgagtatggatgagtgttagcatgtaaccagacaacttgtctgttatggatgatttgggctgaaagagtagaaggaatgctaaggaaaatgagcattggagatgttgagagctcgcaaactcatgatgaatgtgtatataatttaagtaatgcacttgctgtgcatatgtagagccttaagataaaatttccaatgctcccttccctcattaggtttttctttctaaagtccttctatattgagattatatagctgccactaaagactgtagctggtagtagccaggacctggaactttttggcaagagggtgttatctggaggatccaagtatactgagatcaacataatcatgaattcttctcccactgtaaagtttgaggaggtaagaatctccttgacttagcaaatttgggcttataaatgctaggtccaactagactttactggcctcaatcccttagcattatcctgcaaaatactgatgtatactttttggataatacctttgatctactttcagccaccattgtagggaattgttagtatgagaggttgacattttggttaaataatcacttggaaactgtgactcagcattagtcactggctttctgctgggttacattctcttgtctcttgccttaattgtggtaagcctcagccatttgattacacaactaccaaagaggatgaccttagtgataacccattcacattttcagatagtaaaaatattagggacaaaatctttcatatgtattagcgagtggtatgggttcgcctctggagaaatgttagcacattttccaggtttgcccgatgatattaaaagatgaatagctatcttagtgaaaatagctgtttacacttttagttagtagtttttaaaagtggaaatgtaacaatatgctttttggacacagtcatgttattttatttttatttttatttttattttttttgagacggagttttgctcttgtgcaggctggagtgccgtggcatgatctgggctcactgcaatttctgcctccctggttcaagcgattctcctacctcagcctcgctggtagctgggattacaggcacatgccaccaggcctggctaatttttgtattttttgtggagatggggttttgccatgttggccaggctggtctcgaactcctgacctctggtgatctgcccaccttggcctcccaaagtgctgggattacaggtgtgagccaccacgcctggctgtggatatagtcattttagtatttgagattaaatattaaacctcatttggcgaactttaaaaccatcagtgatttgagttaattctacctgttttaccttatttttcaccagtgtgtgtttcctcactgcctcattatattgccacatttaatctttcattaaaacaaacaaacaaacacaactcttggctgggtgtggtggctcacacctgtaatcccggtactttggaaggctgaggtgggaggattccttgagttctagaccagcctggtcaacatagggagattctctctctcctgaaaaaaaaaaaaaaaaaaaaaaattaaccaagcatggtggcacacatctgtagtcccagctactcaataggcaaagtgagaggattgcttgagcctgggaggttgaggctgcagtgaacatgatcaaaccactgcattccagcctggaggacagagcgagaccctgtcttacaaaacaaaacaacaactcttggaatttctcttttcccctcccttcttcttccccttcttccttctatttatccttctgtttcatctacaaatatttgagtgtcactgtgttctaggcactgtgccagacattgggattcgttggtaagcaagagagagaggcatggcctctgtccttatgagcttgcagtttatcctagtgttacttatctagtctgccctgccttcaaggttcagtggaagcccgatcttcatgtagtcctttgacttctttggcccttgcaaacctatccctttgacctatgctactttaaatctgattcatacaatttagcatttattgatataatttcttatactgtgggctaattgtttaaatatcttgttttactggctagagtatagttccttaaggacagagactgtcatgttattttttttttttttgcaatactgagcccaaaggttttgatttcagtctgccctgctgaatgttgaagttactagtagctcttgggacttagaagtagtgatgagataatgccttgctttttagtttattttctattttgttttattttatgtttcttttttgaaatggtattgggctggccgcagtggctcacgcttgtaatctcagcactttgggaggccgacgtgggtggatcacctggccaacatggtgaaaccccgtctctactaaaaagacaaaaagttagccaggtgtggtggcgggggcctgtaatcccagctactagggaggctgagacaggagaattgctcgaacccgggaggcggaggttgtggtgagctgagatcgcaccattgtactccagtgtgggcaacacgagtgaaacttcgtcacaaaaaaaaaaaaaaaaagaaaaagggccgggcgcagtggctcacacctgtaaccccagcactttggaaggcagaggcgggtggatcacctgaggtcaggagttcgagaccagcctggccaacatggcgaaaccctgtctctactaaaaatacaaaaattagctcgtgtgatggcgggcgcctgtcatcccaactactgaggaggctgaggcaggagaatctcttgaacccaggagatggaggttgcagtgagccgagatcgtgccattgcactccagcctgggcgacaagagtgaaactctgtctcaaaaaagaaaaaaaaaaaaaggtattgttcagtcatccaggctggagtaaagtggcacaatcatggctcactgcagccttgaattactgggctcaagtgatcttcttatcttagcttcctgagtagctgggattacaggcagtagcgaccatgcctggtagattatccctttaaaaaaattccttctagttgtttgcctaatatttgttatctgcttctgttaatctgtgctaaaaatgagtggaaatgaccttactgattcactatttgcatttatattgttttctagtgaaggggttgtatttgaggttaccattgcatagcttctcatctagttctccttgtgacattataatgagggatgcatttcatgactaaggaatagagctaagctaatgttgatctcttagtagcatgttgtaatcttttgggcttaaatgccctatcactatgccttagttcatgaagtgttaaaagtaactcacctaaaatgggaagcggagaatgtaataacttaaagatcaaaatcgaatttctcataaagatttttagaaatagaaaataatcttttaatgggccaacattatttacattttatgatgttagagatcaaaactcttcctgagtagtaaatgaatgtggcgacttaaatgtgaaggagggaggctgtgtgattgacttaaatgtttttctgaatgtgctaaaagctctgaggtaatggcaaacttcaatattggaaatagaagggatatattctttattaagaaggagaatagagggtactgggggaaggaaatgctcttttgcctacacttaaaaattaagaaggtaagtatatgaaattgaaggggtaaaagaccacagagcaggagacaaggaaaccgttatttccctctgaaataattctagatggtgatttgaacaaaccagttgctaaaaaacttatatgataattggggcagtttgaacattgactgggtatctgatgttaaggaattattctcttcagatggggcagtagtatggtggtcatattgcagacaaaaagtacttaccttttagaaatatatactgaaatacatatggatgacggaatgtgtctgagatttgctgggggaaaggaagaagtggtcagcagtatagataaaatggccatgtatttatttataactgtctaagctggctgatgggtacaagaggcacattgtattatttctttctacttatatatatgtttgaaaatttccataaaataacaacaacaaacccccccccccccaaaaaaaaatcttaacaactaccagaactggcagaattgtcaagcctacccctttatcttctttctctctaattttagatgggcaagtaaagccatagattcatgctgatgtttccaaatgggaatgcagtttagatttccatccccttaagtttcaatctatctgtagtgcagcatcactgagagaacaagccctgctattttcccagcagtgtggtaagttacaacagggtaggagtcatactacccatctttaaggctcttcctccttataggtgaagaaataagatttaaaaagcaaaacataattagagaataggaaaatgtggtttaaaattatatgtcatattttatagttctggccaaacataagaaattctagagaaaggaaagaacattttgggttaggaataaccaaaggcttttcttttgaaacagggtctcactctgtcacccagtttggagtgcagtggtgcatttatggctcactgtggcctcaaccgcttgggctcgctgcagcctcagcctcctgggctcagctgcctgagtagctgggactacaggcatgcgccacctgtccagctaatttttgtattactttagagatagggtctcgctatattgcccaggctggtttcaaactcctgggctcaagtgaccctcctactttggcctcgcaaagtgctaggtttacaggcatgagccatcatgccagaccacaaagacattttttattaggccagtggatgttcggatcatctttaaacaacattgaaagttgaattgctgacagtaatatggggatagcattccagggagagaaaatactatgtttggtggagaatagatgaatttggattggggaacagaagatatttttgatgggtaggatggggtcatttcataaaggacatgaatttttagttgagacatttgggcttgatcttatagaccttaaggagccatttttggggtgtggggaaccatttttgacccttaagctacctaagtatttattaatttggtttgatgataatattgtgtattcttagttgcaggcttttgcatagagagtataacttgactttgtagcctttacattctttttaacataaatttgttatttccacagtgttccaaaagttattcagggaccagaattaatatttattttttacaaattatttatttatttatttttgagacagggtcttgttctgttgcccaggctggagtgcagtggcgcgatctcggctcactgcagcctccgcctcccgggttgaagcgattctgcctcaacctccccagtagcttggactacaggtgcctgtcaccatgcccagctaatttttgtatttttagtagagatggggtttcaccatgttggcctggctggtttcgaactcctgacctcaagtgatcctcccgccttggcctctcaaagtgctgggattacaggcatgagccaccgtgcctggccacattttgatatttttaatcaactttattgaggcataatttacattcaataagattgaaccattttaagtttacaatttgaattttgacaaatatacacacccatttaataaccatacaatcaagatacagaacaattcagtctcgcagaaagttacagtagcactgtttgcattcattctcatcctcctccacttccagaaaaccactgatttgctgtcaccataggttagttttgctttttctggaatttcatataaatggcctcatctaggatgtactcttctttcatcagcattctttaagattcatttattgttgtttgtatcagagtttgttgttttttattgctgagtggtaatctgagtagtgttacattgtatggatgtaacaagatttgtttattcattcacctattgatgaacatttggattgtgtctggttttcttgcttttatgaataaggctgttatgaacttcatgtacagctttgcgtagatgtatgttttcatttctcttaggtaaataccttacagtggaatggctgggtcatatggttggtaggtttatgtttaacttttaaagaaactgccaaattgtcttccaaagttgccgtaccattttatattctctttagcaatatatgagataggagagttctagttgctttaaatccttaccattgctaaaatgatatatcttaaattttagttgttccaatagttgtgtcatggtatcttgtggttttaatttacatttccctaatgactaatgatattgagtatctttttatgtacttattttcatgctgtgtatcttctttggtgaagcatttgttcagatcttttgctcattaaaagaaatgggctgaccgggcacagtggctcatgcatgcctgtaatcccagcactttgggaggccaaagtgggaggaccacttgaagccaggagttcgagaccaccctgggcaacaagcgacactctgtctctacaaaaaacttaagaattagctgggtgcttggcatgtgcctttagtcccagctattcaggagtttaaggtggggggatcacttgagcctagctgtttaaggctgcagtgagctgtgatggtgccattgcactccaacttgagtgacagagcaagaccctgtctttccaaaaaaaaaaaaaaaaggattgtttctttatagttgaatattgagaattctttatatatcctggatacaagtcctgtgttatataaatgctttacgctttgcaaagattttttttttttccgattccatggcttattttttcattctttcagcagtgtcttttgaagagcaagagtttttagaggccaggtgcggtggctcacgcctgtaatcccagtactttgggaggccgagttgggtggatcacttaaggtcaggagtttgagaccagcctgaccaacatggtgaaacctcatctctatgaaaatacaaaaattagccagacatggtggcgtgtgcctgtaatcccagctactcaggaggctgaggcaggagaatcacttgaatccggaggcggaggttgcagtgagctgaggtcacaccactgcactccagcctgggtgacagagcaaaactccatctcaaaaaaaaaaaaaagaagaaaagaaaagaaaaataaagtattctagtgaagaccggattccttggcataagacaccaggaattttagattgataggagtaaaaataaataaagaaatattggctcagggaataaacttcattaaaatcaatttatgggccaggtttggcggctcacacctgtaattgtgcagcactttgggagactgaggtgggcagatcacttggggccaggagttcgagaccagcctggccaacagagtgaagccctgtctctactgaaaatacaaaaattagccaggtgtggtggtgcatgcctgtaataccagctactagggtggctgaggcagatgaattgcttgaatcctggaggtagtggttgcagtgagctgagatcgtgccactacactccaacagtgtgagactctgtgtcaaaaaaaaaaaaaaatcaatttatgaaagttatttttaaatttgaagatattgaagatactaaatttgtgtttaaaaagcatttattttgatcaactccgctgtatagaatattttgtcttaagtcactgtaaagtttccatgccctcaaatgaaatacagtgccaggtttaacattcgttttcatggattgttttcaaaagttattgagttgtctgatttgctgtaaaaaaaatgaaaaattcatttcttttattaacatgatgtatttactgtgattattctaatagactaatggacttttaattttactgtttaaaatagtttataattaaaatttaatatccagtcttcacttgttctttcattttttaaaataataaagtagtttggggtttatcagaacaagggaagaaaccaagctacgtctcattttatgttgggtaagaatcactagagacgaaattattattattattattgttattattattattattattatttttgagatggagtctccctgtgtcacccaggctggagtgcagtggtgcaatctcagctcgctgcaacctctgcctgctgggttcaagcagttcttctgcctcagcctcccgagtagctgggactacaggcgtgtgccaccttgcccagctaattttttgtatttttagtggagatggggtttcaccatgctgaccgggctggttttgaactcctgacctcgtgatctgcccacctcggcttcccaaagtgctgggattacaggcgtgagccaccgcctggccgacaaagttactttctatgggatcaattcctgagttttatctaacacgagaattttagcaattaaaagtcaagtgcagttcagatatattagtttaggtaatatttttagtgtttgaagagagctcaatttgtaagccatttagctactaattaccctgcctttgctgtagaaagaacttaaatgaaagacctgttttaagatgcctttttaaaaagcagccgttgtaggtataagagttgaaaaatcaagatctaggcagcagtggagaattatgaagtctgataagataatatgctaaaattgtattgttaattctgatttgtgacagtgcttatcagtagaaaagaaatgtgatctgtggttaaagactgaactgccactaaatgtaaaatgttttttagatgagttggaagaatgctgaaccagtctttattgcccaagatggctttgagtcagcaatctcaaagaataaagaaaaaggagttaagagtgagaggcaataagtaatatgctgttttcatttaagatgtcttgaagagataattaaaaagttgtaggggtataggaattgtgatgtttctctggtgttaatgaagtctactataaattagataatacaggcactctaaattattgtttttccttttttaaattcttggcagttactgacaaattatactcaggatcaagtttaagtctcagtacatgaatgaccctgacattgaaaaccctgaaggatgttgaccttagttttgacctggctttatcctgagcagcctctgtgaattcttaatgctgtgctctttaacaggggtactttttccagatgtttttgatactgtattcattaacatataataaagttatcagtgtccctgaaggctaattttttttttctgactgaatatgagatatggagcgtgcaatttgtacttattggtattaacattaccaacaaggtttgtctttttcttataagatggggaatcttaagaaacttcaggccaggcgtggtggctcatgcctgtaatcctagctttgggaagctgaagtggggcgaatcacttgagatcaggagttcgagaacagcctggccaaggtgaaaccccgtctctactaaaaatacaaaaaattagccaggcgtagtggtggatgcctgtaattccagctacttgggaggctgaggcccgggagacagaggttgcagtgagccgagatcatgccattacactccagcctgggcaacagggtgagattccatctaaaaaaaaaaaaaaaaaagaaacttcattaagaagttaaagcctgggtatgctctccttgataatttctttttactcacatctttattggtaaatcaggccagaaggattatttaccttttcagaaagggaaactaggttctacggtttggttacagatagcctggcagctgactttacattgggcagaggagactgccgtacttagtggttctgagaaaccaagagagtattgcctgctacagctatgagaaaaggtattgaatcttccccctcctttgtgggggaattccaatctcactaatttatggtttcagtgtagttatggtcatagcttctgagacgtgggtactcattgaagctaacagttttagagaaaggggagggtgtttaattccaataactggtagtttatatcactttaataatttagacccaatgatatgaagattagttagtataaggcagatatacatgtaatacattcttttaaatattgtacaaggagtaagaaacccctttaagtagtcatgtaattcattatagcagctgaacatttctaagtgcaacattataggaaaccagtaaagctgatttctgatttatctgcagcaaaagaatttaatattccaacttcagcaaaaggcaattaaaaacaaacttaaatcacattgtgtgcttttaatacgtatgtttttttccatgctgtctgatgtattttagttcttagtcatttacttccattagtttccaaattggttgagggaattaaattggtagccaagttacctatacaagattttcctactgtgtatgtgaaccactctttctgggaaaatcctcccgttggcacttttcttgaaggcatgcactttttccacacttagtgatttggggactgaagcctgcatttagcctgtatttagtcagaggtgacaaatggctaaattttttttttccagtttagagattgagaaatgattcagaattgaaactaaagtgaatttggacttactgtatttctttgcaattacttttaaacaattgctgtctgttactattaggcatattttggacctatgggttccattttgggccgatatttggtgttatgttgttaaatttcttgcctggcttagatggttcattgttgaaactaaactggaactaggtttgatcagagggccaatggaaatgcacgttgtggcccatttggggaggacaaaatttgacatatttttactttaagaattcttaggaaaatttggataacgtgagaatatatttccaaagggttaagtaattttcgagggaaaatcagaaagcttgtaattcctactgaaaatattagcctgctgaaatattagcctatttcctactgaaaatataacattagcaggccgggcacagtggagttcacgcctggctaatttttgtatttttagtagagatggggtttcaccatgttggccaggctggtcttgaactcctgacctcaaatgatctgcctacctacgcctcccaaagtgctgggattacaggcgtgaaccactgtgcctggcttgacttttttatttaaaaaaaaaaaatctatacccaattgccctatcagtttatcatttactcacttatttgaaacggtcatattaacatacactctttatttatttatgtgcctatactttgttttaattactgtatctttagaatatgtttcaaaatttcattaactattataattgattctctttttttgtaacgtatcatcagcaaataataatttggactcttctaatatttctgcttatttattgacattttcaaagaatagcttatgattgataataatcataccagcgaatacagtgcttttcaacttaaatatgcacagcaattacctgaggatcttattaaaatgaagactcagtagggctggagtggcctgagagtctgcattttgacaagctcccaggtaatgttgacttatgggttcatagaccttatgttgagttacagggaactaagatttattgagtacttaatttgttctggtcagtgcttttacatctgtgaactcgtttaatctttaaaactccatgatgattattatccccaatttgccagtgaagaaactgacacttagagaagtttataacttacccaaagtgacgcaaccattaagtggaagagccagactgagcccaagcagagtttgcactctgaacctctcgaatatattgctttaccacatgcgtgttcgctcacacacacacacaacagacattatcttctcttgtgtgactcaaatggtaataccttaaaattttttttttaatgaataggctttattttatctattttttgagatggggtcttgctctgttgcccaggagtgcagtggtatgatcgcagcttaccacagccctgaacttctgggctcaagccatcttcctgcctcagcctcctgagtagctgggactaccggtgtgtgccaccatgcccaactaatttttaatttttgatagagacgaggtcttactgtgttagccctgcctggtctcaaactcctggcctcaagcgatcccttcacctcagcctccaaaagttctgatattacaggtgtgagccacagcatctggccaggctttatgttgagaagtttagagtttacagaaaagttgagcagaaagtacggagaaatcccacatatcccattatctctgcctgtcctcacgattttccctgatattaacatcttgcattagtgtggtacatttgctacaattgatgagcaatattggtacattaactaaaattcatagtttacattagaatccatagtttgtgttgcacatttgtaagagttttcacaaatttgtaatgttgcatatccattattacagtatcatacagaataatttcactaccctaagaattccctgtgctgtacctattcatcccttcctctcctcagtccctggcaatcactgatttttttttttttttttgagatggagttttgctcttgtcatccaggctggagtgcaatggcatgctctcggctcactgcaaactctgcctctcgggttcaagcgattctcctccctcagcctcccgagtagctgggattacaggcatgcgccaccacgcctggctaatttttatatttttagtagagatggggtttcaccatgttggccaggttggtctcgaactcctgatctcaggtgatccgcctgcctcggcctctcaaagtgctgggattacaggcatgagccacctcgcctggccaatcactgatctttttactgtctccatagttttgatgttaccagaatggcattattgcatgtagccttttcagattgactttttttcacttagtaaagtgcatttaggtttcctccaagttttttcatggtttgatagctcattgtttttagcactaatattccattgtctggatttccactgtttatttacccattcacctattaaggaacttgttggttgctttcaacttttttcaactatgaataaagctgctataaacatctgtctgcaggttttgtgtggatatatgttttcagctcatttggctaaataccaaagacagaactgcgtgatcatatagtaagagaatgtttagttttctagaaactgccaaactgtcttacaaagtggctgtactattttgctttcccaccagcagtaaatgagagttcctgttgttctatatccttaccagcatttgatgttgtcactgctttgaattttagccattctaataggtatgtggtgtctcgttgttgttttaatttgcagtagcctagtaacatatgatgtttagcatcttttcatacactatttgccatctgtatatatcggtgaggtatctgatcatatcttttgcccattttaaaattgggatgtttgttttcttattgttgagttttaagagttctttgtatattttggataccagtgcttcaccagataggtattttgcaaagattttcttctagcctgtggcttgtttatgcctttagttttttaccattaaatatgttgcttgctgtctggttgtgacaaataatcatcaagttaagaaagcttctttctttgtctctctaagagcttttgtcaggaatggctattcagggaagtccttgaaaattatttggctaaacaaatagattaagctttgtttttagcaagacatcctgttttattccatataattaaaaacacattctttatagtgtgatattaagactgtaactgagactttaattcctattccttctaaatcattttctcttactctgtgattttgtatgcctttaatgtccatgttgattacttgtccagcatcttaatctcatctgacttggtctttcttctcccagctatctgttcttccacttctctgtagcaatttatttctgtggccaaacgtccacttctggaattacaaatctgtaaatttttctctttgaacacaatttcctgtcttttcagttcttccatttgctgagtttattttctcatttcactgaggccgccagccccttaaatctccattgtctcccaatttgtgacattcttcctggcatcactttatcccatatggatgccataattggtcactttcaatgagtcatcagtatccgcagttctcctgcatctttgttcttctttcccacatgccatgcagatctccagctgtggattaacagtactgccctttttctgtgttcccgctctagggcctgaagaaatgatttcatcatattaatttgttcttttgctaatccatgggttttagcctcatctgtgcttattattctctttagtagttttctcacttgtttggagttgatttcatttctccttcaccagaatgacagttctttctaaatctttccacattttcctttggttcgtgtcaccttcctccattgcagctgattctacacttcagcagagtgacctttaaaaagagagaaaacaacaaatctattatgttatttcctgtacaatactgttcattataaagatggaggtaatttttttttttttttttgagatggagtctcgctctgttgcccgggctggagtgcagtggtgtgatctcggctcactgcagcttccgcctcctgggttcaagcgattctcctgcctcagcctcctgagtagctgggattacaggtgcatgccaccatgcctcgctactttctgtatttttagcagagatggggtttcaccatgttggtcaggctggtcttgaactcctgacctcatgatctgcctgcctcagcctgccaaagtgctgggattacaggtgtgagccactgcacctggccagaggtaaaattcttaagtttaacaggatctttctggttttctagcctcatctctgtcctcttagcgccttagcttcactggccctttttcagatccttcacatgccaagctcattcttagcacagggctttgtatatgctcttttctctgctggacaccttttttcttggcatgtttaatttgtatttatcttaaggacttagcttatgtgttcctttctcaagaaagttttccctgaccttccatttgcctaaaggtagattagattccctctgaaattattaatagtaatgatggtaacaacaataatagcagcaacctttgagtgtttatgagttgcagagactgttcttagcacttacacataggaagttttttggttttcatagcaaccctatgagttgtataggtgggtaaataagtaggacctagaattatctgcatcttatagatgaggaaactgaagtgaggaatgttaagtcacttgtccaaagtcacacagccatttggtagcagagttggaatttgaacccgggcagaccccagtgcccacgttctaaactgctgtgctctactgtaatggtgagtataactgtgtaatgttttttgttaatgcctacctttgttggtaggctctaagctcctcgaggtcagaaatcatacctgtctggttaatttccatggcctaggacggagcctggcatggagtagtctgtgaccgagtacttgttcctattgaatgaatcacagcttgccagtctactaaattgaggaaatagagggtttcagtgtgatccttttcacttttcctccccactgcttccaaatattaaactcccttggttaaaagaataggtgcctgtacttatttcaaaatctaacccctctacctgtttgccttgtatattctaggagtaatttatgtacttcgtaagaaaaattagtgcagatgtacataaagtaaaggtatacgtcttccattttttcctcctttaacgttttatacttccaggtgtcaactgctagtagttaaatcttcttctgtacatgtacacattttgtggacacttaaaatacacaagggtaatgtatgtagtattatctaagttttttaaaaatttaattttgatattgaacgatagtttcacaagatgtctccattgagggaaacaaggtaaagggtacaggagatctctgttgtttcttacaactgcctgtgactctacaattatctctaaagaaatggttaattaaaaaataaactatagaaatattttcatgtcagcgtattgacctgtttcttttaaatggctatgtaaaatgttattatatagatgtgtattactttatttcacgtttcccctattgatggacttttaagttccttccatttttcattttcaccaatattgccaaaggtggaccatccttgaatttgtaggtatatccttggttggtatatatgcacagccaagttttagaagaggagatcaaaagatgggcatatttgaaatgttggtaagagttggccagaccatcctccagacaagtttatactttcgttagcaggtgagatagaagctctgtgtgttcacctgcactgtcctgatcccattctgccacttcttcttggggactttatatctatatctatatctatatctatatctatatctatatctatatctatatctatatctatctatatatttttattatactttaagttctagggcacatgtgcacaatgtgcaggtttgttacatatgtatacatgtgccatgttggtgtgctgcactcattaactcatcatttacataaggtatatctcctaatgctatccctccccactccctccacctcacaacaggccccagtgtgtgatgttccccttcctgtgtccgagtgttctcattgttcagttcccacctatgagtgagaacatgcggtgtttgattttttgtccctgcgatagtttgctgagaatgatggtttccagtttcatccatgtccctacaaaggacatgaactcatccttttttatggctaaatagtattccatggtgtatatgtgccacattttcttaatccagggactttgttttattaactaatccttttccatttaatatatctacttccctgttggttctcttctgtctcctcatcctgtagcacatcctccaaactgatagagctttggttgctgtcagttcttttgtgctgctataggagaatacctgacactgggtaatttataaataacagaattttattttctcatagttctggaggctgggagggcactggcaggttcattgatggggatttggtctctgcttcttagacgatgccttgaatgctgtgtcctcacatggcagaaggcagaagggcaaaaagggagtaactccctccatcaagcccatttttaagggcacctaattgcattcatgaacggaggaaccctcatgacttaatgatgtcttaaaggcccgacttcttaataccatcacgttggcaacatctgacttttagaggcggagacattcaaactgtggccctagccaagtcctttgtgtgcttttacttatctttacaaccatcctatgagatagtgcctgtttctctgcctacttgttaagcgattatattcttctggattttgtccttggctcctctatccaacccacctgtagccccaccttctcttctgttccctcatccaaaccagagagaccaggatttgaatctggctccattattttctccctaagagacacggaatgatttactttgtctctatgtttctgtttctttctctgtaagtaagagtggggagactagagctacctatctcaggattgtgtggagtaaatgaataatgtgtgtaaaacatttaaaatagtgtctcatgtacactaagtgcttaataaatgctaataataggaatagtaacaacagtatagttacattgttattataaatctgtatctgtggtactcttagcttaagttcgtacaaaaatattgagctgcctgttagaaatctacatttggatgcctccccagatatcttaaactcagtttatctaaagtcagagtctttctgtggcttcagtgcttagtgactgtgtccgtgaataaactacttattttctttaagcctccatttctccatttatgaaagggtgataatgaacttattttatcaatattaaatgagataattcttgtaaaagtatttagcatagtgctggtatatactaatatcttaataaatattagttgctattattattattccttttaaatgctgatcccctttttgtcctgttctgcccagaaaaagagcctcaggatagctttgcctgtctgcctgtcttccttatccttcatatgcaaccagtcagcaagtactgttattttgtattttcattttaaacatcttaatttttatttattttaaaattatttatagagatggggtctcactatgttgtctaagctggtcttgaattcttgggctccagtgatcctcccacctctgccaaagtgctgggattacaggtgtgaaccaccacacctggcctatcaagtactgttgattgtgcttccgaaacatgtgcttgcatccaaccactccttatcatttcttgacacaattattgtggtaatctcctaattgctctcctggcctcttggccatcttgtacctttcatcctgagttatctttatagtaggtagatctgctcatatcactcagcagaaaggcctctgatgggtctctcttacctgaaatataaagcctccaaggcccactacaccacagtcatctttagagcctcccctcttgttctgggacccatgggtcctacagtatatgcagactactgactgttctgtgactgcaccctgtactctaaatctcatacctttgtccctgacctgctgttgctgtacctgccttctttttgcttagagggttgtcccctcaagcactccctgctaataagcactcagccttccaccccaaacatctagtctgtctggtgaattcctggtgattcttcagtggtctgtctcaaatatatcttctacgctcttttctctttagtcttaactgccatccaaggcaacattagttagtccctcattataagaggcaatataagctggtgagaggtatatacccacagtcctagctacttgggagtctgaagcaggaggattgcttgaggccagcctgggcagcatagcaagaccttgtctctttgaaaaaaatagaaagaaaatgctgggtgtggtggctcacatctgtaatcccagcactttggaaggccaagtagggaggattgcttgagctcaggagttcgagaccagcctgggcaatacagcaagaccccatctctacaaaaactaaaaaaattagctgggcatggtggcacatgcctgtggtttcagctactctggatgctgagggagaaggatcacttgagcccaggagtttgaggctgcagtgagccatgattgtgctccagcctgggtgacagagtaagaccttgtctcagtggagggggtagggtgggaggggggaaagaggcaatatagtggtaagttaaaatccctgagtttggagccagactgcctttgttattaaggtagttgtatataactgggatgaaactgtttaacttttttgtgtctcagttttctcatttataacaaatgagtaatattagtcttgctgtgagggttaagtgaattaatgtagggaaaatgcattgaaagggcttgcatattactaagtacttcataaatatagctattattattattctcaaagcatttcttacatacttacctataatagcatttgccactttactttttttttttttttccaagacagagtcttgctctgttgcccaggctggagtgtagtggcatgatctaggctcactgtgacctccgcctcctgggttcaagcaattctcctgcttcagcctcctgagtagctgggattataggtgtatgccactatgcccagctaatttttgtatttttagtagagacagggttttaccgtgttggccaggctggtcttgaactcctgaccttgtgatccacccacctcggcctcccaaagtgctggggttacaggcatgagccaccgcgcccggcctgcagttacttttttgtgtatatttcccaatagactgtggcttttttgaaggtgggctattttaatcatctttgtgtcatcagtatgtagtacacagtgggacccagtaaacaatcagatgtgctgtttgtgtagcccagaataaagtgccaggtcctcctgcattgcagcagtcagcagcatgcatctggaaagtattgctttctgaaactacggcattagagccacaaagctgtttgggattggaccttagcaagctcttcaaccagaaatttgctattacaatgaagcttcctatctgcaataggtagattgtaactgacagcatgtagtcattggaaggaggttaatcccagagcataagaggacttctgatttatttttgcttaaagggatacaatccaaggccacaaaggctgctataagacttttgttttgttggggataataaagagagctgtttctgccttttccactttcttcttataaacctgctgaagattgaaatgttaaaatgtgattcagagaagagatttctttattgtaaacatgatagagagctcagaatgaatgccggagatagactctttatagaggatttcagggtattaaactcttaagccccttatggtcaggttttactgccaacccttaacaccccaccatgcctgggctactgcaatagtaactggtctttctacctttaggttcgctgcagtctctcctgcctactgctatgatattaatatttataaagccttactttgacttttctcatgcattataaaaaatcctcgcaaaataccccatcatatacaaggaaagttccaagttttagcttgtcattctggacttgtattaggattctccagagagagagagagagatttctttcctttctttttttctctttttttttcccagggtttcactcttgttgcccagtcgagtccagtggcactatcttgcaaactgcaacttccgccttccggtttcaagcaattctcctgcctcagcctcctgagtagctgggattacaggcgcctgccaccacgaccggctaatttttgcatttttattagagacgggatttcaccatgttggccaggctgatctcaaactcctgacctcgtgatccacctgcctcagccttccaaagtgctgggattacaggcatgagccaccacgcccggcctggatagatggatttctgtaataaacctctataggccaggcgttgtagctcatgcctgtaatcccagcgttttgggaggctgaggcgggcagatcacctgaggtcaggagtttgagaccaggtcggccaacatgttgaaaccccatctctattaaaaatacaaaaattagccgggcatggtggtgtgcacttgtaaatcccagctatttggaaggctgaggcagacaatcacttgaacccaggaggtggaggttgcagtgagctgagattgcgccattgcactccagcctgggtgactgagggagactcggtctcaaaaaacaaaaaacaaggaaaaaaaccccaaaaccttcataataagtttccatatctatatctatagatatagaagaggtttattttatatatataatagatacatagataggtataagaggaggtttattatggaagttggctcatgtgattcatgtgatcatggaggccgagaaatcctatgataggccatgtgcaacctggagaaccaggaaagctggtggtgtaattaagttggagtctgaggtcctgagaaccaggggaatcaaggctgaaggcctgggaattgggaaggggtggtgtgctggtgtaagtcctggagtccaaagacccaagaaccaggagctttgatgtccaagagtgggagaagatggatatcccagctcaagaagaaagagtgaatttgctcttcctctgccgtttgctctctctgggtggaaaagggtaaacagattatgacgcccaccctcattggtgagtgtgggtcttctttatttagtttactgattcaaatgctaatctcttgcagaaataccctcagagacccacctagaaatgttttatcagctgtctgggccattccttagcttagtcaacttggcacataaaattaaccatcacaggactcttctgcagtctgactctggttaccttttctaccttatcttccactatatcctagaatgagctgtgtagcttacctggcctagttgtgagtcctataatgtgaattgcattttatgtttgtatctacccagaacattttaccttttgaaattttgcctctcctttaagatccattaaaaaaaaactatttatttatttatctgtttatttatttatttaatttattttttttgagatgaagtctcactcttgttgcccaggctggagtgcagtggtgtgatctcggctcactgcaacctctgcctcccaggttcaagcgattctcctgcctcaagcctcctgagtagctgggattacaggcgtgtgccaccacgcctggctaatttttgtatttttagtggaaatggggtttcaccctgttggccaggctggtctcgaactcctgacctcaagtgatctgcccgcctctgcctcccaaagtactgggattacaggcatgagccaccacacccagcttattttgaaataattatagaatcataggaaattacaaaattagtacatcgagtcctgtatacccttcccccaactttcaccaatggtgatatctttttgtgtgtgtgtgtgtgtgtgatggagtcttgatcttgtcgcccaggctgttgtgcaatggcgcgatctcagctcactgcaacttccgtctcccaggttcaagcgattctcctgcctcagcctcttaagtagctgggattataggtgcctgctaccatgcccggcttatttttgtacttttgaagagacaaggttttgccatgttggccaggctggtctcaaaccctgacctcaggtgatccgcctgccttggcctcccagagcattgggattacaggcgtgagccactgtgcccggctgctatcttatataattatactataatataagatcctattttttttttaagagacaggttttcgctcagacgcccaggctggagtgcagtgctgtgatgctagctcactataaacttgaactctgggctcaagtgatcctcaggaggaggatcctagctcctgggtagctaggactacagtcacgtgccactatgcctggctaattttaaaatttgtatagagatgatatctcggtttgttgcccaggctggtctcaaactcctggcttcaagtgattcctccacttcagcttccaaaaatgttgggactaggtgtgagccattgcacctagactgatccattttaaaactctattttgaataaaattttcaggggtaaaaaaggtttttttcttttccttttcttccttgcttctttctttctttttttttgagatggagccttgctgtgtcacctaggctggtatgcagtggcgcgatctcggcttactgcaatctctgccttccaggttcaagccattctcatgcctcagcctcccaagtagctgggattataggcatgcaccatgatgcttgggtaatttttgtatttttagtagagatggtgtttcactgtgttggccaggctggtctcgaactcctgaccttaagtgatctcccggccttggcctcctaaagtgctgggattacagtcatgagccactgcgtccagatggaaagtatctttttaaactttatatccctccctagaatttatcccctaatatatggtgtttatggaggtggttggaatcaactactttttataaatatattattaaagagttgacaacccctaaaaatcttttagatgctagacaaaaaaactgagagaaatcatgaagtatttttttaaaaaattttttgagatggagtctcactccagtgacaacccaggttggagtgcagtggcacgatctcagctcactgcaacctctgcctcccaggttcaagcaattctcctgcctcagcctcctgagtagccgggattacaagcgtgcgccaccacgcccagctaatttttgtatttttagcagagacggggtttcaccatgttggtcagggtggtctcgaactcctgacctcatgatccacatgcctcagcttccctaagtgctgggattacaggtgtgagccaccatgcctggctagtcatgaagtattttaaaggacgtgggttctgacactcttaaattcaataggccaaagttcctggcatttttttcttggatatgtaccgcatagacctttcttagtagatactgggagaaagaagttggtttaataatgaattaatgggaaagttttttttttgagacggagtttcgctcttattgcccaggctggagtgcaatggcccgatctctgcttactgcaacctccgcctctagggttcaggtgattctcctgcctcggcctcccgagtagctgggattacaggcatgcaccgccaagcccggctaattttgtatttttagcagagatggggtttctccatgttggtcaggctggtctcgaactcccaaccgcaggtgatcggcccacctcggcttcccaaagtgctgggattacaggcgtgagccaccgcgtccagcctggaaagttttaattgaccttatgtctgtataattaaatgtatttcattaactttttaaaggtaaataaatctggggtttcatctaagtgtcaaaaatatgattttcaccaatggcctacttatttttgccattatttgcataaatagctttctggtttttctcaagttaacctgtatgcttgtgatgtgaaagtcatagtatgtataaaaaatagtaccaagatgaagtatagatggtcattctgaaccattattccttagcagagtgaactatatttaaggttttagaaataaatcgtatttccatgtctgaataagaccttagtcttatttaaataaatgtaggggagatggagagaaagaataagatttgcctaagaatactaatattaagatgaatggcaggtaggacacactgaggctgtcaggcattgttctcagtgttttacattcaccatcttgcttcatcctcacaacagactttatcatttgattagaaaaaaatcagtacgatctagatgttctcattgaataacattttttcataaacaatttaatttcatttaatttatattgttactattttttatataagtaaatatgaggtctcactatgttgcccaggctggtctcaaactcctgggctcaagcagtcctctcacctcggcctccgaagtgctgggattacaggcatgagccaccacatctggccctgaactattttaatgcaacaagtatttactgagttccgataaatgaaccaagtctggtgctttagaaccatgatctcaaactggaggacatgtctaagaatatctaggcttggactgttttaagagaataaatttccagattctctatattttatttatactctttcctgaaattgacttgtttgaaggcaacactgatataatgctagtccaccttccctaccctccctttagccctgtgccttcttatgattaacagaagacagccatacctttcacccatcttgaatctcaccattgtacctttctatgaggtataaaatcctccaggattctaacaaagggatagtcaaaacactagtgtcacgtgtgaaacttccttttatcaaggtatcttcctccatacatcttattaagagatgcatctccaaaaaaggaaattactttttatgtttagttctcaaaatttgtaacatttgcattgtcttcatcgattgtgttttactataatagtaaccataccacaatccaacataaataaacaataatatacatgttttcattaaggaaagtatgataaaagttatattaaatactgtggaagaagcagaatagaaatacagtttcagggagaccgataaatggcatagcattttatataggaaaaaaagattctgttacagttttaaaatataggatgggggatatcagattgcccaggtgtttagattttattggaattagtgatacagtagggttttttgtttgtttgtttgtttttaagacagggtcttgctctgttgcccaggctggagtgcagtggtgcgattttggctcactgcagcctctgcctcccaggctaaagcaatcctcccacctcagcctcctgagcagctgggactacaggcgagtaccaccgtgtgtgactaatttttgtatttttttgtagagacggggttttgccatgtggctcaggctggtcttgaactccttggcccaagtgatccacctccttccacctcccaaagtgctgggattatgggcgtgagccactttgcctcaccaatatagtaggtttaatagctttaaaattagcaatataatagtgtttttaggtgtcagttctaaatagacatagattgatatataaatgaaaatataacctttgcagtgattaaaacttgtaatgaaaattttagatgtcaacctaagaatattcaaggagacacctttttccccccattaaatttgttttagcaggtatgtgagcaaaacttttgaatagtgccgcaaaggatatagagatcaagaagaaataatttttgccctcaagatgcttgttagttaaatggtgaagcaggggcatagatacatggtttggcttaaataaagccttaattgtgtcatggtattttgctgtttgcttaacatgggcattgtgcctcagtgttgtgtcatgcttgttaaaatgacccttgagtggtagtttagctcatatgtgctgtgttaccacataggctattgtgcagaacagtgaggaattgtatattgtgaaagacagatggataggaacagtgcccactgcacttaccaccaatgaatggtagggctttctctcattgtctagttgatgtgatcataaaaaacattagactggaagtcaggacaccctaattctcatcctgagtctgccacagaacgtatgaccttggctaaatcatttaacgcatttgaactctagtttcctcatataaaaaaagtttaaactggatgattttctacctgtgaagtttagagttcatacatttttacacagtatatgcgttttagaagggataggtgcagcagattttaagaaacagatgccaaaataatggagtagattacttactgtaatatgcggagaagagtagcttactaattatttatctaagtgtgattaggacagtctgttatatggcttgtcgtaagtgttgtgggtctcaccactgccctttttatttaaaaagagaatttcctctacttttgagaattagaacaaatactacacaggattagtaagcgagaataccaatttcagcttcatgccagtgcctctagtgaaaaccacatttttgcagtgttctagcagaatattaaaatggcttatggattacagacagctcaggctttggtctttataggtcagaggtggaaaccaacggagcaattaccgttcactcttatgggcggggcttcttaggttccttatggagctaaagtgaaactctggaacagttccactagaatggctttcctgggagcttatgaggcttacattctgaaactgatactcttgtagtacaagaataactacaaactgatgtggaattaggaggccagagaggggagaagccacatgtagctctcattctcacaagtcctttggctggcgaacagaggtttttcccgtcactaagcagatatttggttatatattgacaaatcctctctaaacaattcttagaatagaagactgattctgtcttgtgctttggaggtgaaggggaagagcaatgttgaaatgagtgaaattagcttgtgatggtttaacatctgcaaatatcatctatctaaccagtctttatctcctatgtgtgttcttaaatatggtccccattgtttgaagccaagaaagataactgaggaaattctatggctgatttgccgatgttattaccaattatttattagccttagtatcggatagtttgactgatttgccatgttgttttttagaaatgggggtcttgctctgttgcccaggctggagtgcagtgacgcaatcctagctcactgcagcctcgaactcctgtgctcaagtgatcctcctgcctcacctgtgagtagctgggacaacaagcgtataccaccacttctggctaatttctttttttactttttataaagacggggtctccctatgttgcccaaaggctgatgatttgccttttttaggtagaaaacctggactgggccctcaagtttttaactttttttttttttcttggtgatacaaaatgtggggtgaagaggtctgttaaagtgaccaggcttggtgctatttaaagccgaggagggaaatactgtttcctggcaggctttattgtgtttttgtattattaaatctcttaagtcagcagtttactttttgtctagttgtatgtcttggcttgtctaaatgaatcataattaaaatttagtcactgggactcttaatcttgtctaagcaggaattatagtttagagatactataccttgctgtgtatagaataagaaaagtataagtctgctatgatcactgagatgggtttttataagtactaaacttttttagaagcatagttttctttatcacctgtcccccagaaagtttagaaagtgaaaattaaaaagtaagtaaaaataatggtattggagttataatttggaaatttgtttcattcacttgcattttaatatttattatgtaaacatgaaatgataaatttgtttcctttgaaaagattcaagaaatagaatagttttaaaagtagtcttttacattcctttgcttattgacaaaatcatcatcaggaacatcgattcagggaatgaggcttctgatccatctcaaaacgaacattactaatatttgctatggtcatttgacataagtttttattgagtcagaactatactggggcagtagccttcaagccagttaaacatgaattaagaacttgtgtgccaggtactgcactaaatgttaatggcataaaggtgaataaaacatcgtttatactgtgttttgtttcacacaggatttgagatggctgacagaaagtaactaaagtgagattgtaaaatgtaactgaggttcagaaccagggaaaagataaattagatttggaggcctagatatggttaaataattaattagacatgaaaccctatggctgaacagttcagttgaatgttgattttagtagtgatatgatacagaagctaagctttgttatagtcacgcaatgttgaggcatggttaatatatttagcaggattatgaagagttcaggcattttttggaaactcctatgaatatgtcatctagaattggttttgtaaaatggtagtgcttgtactgtttagttacatgtgttgaatatcagatggatttcagtatttttttaaaactttgcttaagcctcttaagcctcattgagtggggagactgcagtgtaagtatccaggctgaagactgaacttccaccttatttttatgtggtaatgagtttttgtttagatgatatatatgttttaatgttgagatggaaaaagtagaagtgaattgcagtgtagaaactactctgtttccttttttatctatttttatttcagtcattaagctttccccatctttagtctattgagttgtttcatggcacgttcggagggatggtgggaatgccctttgctgaatcaaaaactactgtttctccaacttcacaggttagagaagctcatcaagtcaataatttataattttaatatggaagctgttttgggaactcttgtgggcatatcttggttttaaaagaagaaaaaagatttactgatttaagaggtatataaacgcagcttgctgacagtagcttttgattttattggttcaacagatatcattgttgcacaatacataatctttcactgtggcagctaatgagatacaaaactgcataattgcaccaacagttattttccttatagaatttggcggctactaagtaaacaacttttaaaatttatcttaattggtttagttatgtgccatcattgaatgagtcttaacattttccttcacgctgttgcactccacattcttagttgaacagagaaagatattattttaagggagggcttgatcttttagcattttagccagttggcttttcttaattaggatgattactcatatttagatgaaatctaactgagaaaccacagcaaaatgcttactgaaaacattcgggtagtcagtgtggaggaaagactcctggaaaataaaatgtctcaaggttgttttgaagtttatcctcattgtttttatttatccttatgtgtgttaagtatacgaggattcctggttgtactggtattttggcaaagtcctgtactgttcctcaaatgcttctaatgcagacactgacttttaagaaccagacacatgtagatgtgcagcgagacaacactctggcctttaaccattgtgcctcctttcttacctgcgaattgcgtttactagcgtatttcacatttcagccaatagatctaaagaatacaaatgagaacatataggacctgtctgcaaataggttttaacttccagagattagaagtagctgttgagagcactgtgggtttagtgagaaagagtgctttggcagaatgggcagtgtctactgtaggctaaaaatgggggaactatagcatatcatgagccttctgtaaccctcgaagtcagttattagcagttgaacatgctctttggtcataatggcagtccccaggctccagataataatttgagcagggagctgggagaaataaggaggacatgagtacatgggacaaaagtgggccagtaaagggaaaattacatatgaatggaagaatagagaatggaaaatggtaaactggagagaaaaagatgaaaaagacatgaaaaaaaagagtagggataaacgggctctacctgtttccttttctgatcagtaaaggaaaatacttcttgaaatccttagggcatctttggacaaggaaatcagaagtaattcaaattgtattgttgtcagagtttagtcttaaaagttgtgttgccaggtagaaaacaaagcatgataatcatttatagaactcctttagttggtttacttgcctcttagggtaaaaacaaaattagacttccagagtagtctgtgatcttggaaaagtctttctgaaaaatgattatagaactgttaagacatctcccatctcatctcatatggcatcatacttttcccaattattttcagatattttagcatcaaagttttctagaatgagttttgtagaacactagtatccctcattgcttaaatatattaggaggaaaaggattttttttattaaataagtttgggaatatatagagtggacaaaattagttttaaaattacaggtcatttgagaggtcttgaagtaccagtgtcttgtggatccctgaagggctagatgagggtggggcatgtagcctttctcaaatttatgtgactaccatacagtttgaggaaagctggtctatataaatgcattacctgtgaaacctggctttcttccacatctcctctgacttgctttgctatttttttccccatctcttacagtacttcctgctatcccccaaattgggggaattctttcttttttcattttaaaatatgatattctggagatctgaattctctctttttacatttttatatgtgtattccactttgagcaatattaatactagcttacattttaaaatacgatattctggagatccaatgtataacatgagggctatagttaataatattgtattgcactgggattttttttgagagtagattttagttgcccttgctaaaaaaaaaaaaaaaaaaaggaggcaggtaactgtgaggtgatggataaattaatttgcttgactatagtaaccatttcactatatataagtatataaaaacattgtgttgtataccttaaatatatacaatgaaaaagaaaagaaaagaaaatatgatgatagtatttatatgtgaactctttatttggatctttaagtttctggataatctggtccctaatcttatctacattcccaggtttattcatcaccagtcttccatggtaagtcttcacttgagctcaatttactattccatgattatattctgtatgtggaatgttctcctctactttttgtattatggtctggctcaagtgcaccttttccatgagaccttccctgatatctttagctagaagtaatctcttccttggcacatctgtagcatttatgtactaatacctatagtgttatttacagatttatttgtggttatttatgcacatgtcttagatttcgagcttcagaagagagggaatagcatgccatatcacccagaagcttgtagcttagctattgcctagtaacattattaacagagtaataatgtcagctaacatttgttgtttactataataaatgacgagcacagttctaaatgctttagataattaatgtagtgaagaagtagagtaacttactcagtcacatgctcagttagtgatggcgccaggatttgaacctaagcattcttctgctctttatcactatacagtactgcttgctatgataggtgctcagtgagatttgaatgaacaaatgagcagacaaggctttgaaaaagagggcccatcatctgtggctcaagctcataaggcactttcttttccccttttcaaagctgacatttatcatttatctagccatgtaatgttttcagtgactaagaacaattagctagagttcaggtgggctgtgggagtggtagagatgagtgtgtggggaaatgtgtttagtcactgtgtttattttatttatacactagaacctgctgctatccttgttgaagaaatagtggtgagtccaggctttggagtcaggaaaacctggatgggagtttcagcttcttcatttattagcagtttgggcaagtttcttaacagttgtaaaccgtagttttcttctttgtaaaataatagtaactacttctttagtgtctatgtgaggattaaatcagatgatcatgtaaagcacttagctatagtacctactacatattaagtgcccaacaaatgttacttatgatacaataggttttacttaacataaaattaactcctaatttcttaaaaaaatatgtcttttgaatgtggacctttcgattttagtcagctaaagcattaagtctgttttcttccactccctcaacttcatagtaacatgtctgtttataatatgcagtgagaattgtagtgtacattgcaccatttatacactgcaaacatcatacattagtaacaagtctgtcatgaactgagttaattgtagggtttgttctgaacattttcttgccaggcatggtggcttacgcctgtgatcccagcactatgggaggctgaagtgggaggatcacttaagtgagttcaagaccagggcaacatagcgagacctcacctctacaaacaaacacaattaaaaaaatatattttttcattgttgagctttattttcggtgtttgtaatatgaagacaataggtatctttttatttatcaaataaggtttattaattatgctttttcttttaaatgacagccttgagtcaactttttctgtctttgtgctaagaattacagtagtctcaacgtagagccgaggtgattctgatctaaagatgctccgtgaatgtgcgatatttctttttcttttttttttgagatggagtctcactccgtcgcccaggctggaatgcagtggcacaatctcagctccctgcagcctccgcctcccaggttcaaacaattctcctgcctcagcctcccgagtagctgggattagaggcacacaccaccatgcctggctaatttttgtatttttagtagagatggggtttcaccattttggccaggatggtcttgatctcctgacctcagatgatatgcccgcctccgcctcccaaagtgctgggattacaggcatgagccactgcgcctggccgcatgtgggatatttcgaagaatcttagctttgatgcatctgtggggaagaaatgagtgattattaacaaaggtaaaaggagaggagagtcattgcaaataaagaatcttgtagcggccaggtgcggtggctcacacttgtaatcccaacactttgagaggccgaggaggatcacctgaggtcaggagttcgataccagcctggccaacatggtgaaacctcgtctctactgaaaatacaaaaattagccaggcgtggtggcgggtgcctgtaatcccagctactctggaggctgaggcaggagaatcgcttgaacctgggaggcagaggctgtggtgagccgagattgcaccactgcactccagcctgggagacagagcgagactctgtctcaaaaaaaaaaaaaaagtatcttgtagcagtttattctaggccagagccacagtttgtgttgatttggctagaaattattaaagttggtattctgtgaaattttgtttgagtggttctttgtttggttgagcgggttcagatgaggctgagaaaacaggaagattgtgcttggaagagggggagaaggcttccttaggccaaggcaggtcagtcattctataaggagagtctctatacaggatgtttctgcttttaaaaatatggtctgatatgcaaattcacttatctagtgcaaatgattctggcaaaggtttctactttcttgattcaggaataagacaaaagagttttccaccccatagtacacaacaaaaaagaggcattataaaacttttcagaactactaaagtggtatgattttatgatttcttgttgaattcagcatttgaaaacagaagaaatgtgaaaacagaggaaaggtgcttagcataggaattaacttgtttcttggcaaggaaaccagggtcaggtgtttgaatcacttggctttgtggtggttctgttggtttttgtgtgtgtgtttttcttcttctgctggattatcatctctttttttctgccttggaaactgttgctttatctagggcaatcaccccacttacacaggaggcaaattcaaagctggttgccttatgttgttaaaagctgtcagattcacatcctttgccatatccttcttcaggagtcaggacaatgaagacaggagtctaaacatggggccagagtgagctgccccgtcctcagtactaacacctattcctgacagcttaagttgcttctcagccttagtgaagctttctcagctattctggctcatgatgatcattccctcctttgaactgaaatagcctaattgtctctgagtcatgtggcaattagtcttgttttgctttctgatatctcttgtagttgacttttattgttaatgtatgctgcttgaaggcaagggctgttgtgaatttattatattgctatatattttacagagactcttgatttttccctggtttaccttgggaagttttcctgcctcttaaatggcgagaggatcctttagaagatttcctaactctcagaatcttttagatttttcatgtcatgctgtgtttgctatggccttgaaaaagcagtttttcccttttttgcagcagacacaaccaagattctggataaagaccaggcaacacaattttcctagagtaatacttaccttgagtagtttcttatggggaaaaaagcccccaatattcttaggcttaatttctatgatcaaatattttaaagatagaaacaaatgatatatagtagttaggtatgggggcaggcaaacaagcaaaatgttaagatcttgcatgactaattagtactgtataaaacacatttaaattttgttgtacccattcttacattagaaatgaattgattgattcatatggtattggttttcctttaagggatttatttcttaatgaatcagaggtttcacattgaaaaagaatctgcgtatttttatatactatcccaactttcatctgagttatttcatgtttttcattgccccattggaaaccgtattttgccgaagagtcatttaatatatttttcacactggctttgatttggtgacatgtagcagttctggaagaattaacgatatgttaacacaagttgactgtgatagaataattacaataaatatgcctattttcctttggggagaaaagtctaaaattctgctttatagaagctattctcagctctaaaagagcatatatgtagatcttcatttcttttcttctaacaattttaggggaaaatacaaaccttaagttatttcctgaaatatttcccaggatgattactaccttggattttaaggcttctttcttcacaagttctgactcttctataagcacaatcagaatggtcagaatgctgactctcctttaggtagtcagaatgggtcttccaaacctttgtatgagcccattagctgcctcagctttccctcaactttcaggaaaacacaggttacatattctttacgttactatgagaaactacctacattatttttttttaaattttatttttggctgggcacattggctcacacctgcaatcccaacattttgggaggctgagatgaaaggattgcttgaagccaggagttgcaagacaagcctaggtgacaaagtgagaccttgactataaaaaaaaaaaattaacctttccggcggtgatgacctacccacacgagaacatgcctcttgcaaagggtctccttcatccctctccagaaaaggagaagaggaaacacaagaagaaacgcctggtgcagagccccaattcctgcttcatggatgtgaaatgcccaggatgctataaaatcatcacggtctttagccatgcacaaacggtagttttgtgtgttggctgctccactgtcctctgccagcctacaggaggaaaagcaaggcttacagaaggatgttccttcaggaggaagcagcactaaaagcactctgaatcaagatgagtgggaaaccatctcaataaacacattttggattaaaaaaaaaaattaaaacaattagccgggcatggtggcatgcacctgtagtcccagctactctggaggctaaggtgggaggatcgcttgagcctaggagctcaaggttacagtgagctatgatcacatcactgcattccagcctgggtgacaatagccctataatgtaggtagttacttttatctgcattttacaaatgaaaagaactgacagacattgagttaaaataaccagtacaaaaatcacagatgggggatagccaaagctttaaaatggaatagcaggaagttttaatttgcaaatagaatcattaatgtttaatagaatcattaatagatttaatagaattaatgaattgatagaatcattaattcatacttagtttggagtgattgttgaacacatttctcagctaatttaggtcttcattatattttagaacatattatctgcatcattaaaaaattcctcatttcctcattgcctatctctgccttttattcactcagttttaaaataaacagattttgtttatactgcttcttttattaatatttatggtaagatattttatactgctgataaatggacattaatgatatatagcctattgtttgaaaaaagcattttggattatagcccagaactggaaacaaccaagagataaataaatggtggtatattcatacaataaaatattactcagataaaaaagttcagttcaaaactttcagttttatcattgcattatttgcagttgtaaaacatggtaacatcacaaccttatgttacaaagttattaaaaatattagcaaggtacactgattgctgtagccatgttacaattaagctaaaggaatttcttgttaaccaaaagcaaaaaataagtttggtttttttggatcttaattgactatttataatagaacttgcctttgggtagcgaacagattcacaaatgaaagaggagattctggaacttactgtataattccaggtaactctgtaaagtttgaaatgtaaagaccatgccttaatacaattgataattggaatcgtgctggcatcttcttaacatctcttgcttgtctgtggagcatggcatgattacttatacattactacatttaggaaacagcctttataagacccactttttctgaagtttttggtgttactcttttcttaaccaccagtactgatctcattatgttttggccgacttacttgagggcatgctaaaaagtgatctaaatacttaatttctcccttcaattgtgcatcgtgttttacaaataaaccgtatctttactttcatttacttgcatgtcactgagaaaatttgagatctttagcattcatgtccttgcctgaagtataaggatttcacataatttcagcttttatcattcaagtcttatagatgcttttctcttgtctctgttttcaaataatggtgctaattatatttaaggggcagtatgtttattcaatatagttatagtgttagcagtgtaggatttaacaagcttttcctctggaatgtatactagttcttcatgttctatgtgataacttatacagtgctatggtatttttgttgttagatttaagttttctttgaattttttttctgtccataatcttaggctttctttttgtgcttactgtttttttctcccccagaatgatacatggcagcgattataaatctgttttataaaacttaacttcattaaacatatgaagaacgtgggattatttttcttgtcataaaaggtgacctccagtgacaaatggctattacattatttatgtgagattccttcatttcatatactgttatcaatgtgtttgataatggttgaagaaccagttggtgttggtttctaatactaattaataatttgccttgagcctgatcaatcttcttatatccattatcagatttttttcttcaaatctgaaaatgttttcttttcttttccttttctttttttttcttttcttttctttcttttttttttttttttagacggagtctcgctctttccccccagactggagtgcagtggcgcaatctctgctcactgcaagctccgcctcctggcttcacaccattctcctgcctcagcctcctgagtagctgagactacaggcgcccaccacgacgcctggctaatttttttttgttttgtatttttagtagagacgaggtttcactgagttagccaggatggtcttgatctcttgacctcgtgatccacctgccttggcctcccaaagtgctggaattacaggtgtgagccactgcacccagctattttttctatatttttatgtagttcattgagggtaataattttatcctacaacaaacatgtaagttattgaagaatattggagttttatgataatgctgtcataaatataaaaggtagggtaagagggatccaaatagagctcacttatattgtcactgataggcagtcacgctgtgctgatagaatgtggcctgacacttgatggagtgcagcatatgtatacttgggcaatttgagcagatatatacggtcccgagtttaaagaagagaacaaacaccagtgcacagctatagtattcctaatataggatgcattttaaagaatttcacattctacaaatggagagagatggcaggagaagccttattttaagtcctgcactaaggcaggttaacctcatgggtgtaattacctggacctttttgtaaggacaaaatatttaatcattaaaaggccctctgtagggtttgaaatatctatattttatatatgaatgcttcttttattaatatttatggtaagatattttatactgctgataaacggacattaatgatatatagcctattgtttgaaaaaagcattttggattatagcccaaaactggaaataaccaacagataaataaatggtggtatattcatacaataaaatactactcagataaaaaagatgaacttaatctcataaacattatgggcaacatagtgagaacccatctcttttaaaaaaaaaaaaaaaagaaaaggtgggtgtggtgatgcgtgtcatagtcccagctactcgggaggctgagctaggaggattgcttgagcccgggagtttgaggttgtagtgagctatgatcatgccactggactctagccaggagcctgggcaacagagcaagaccttgtctctaaacaaggcaaaacaaaaacaaaaaaacaaaaatcaattgcatttttatatattagcagtgaacacatggaaatacatgcaataccatttataacagttcaatcaaaagaaatacttgagcatatatctaacaaaacgtatataggacttacttgtatactgaaaactgcaaaatgctgatgaaagaaatcaaagaccaaaatagtgagagatactgtgttcatgattggaagactcaacatagtaaagatgtcagttctcctcaaattaatctacaagtttaatgcaatttttatcaaaagcccaggaagattttttgtagatataggcaagattattatcaattgtgtgtagaaatacaaggaaactagaatagctaaactgaataaaaaaattggaggaatcactctacctgatttcaagacttattgtatagctccagtaatcaagattgtgtaatattggtagaaggatagaccaaagatcaatgaaacagaatagaaaagcaggaataacagaatagagacctatacagatatcctcagtaaatttttaaattgagatataacttacatacctgtaaaattcagtggttttttattatattcacaaagttgtataacattcaccatcatttaattccagaacatgatcatcacttaaaaaataaatgctggcctggtgcggtggctcacgcctgtaatcccagcactttgggaggcctagtgggtggatcacctgaggtcaggcattcgaaaccagcctgaccaacatggtgaaaccccgtctctactaaatatacaaaaaaaaaaaaaaaaaaaaaaaaaaattagccgggtgtggtggtacatgccagtaatcccagctacttgggagggtgaggcagagaatcccttgaacctgtgcagtggaggttgcagtgagccaagatcgcgccattgcactccagcctgggaaacaagagcaaaactctgtctcaaataaataaataaaataaaaataaaataaaataaaataaaatgctgtattcattggccattgcccaactgatttttgataaagatgcagaagcaattcagtgcaggaaggatagccttttaaataaatggtgctggagcaactggacagctataagacaaaaaaaaaaaaaggaaaaaaggaaaaatctgacctaaacttcacaccttataaaaaaattaactgagagtggatcatggacttaaatgtaaaacataaaactaaaaaaaattttagaaaataacaggagaaaatgtttaggatatagagctaggcaaagagttctgagacttgacaccaaaagtatgatctagaaaaggaaaaattggtaagttggacttcataagaactaaaacattttggtctgctaaagaccatgttaaaaggctgaaaaggcaaactacagactgggagaaaatatttttgaaccacatatccaataaagactactgtctagaatatataaataactccaaactcagtattaaaaaaccccaagtaatccaattagaaaacagcaaaagatgttaaggaacatttcactgaagaggatatacagatggcatgtaaccccatgaagagatgttcaacatcattagccgttagggaactgcaaattaaaaccacagtgagatatctcaaaatagagtttaatttttaaaaagcctgggtgcactggcacacacctgtaatcctagtactttgcgaggttgaggtgggaggatcacctgagcctggaaagtcgaggctgcagtgagctgtagtcctgccactgcacaccagcctgggcaacgggaatgagactgtgtcttaaaacaaattgttttaaaggaaaaaataatatcattaaattcagtaaatgcaggaaaaaaggctaaagcagaaaaaaaccacatgtgatctcaataactgtatataacttccagtaacattttgttgtattttatacatttttttgccctctgcatttttatattatatagttaactgaatatgcagttgtgtcttgcttttttcacaatactcaatatcatgagtatttttatcacttaaaattatccatgaatatagattttaaatggctcataatctttgttgtatggatgtacagtaatttatttaaccattcctttcatatgtttaaagtagttccattttgttgctattgcaaataatgctgtgagaaacatttttgtatgtaaacttctgtcaggatttctgattccttccttacaatacattcttagaggtagaattactgtgtcacgacgtgggcatcttagaggcctttgttaactatacattgccaaaatactttgcagaaatatagtttcgatttatgccccttttatattcttacatttctcctttctctaggaaaataaatgttcatgttactcaccttcactcaaggtttccaaacactttttcttggctctcctcctacaactctgttctcagctttccaaaattgtttctctttactccttagatatctgggtttccttaggttctgtgctctccctcttctctctatgtatattcttctttgagctaatcagaaccagccccttgccttcaactacagtttacatcataatgactcctaaatcccatatctctgctgagttttgggaaccagttctaacaccatactagatatttttaccttatgctacatagccatcacaaatgtaactcccttatccaaaactgaactcattatccaaccacactaacttcatctccactgatggcagtatgacccatccagtggtagaagccagaagtttgggagttagcctagatttctccttgaattttgtgtaccactggtcaatcattacattttaagattctgcttccaaaatagctctctaatttgttacctcccctttccactgccttaatttaggccctcatattttttgtactgctgcattggtgtcttaactgatacgcccatttctgacctagttccatccctcagtttcatccttcacattaaaaccattttgtcttttaatttttaattttatttttgagacagggtctggctctgttgctcaggctagagtgcagtggtgcaatcttggctcactgcagcctctgcctcctgggttcaattcatccttccacctcagcctcctaagtagctgggactataggtgcttgccaccatgcccagctaattttttgtagatccagggtttcaccatgttgcccaggctagtctcaaactcctgagctcaagtgatccacctgcatctgccttccaaagtgctgggataggctgggcacagtgggtcacacctgtaatcccagcactttgggagaccgaggttggcggatcacttgaggtcaagagttcgagaccagcctggccagcatggtgaaaccttgtctccactaaaaataccaaaattagccgggcgtagtggcgggtgcctgtaatttcagctactcgggaggctgaggcgggaaaatcacttgaacccaggaggtggaagttgcagagagccgagatcacaccactgtgacaaagcaagattcaatctcaaaaacaaaatatacaaaatgctgggattacaggtatgagccaccatgcctggcccagtttgtcattttaatgcatgcatgtcagcatgtttctcaccgtcactgtcttctgtctcctgtaaaataaagcctgttctctgtagcatggcacccatgagcctggtcttgatttccttcctccaggctactttcatgatttatccctggccatgcctgatatggctcccagtcatgctgagctagtttcctcaacatattagaattgtttttcaggcctttatgcttttgctcatgttttttttttccttgacatgcttctttcttctatccatttgccagatttctttcacatcctaagattcaggtaacatcataacctcctatggaaagcaagccctctataggaattgttaagggcttccttgtctgtgttcccactgtgccatgtacctacttctttctgccacctcctacattggtgtacttttgttgttgttgttaagctgtccctattatactagattgtaacacatgctttctaccgcctagagcaggaactgtgtactcttaattgtttcctgagggcttgagattagcatctggcatgtagtaggtgtttaataaatatttcttgagtagatgaagatatgagtgaatgaatgaagggtttcatgctgaaaaatgaaaaaagggtttaactttaagaaaaaagtcacagattttggagtcataggaattgagtttgagtcctaccgtcatttcttagtgttgatataattttaagcaggttgtttccctcctctgatctttagttcttttgcaaaagggaggtggtagtagtagtagtaatactattaacagtagtagtagtaataataaaagtgcttttaaaataaatattctgcaaattttagttaatattgttaacagtaataaaaagcatcttctatatgtaggctgcacatgcataatgcattgtcttgaacgaagtgagaggagaattacttaaaactttgggtagacgtactcatcaattacaagatcaatttacttggttttgctataatttggttgccattgttgacccattgctttattgtcccattgtctcatcacttgctcagacgctgaagatgggtcagggggagtcagttttagaaaacagccttccctgggccgggcacagtggctcacgtctgtaatcccagcacttttggaggctgaggcaggtggatcacctgaggtcaggagttcaggaccagcctggccaacatggtgaaaccccatctctactaaaaaaaaatacaaaagttagctgggcatggtggcgggcgcgtgtaatcccagctactcgggaggctgagacaggaggattgcttgaacctggaaggtggaggtggcagtgagccgagattgcaccattgcactccatccagcctgggcgacaagagtgaaattccatctcaaacaaacaaacaaacaaacaaacagatataaaaaaaagaaaaaaaaagaaaacagccttccctgaaagttgtttgtgatgcttatggtctaggatgtgaaatttacaggatgatgaaacatgcagatattaatagtgttccatattatttttgaatgtggtttgacttttctaacgatcagcagtgacaaacttgtgtactaccagtcaaccctgttttccatgttttctctacagagatgtatagttagagcagagatgactaatgtgttttcaagaaatgctactataacctttaagtctgatgggtagattgagcatttaaagctgttgctttttcatcgcatctggatgactgtatgttcctaccaaatgaatcactttatgaatatgcatgagcttataaacacaactttttagaaaaaattcttgtgttctgaaacaaaattacgttggtagtattttccaagttttccgtaagaagtagctttgcattagccctagaaattccttgaataatatgtttttacccccttacttgtattacatttaatgacatctctggctttattttctccattcttttttccatggagtttcttaatttcactgtttttgccttgccctttagacgggtgaaacaatgatgactcattttagattgatgaaagggacagcttagcagctggagagctggtagacactagagcactaaattgccagcaccagccttctcttcattgtccacgtaaggcttgtggcagaggtatgcccattcagtcatttattaatatgtaatttgtaggttagatgacttcatcaaattatatttacatctgacctggaggttcaaccatgttttgctttgggacatttttaattgttaaaaatcatagttgggttctgatcaatatgtacatgctgaagttcttatttagccacattatgggcttttttggttttcttcagcatgtcaatagtacacagcagctcagaatggtcaaaattgtttcattagtgccttaacaaccattcatgatatatcatattgtagaatgcaagtatagtcacgcactgcttagcgatggggatacattctgagaaatgcatcattaggtgattgtttccttgtgggaacatcataagagtgtacttacacagacctagatggtatagcctactacccacctagggctatgtggtatggtctgttgctcctaggctacaaacctatacagcattttcctaactcaatattgtaggcagttgtgacccaacggttaagtatttgtgtatctaaacacagctaaacaggaaaggtgcagtataaatacagcgttatcatcttacaggacctctgttggtatatggtgcacgactgtatatcctttatctacatttcccccttttggcttggatagaccatcaattccttgggtttacatttatttcatgtaatcttaaaggattttgttttatgcatggcaccattttttttcaatacaaatggttagtataaaacccaaatttgagaatttgataacaatggcttagtattgaacacaagtgttacataaagttgtggaaaaagccttagagaggtagtcaggggatttgagttccaggtctgactgtgcacttgactcaccacgtcatcttggttaataatcacctaacaataaaaataataaccttaatttatataatgctctgcagtctgcagagcacttttaaagaaagtataggctgggtgtggtggatcacatctgtaatcccagcattttgggaggctgagacaggtggatcacttgagtgattaggagttcaagaccagcctggacaacatggtgaaactctgtttctaccaaaaacacaaaaaagtagctgggtgtggtgaaacatgcctgtggtctcagctactccagaggcttgagcctgggaggcagaagttgcagtgagctgagattgtgccattgcactctagcctgggtgacagaacgagatcttgtctcaaaaaaaaaaaattgtattgggcatagatatgattattcacattttgtgatgaggaaactaaaattcaaagactttaagagatttgctcaaggtcacataccggtaagggctagaactagcattgatttttatcactttcctttcagtcataccatgctgtctctcattttacttttatgggtatcagttatgaaataagggggttggaccggatcagtgatttttttcaagctacatttacagagagtcttaggattcttttgagtggcctccaggtttgcttgtggaatgaagattgaaatatagggaaaggtgcttagctttgcaccagagtatccacactgagtgaggtagtagttgctcattgacagttgagaaactactgcatgttattaccgatggatgagtttgtgtccctttagtatgactggacaaaaagaaagtggaaagacatctgatataaacttttgaggttttgtttttgttttttaaagaatggggtagaattccatagctacttaaagcttgcaaactactgcattagatgatttttttttttttaaggtagggtctcactctgtcactcaggctagagtgcagtggcgctgatctcagctctctgcaacctccgcttcctgggttcaagtgatcctcccacctcagcctgctaagtagctgggactacaggcacatgccaccacgcctgggtaatttttgtatattttggtagagttggggttttgccatgttgcccaggctggtcttgaactcctgagctcaagcaaacaaactgccttggcctcccgaagtgctgggattacaggtgtgagctaccatgcccagccagatggtttttaaggaatttttcagcctgtgagtttgtaaaatattgcaaccttaactttggtggtgttacctgatgaatccctgatgactttacagctgttgcaggcttacatcagtttagagttatggggcattattgaagccctgtttatcttccaagatagtctttattcttctttgctaaggtggctatttttagtaatctttagggaaaagaggcacaatggcagaaatgagcatgtgttattattagtatatttatgcagccaatattggtaatgctttttttttttttttttaaagactgtgtaggagtgaaaggggagttttcctttccgcctttgaggttagctgaaaatcaactgacaaaagtcagattaataggagaaaaggcataaacatttttattaacatgtatggaggaaaatcacagagagattgcccacaacccagtggggtacagatgcttatgtacccttgtttttagaggaagggagatggggaggtatggatgattttacagggctagtaaatgatttttaaagttattcagtgggcttggagaatatacagtggtctgggacaaagttttttgggcctacagagcagatagtggtttgtgacaaaagtctgtccaggcccgggtgtggtggctcatgcctgtaattccagcactttgggaggctaacgcaggtgaatcacttgaggccaggagttcaagaccagcctggccaacatagcaagaccccgtctctactaaaaatacaaaaaattagttatgccacggtggcgcacatctgtaatcccagctacttgagaggctgaagtgggagaatcacttgaaccctagaggcggaggttgcagtgaggtgagattgcgccactgcactccagcctgggtgacacagagagaccctgtgtcaaaaaaaagataaaagttactcccaagcactggcatagtgcagtgtgcaatatatatatatatatatatatatttttttttttttgtttgtttgtttgtttgtttgtttgtttttaagaatattagctgggcatagtggcacatgactatagtcccatctaccagggaggttgagactagaggatcacttgagcccagtaggtcaagggtgcagtgagctgtgattgtgattccagcttgagcgacagagtgagtccctgtctaaaaaaaaaaaaaaaaatcatcaggtgtattgacatacttcagtctctcttcctgcaatattagttcagttaatgaaaactcggggaagggacagagataactattttcttctttggcaggtccagatttaggcagataagggaacttcagagaacaacttctccctgtgctttgggggtggtgaggggatggtcagagaggccttgaggattgtacagttcagcatgtcaaagtgccatattttgaggtatcggtttctgggcctcaacaactgctaataagaatgattgactttggagttgccttggagttatttcaaaaagtgaaaatgttattgtttagcccacactagttatcttagttgtcatttgtgttttctacaatctgccaatggttaaacctggcatttctatcaagaaggaactctttttgcttccagagtaaaggtatttttattatattaacccttgaaatagatccagttatgtattcactttgcgtttgtttctgaacaaaataaacctgtgtggtaagatggaagtgggtttttcacttacaatattagttacttacatttgtaccttttttttttttttaacttcttcacatttcctcccttgccctccacaatctgataagcatctcattgatgactatgagagactaatttaggccgtgtggttataaatgagatttcaattcatttcttcttctcttaacccgtctcagaggagatatcacagggtgactttctatgttgcgttttgacacaaggacagtttgtttttgctttggctgatggatggggcagctctagttgatgaatgtggtttatatgctcacaggcagatgaaagtgtccactctgccctgagaccctctcctttctgcttagtggtgttatgaaagccccatgggtatttgatttttcaagaattaatcagtacacagaagttgaaatgtagaccaaaggaaagaatatgttttttcagttaggctttttgtctttttttaattatatggggtttaccctttgtgtttcccaactcaggggtttcactattaaataattgtctttgactcttaaactttttaggtaaaatttatataccaggaaatgcatagatattaaatatacagtttaatgagatttgatgaattattataaccaccaccttaatcaatagagaaaatctctatatcccagatagttcccttgtgcctctttccagtcaatctctagacacatttacttgtataataaaaagattttgacatacccaactacaaaatgatcagatctttgtttctgtagcaatgggtagaataaaataaagtaggatttacttaaaactaatattttctttgtaggcaggcctgttgttacaggtagaaggtgctcaaaagctggtttcttaactaatttatggattatttttattttttatttgttattttgttatttttaggtttttttttttttttttttttttttttttttttgtagagacagaggctcactgtgctatccagggtggtctcaaacacgttggctgaaatgatcttcctgcctcggcctcccaaagtgttgggtgtgagccactgtgcccagatttattttattttattctgtttttttagagatgacgtcttgttacgttgcccagacaggactcgagttcctaggggattctcctgcttcagcctcctgagtagctgggactataggtgcacaccatggtgcctagcttaattaatggagtttttgataatggttgacaaagatagtggtaagcaaagcagcccttatatagactttacatcttaaaacataatcccctatgtgtgaaattgagaacagctttctagaataataaacagagatctgtatgctaactaaaaggcagagagaatattggctcagccaggccctcacttttttgttcctccctatctgtaaaacatcatttacctcatcagcgtgctacggacatgggttaatgtttggaaaattctgtggaaagagtggggttctgacaatgtgctctgaccaaggcagtttagcaaatttgtactaagtggctgacctttgataagcaccactccttccccacctgacctgtgattccatttttcttttgtgcaaatagttctgaaggtttaatgtttattttttactacgatgcagtagactttcttctctcgtgtagaaactgctcgaatgactgtggatgactcctagaatataggaataacagaattggtttctcctgtactctcaacacaaaatacttctgtgaccaaatgtgtgggagtgtgtccccacacaccaagcagtcaaccagttctgcagcagctgccagctggtgtcctctaatgcagttcagttcagttcagttctgacactgtctacctggagatagcgtcagatctcacagattgagggctcagtcccacaagtctgtccccagtcttcagtgccagtcacaggctccaggtggttttacctgtgcttctgacctgctggctataaactggtttcccaatatccccttattgggttccatgaaattgttagagtggctcacagaactcaggaaacatactgaccagttcattagaaaggatgttttaaaggacacaagtgaacagccagatgaagagatacccagggcaaagcctggaagagtactgaacgcaggagcttccatcccggtagagctggggtgcctcaccctcccagcaagtggatgtgttcctcttcactctcctggatgcccccttttaggtttttatggaggcttcattaggtaagcatgattgattaagtcattggccattggttatcagtgcaaccttcagcccctctcctttccctggaggttgagggtggggttttgagttctaactgtatgagcacagggttgattcccctggcaattggccaccagtcctgtggttatctagggactttgcaaaaatcatctcattaacataagctcaggtgtggttgaaaggggcttgttataaatagcaaaagactgtcttttgcttttatcactctggagctgttcaggaaccagtggcaagaggccgaatacagtattttaaccaaagtcacttaggaaattacaagggttatataggagctttaagccaggaaccatggagatatatgtatgtgtatatatatatgcacatatacacatacaaatatcaccgcgacccatgatgctcttctcaagggcctgtgccttctgataaacggctgagttggctgttacacttactttttcgagcaaatgaatgtgtagtttcatctggctcattcgtcaaaccccgggtttggaaggttgtatgtttttatttagctagtagcagttgatgtggttgaggtggggcttttctttggggaaggtacagctttgaatggctgttatctttcaagtacaaatagtgtagctccttatggctcaatagtatcaataaactgttttatttgctttccttttctcttcctttttttctttttttttaaacggagtctctctctgttgaccaatctgaagtacagtggtgtatctaaactcactgaaacctccgcctcctggattcacggtgaaatcccgtctgtactaaaaaatacaaaaattagccgggcgtggtggcacgcgcctgtagtcccagctactcaggaggctgaggcaggagaatcacgtgaacccgggaggcagaggttgcagtgagtcaagatcacgccactgcatcccagcctgggaaacagcgagactctgtctcaaaaaaaaaaaagaaggggttgactgccaagtttaaatattggcaggagatgaggagatttcagtttttatggagctttgttaatgagccgtgactgtttattacaagacttttacttttaaaatttacttagtaattatttactcataaaacagctacttactgtaaccagtaggtcagttctactcttgaggcttcacatttcttcatttgtaaaattagtacttgtattggtgtccattccctttctgaaattctgtgatatatacatttcctttaaaatgttacaattgaaaaaaataaagttacaataaagaccgtgtgcggtggctcaccctgtaatcctggcactttgggaggctgaggtgggtggattgcctgagctcaggagttcgagaccagcctgggcaacacggtgaaaccttgtctccactaaaatatgaaaaattagccaggtgtggcggtgtgcacctgtagtcccagctacttgggaggctgaggcaggagaattgctagaacccgggaggtggaggttgcagtgagctgagatcatgccactgcactccagcctgggccacagagtaagactctgtctctaagggaaaaaaaaaagttacaataaaagccaggtgcagtggctcaccctgtaatcccagcactttgggaggccaaggcgggtggatcacctaaggtcaggagttcaagaccagcctggccagcatggtgaaaccccttctctactaaaaatacaaaaattagccgggcatggtggcaggcgcctgtaattccagctactcaggaggctgaggcaggagaatcacttgaacacaggaggtggaggtttcagtgagttgagatgcactactgtactccagactgggtgacggagtgaaactgtttcaaaaaaaaaaaataaataaaataaaataaaaacaatgatacaataattcagtcttgtttagagttgccattttctgagtgttctggccatagcatttcttcttcttgcctccttcccagcaacatttgcccacttgctgtggactgcagttaattaggctggtttggagctctttccttcctgttccatttgtgttacacctaaagcatctcatgaagatgatttagattagttcctgccatcaaagataatccagtttaggatgaagtcaacagtattttaagggtggagttctcttttggaactgtcatttggtcagaattagtgaatgctgttgtagagctgacccctgcacaacacaggtttgagctgcgttttttctttttaaaacaatccacttatatgtggatttgttttcatcccaatgctgatcaaaacagtggtatctgcaggatgtgaaacctgtctgtacagagggccaactttttgtatatgcaggttcctcgggggactgcaggacttgagtgtgtgtgtaatttggtgtactcaggggtccttcctggaaccagtcccccagtataccgagggacaactgtgttgagatatcagctgcgggtttccccccaagctgttactcaattttcacattatctggggtttcctctgttctcatattacccccgaagattttataccaatttagggacatcgtgttttccaaatcctaaatgaaaagcaggatatgaagtgttcgtattttcatgttctatggtatttcctctcatgctcgatttatttatatctaaaatcatgtcatgtaatagtatattaataatgctatacatttggtactttgccattcataaagtgtttttacaaatattgtttaatttgaacctcatgataagctatctagacaggtattttctcagacagatgaggaaactgagatttatagagattaatttgttcaattccaagtagctaattgaaatccatacgacctttctcatttataggatttgtagatcctacctcctttaggtgcaaaggagttgtataaccagttttttttctactagaatgatgacctaatcaggagtaaatgacttttacttcatgtgtgacttcttcatactcacaggtactttgattctttcaatgtgtgttacaccaatttgatagtatcttgccttaaaaaaacatttgttttattgaatgtttactatgtactaggcctgtgcttagcactttcaaaaacctttttgttttgaaagaaaagaggtatactgaaaagtgtataataaaatacacagcttaatgagctgttataaatactcctatatacaacacacagatcaagaaatagaacatttttagcatgcctaggagccagctttttgtgtgctgtgtccaatcaacatgctaactttttgatattcacttctttttcttcttcttatttattattatttttttagagacagaatcttgctctgtcaccctggagtgcagtggcatgattatggcttactgcagccttggcctcctggcctgaagtgattctcccacctcagccttccaagtagctgggactataggcacgtgccattgcactcagctaattctttgcttttctttattgatttacttcctaaacaagcatctttaaacaatatagtttgcctagtttttagcgttatataattggcattacacaatatgtattctgttgtatcagcttcttacatcctgttttatatttttctctattatgtgtagcagtagtttgttctttttcattgctgtatagtattccactgcatgaatatgccactatttcttcattctattgttggtggacatttgtgggtgttttcctgtttggggatactatgaatttgcagctgagaacatttcctcaccctcccagctttattgacgtacagttaacaaaatttgtgtatattcaaggtatacgccatgatgtcttgatagatatatacattatgcagtgattaccataacctaactaattaacataaagaacattattttattttttaaattaaaacaattttttcggagacagggtcttgctgttttgctcaggctggtcttgaactcctggtgtcagattatcctgctgcctcagcctcccaattagctgggattacagtcatgaaccactgtgcttagctcaagaactttcttatgtgtttattctggcacatctcagcacatatttgtgttggggatatacccaaaaatagataggtcatgggattccttccttccttccttccttccttccttccttccttccttccttccttccctccctccctctctccctccctctccttccctccctccctccctccctccttccttccttcctttttttttcgcagagtctctctctgtcgcccaggctagagtgcagtggcgtgatcgcggctcactgcaagggccgcctcctgggttcgagcgattctcctgcctcagcctcctgagtagctgggattacaggcatacaccattacactaggctaatttttgtattttttgtaaagacggggtttcattacattggccaggcttgccttgaactcctggcctcaagtgatctatctgccttggcctcccaaagtgttgggattacagatgtgaaccatgatgcctagccaggatttctttatcttcagtttattagctactgcccaacttttttcttttttaaaagccagtcaaatttagcaatggggggttgtataccaactttagtgacactaaagttaataagttctgataacccactaccataggaccagcctgtcaaacatttttctaaagtggttgtaggctgggcacggtggctcacgcttgtaatcccagcactttgggaggctgaggtgggcggatcacctgaggtcaggagttcgagaccagcctggccaacatggtgaaaccccgtttctactaaaagtacaaaattagctgggcatggtggcacatgcctgtaattagtttgggaggctgaggcaggagaatcacttgaacccaggaggcggaggttgcagtgagctgagattgtgccattgtactccagcctgggcaataagagtgaaacaacgtctcaaaaaaaaaaaaattagctggacatggggttgtatgtctgtaatcccagctactccagaggctgaggcaggagaattgcttgaacccaggaggtggaggttgcagtgagccaagatcgtgccactgtactccagcctgggtgacagagcgagactctgtctccaaaaataaaaaataaaaataaataaataaagtggttatagcagtttaaggtactcaccagcagtataggtgagttcccatttcttcagatcttctctaacacttgctgttgtcaacttctaaatttaaaattttaaaatttaaataattaaattaaaaattcctaatgtagtaggaatatagtggtatctcattgtggttttagtttgcatttctctggttaacaataggagcaccttttcatgagtttattagctgtgatattcaagtcttttgcacatttttcttttgggttatttgtcttttattgacttgtggtagttcttaaaaaaattttttttaaattaaaaacttttgtgtattttggagacagggccttgctcttttgcccaggctggagtgcagtggcgtgatcacagcttgctacagcctcaacttcctgggctcaagtgatcctcctgcctcagcctcctgagtagctgggactaaaggtgcacactatcgtgatcggctaattttcatatttttagtagaaacagggtcttgccatgttgcccaggctggtctcaaactcctaggctcaagccattcacctgcctcggcctcctaaagtgagagattccaggtgtgaactacccacttaaaaatcgttttaatttaaaaaataaaatgaaaagaatgttcttcatgttaattggttaggttatggtaatcattgcataatgtatacatctatcaaaacatcatggtgtatgccttgaatatatacaaatcttatttgttaataaattgttgaggaaatacctggccggtagttccctctatattttggagatgagccccccttttttttattgtacttgttacagatatcttttttcccctctgtagcttgtcttttccctgttagttgtgtcttttgataaataaattcttaattttaatgttgtaatgaaatttaatctttttttctgtatgattagtgctttctgtgagttatgacataaagtcataaagataatctctaatattatcttctaaaagttttattgctttgcctttcacatttagatttcttaagggctaaaattattagataactaggtattagttgattatatgtaattagtaaacaaatatttattgtgacttcagctatgtagaagagtcagtggtagatactaagagatgtaagacttggttcctgccctaaaataatcaacattctgtttgtgtaagtaaggcccttggcatcagcacgatgtaatagaaagaacactgactggactgggcctggtggctgatgcctgtaatcccagcattttgggaggctgaggtgggaggatcacttgagcccaggaggttgaggctgcagtgagccgtgagtacaacactgcactccagactgggtgacagagcaagaccatcctgtctcaaaaaaaaaaaaaaaaaaaaaagaaaagaaaaaaagaaataaaacacacacacacacacacacacacacacacacacaccctccccccccccccctcagaatctggagacttatatccatgtccttttggggacctggctgtgacaccacctttgtgattttagaaatctcctttccttctctgggtctcagttttatcagtaaaataagggattggcttaagtatgtagttcttgattttggttcctcagattgataaggggtctgagtagatagcactggaagcattttttttttaaagctaaaagtatacatttttagccatggtgatgccacacaggttaaccaaaaaataaaatatctttgcttttaactggagtcgtgtgtcctttctgtgtgagaactgagtttaacagctttgatttacaataaaagttttaacttagtttttcaaaaaaatacacttcgtttattgataatcccagtttggtatacaaagtttttttatgtttttttgaaatggagtttcactcttgacgcccaggctagagtgcagtggcacaggcttggctcactgcaacccctgcctcctgggttcaagtgggtcccagcctatctaggattataggcgtgtggcaccatgccctggtgattttttgtacttttagtggagacgaggtttcaccatgttggccaggctggtctcgagctcctgacctcaggtgatttgcccactttggcctcccaaagtggtgggattacaggcgtgagccactgtgcctgaccttatacaaagttttaaataacatggccttctgactttaacttagaaaccaaagagtggtaggagtagggggaaggtattaaataacagaaactatctttggtgattaaaaagttgggtacctactattctaataacttttaagggctcttctgtaggttagtgtaaaagtaattgtggtttttgccattaaaagtaatggcaaatggcgggcgcttgtagtcccagctactcgggaggctgaggcaggataatggtgtgaacccgggaggcagagcttgcagtgagccgagatcacgccgctgcactccagcctgggcaacagagcgagactctgtctcaaaaaaaaaaaaaaaaaaaagcagtaatggcaaaaaaaaaaaccctaagaatttcaatatattatgagtcagtgaaaatatagtatttgttgttttgtttccctaagtgcccaattgagagatctggacaattactattatagagattgtgaggatggacagagaaccttttgttgactgaggtagtcaaagaaggaaggctaccagggtgagctaggattgagcagtgagaaggattgtttctatgtatggagaaaaatgggaaagagggaattgtggacagagcagtgtaagcaaggatacggaaatagcaaagtacaggtcatttttagggacagaagatgaatcagtttagcattagaagatgatgaaaaagtagtctgaagttaaagtatggaaagccttcttcaaacataaggtcaaatacagctttggaaaagttaacagttacaagtatgatggtgtaatgaagattctagttcttctgtaagccaagcaggggccattggctttaggatgccctctatgctccaatataatggtgctgcctggcatcattgaaaacattaaaaaaacttttctaaaaagtatttgaggactgggcatggtggctcatgcctataatcccaacactttggaaggctgagatgagagaattgcttgagtccgggaattcgagaccagcctgcaacatagggagaccctgcctctacaaagaaataaaaataattagccaggtgtgggggtacatgcgtgtagtcccagctacttgggaggctgggaggatcacttgagcttgggagatgaaggctgcagtgagctgtgatcatgtcattgcactccagtcagtgatagagtgagatcctgtttctgaaaataaaaagtgtttaggggataaccagattgggcttgtattgatagccagaccgccaagcaggaaactttatgtatttattttttaagagttggagtctctttctctctattgcgtaggctggagtgccacagtcgttgggactacaggtactgccaccatgcctaattaaaaaaaattaaaagatggggtcttgctgtgttgtccaggctggtcttgaactcctggtctcaagcagtccttctgcctcagctccccaagctcccaagggagtataggcgtgagtcaccatgcctggccagaaaccttattttgtggtagttgttcagctataccttgcagaattttttatgtgaatcctcagtaaatcccaaacagcttctctcagtactaacacatggctgataaatggtactgaattctttgtaaatctcaccaatctcaacagaatttctggttcggggtaaaaaaaaaaatttccgtttaatttctgtagaaaataaccactcagaatccactctctgttatgtgtaacaatggacagaaattttactgttgttggtacaaaacaatgactcatcccaaatcatctcttggaattaagaatgtaatcgtaatacactcatactcatatgtacgtgctcagacagtccctttctgcctttctttttattaccccttctcactccgctgtggtttagcttgactaatctatttgcagcacatcagcatccttaatgcagaaagtttgcagcttctgtttacagggggaaaaaaaaaggagtgtggagattgcagatttcatctcttttttcttcttttaaaatttataatttccttttttcaggaggagggtgattattttcgtttttgtttgagacagggtctcacgctgtcccccaggctgtagtgcagtggcgcaatcttggctcactgcaacctctgcctcccatgctcaagcgatcctcccacgtcagcctcctgagtagctgggactacaggcatgcgccatcacacccagctgatttttgtagcttttggagagacaggatctgtccatgttggccaggctggtctcgaacttcagagctccagtgacccagccacctcggccttccaaagtgctgggattacaggtatgagccaccgtgcctggcctacattttgtctctgacatttctcaatctaaagtatatgtatatgtacatttatacatatgttatttacatatatttttttctttaaaaaattattttttggtggactgagtcgctttaattaagactcagtcattttaatgaagtggggttatttactttgaccttcctccccaggaaatagcacttaaatacttaaaggaaaaattaaagaggaccaaggccatggtggcagggactgggagcatggtggccatacagcctgataagccagcagagaagagtcccacagtaaactgacacaaccctggtgatgtaggtggtttaggcacagaaaaaaggaaagtcagatttgagtaccctcagcaggccttgtactggtcacccccaatacccatgagaacacagcatcctagtcctccctggcttatcggtgctctccacatgggggatacctgtcacagcttttattccaggactggggaagtcacacttttctgcccaccccacccattgttttgcagagaagaatctctaaaaccttcattactcatgctgaaagtgctataggtatttggaatgggagaatgggaaagagtaaattctgaatgcattggagccttaatttgctgccctttctttccttccctctctcatcttcatgaaggagggcccattgtgaataaggaagaggggaagcctgtctgggagaggctttttgggtactgggcttcccaggaagaagccacttcccaccgtccccttgatgatcatgtgacccttttctccatgcagccagaatcagcttctttggggatgaactggtaatagatgttgtcgttagtgttatttttaaatttttagatatttttttccagatgcatcttcaaaatgtaggctttggaggttgataaggttttgtgggattggtaagtgttaatctagaagttgggcagtaaacaagaatagtaccttatcagcattaaaacaaagcatctgaaagaaatgtttttgaggagtagttgaatatttagttggttaaaaatttagactcagaaaattttcaggaaggtgataaagattcactaatcattaagtagggaatctcttaaaggttttatattgatttgatacattagagaatgctataataatagtgtactttgattggtggcctataaagtaattgtgccttttatggtatttatgaattggttatattttaaacaataaatcttgacttttgcgtcagagtttctctgttttgttttttgtttttttttttgagacctgctttgtcacccaggctggagtgcagcagtgctgtcattgctaactgcagcctcaacctcctgggctcaagtgatactcctgcatcagcttcctgagtagctgagagcacaggtgcgtgccaccattcccagtgcctcactttaggctaagtttttcattttttgtagagacagggtcttgctttgttgcccaggctggtctcgaactcctgggctcaagcaatcttccctccttggcctcccaaagtgctgggattacaggcatgagctatcatgcctggccctgcatcatagatttttttttttttttttttgagacagtgtctcactctgtcgcccaggctggagtgcagtggtacaatctcgctcactgcaacctctgcctcctgggttcaagtgatctcctgcctcagccccccaagtagctgggattacaggcgcacaccactacacctggctgatttttgtacttttagtagagatggggtttcgccatgttggtcaggctggtcttgatctcctgacttcaggtgatccacctgcctcggcctcccaaagtgctggaattagaggtgtgagccaccgcacctggctacatcatagtttcttaaaatcaccaactgttatctatgttttcctattttaattagtctaatttttaataatttatttctgggttagtttctgtacttttggtagaattgcagactcacaacaggcttcaggaaagtaattttaccaaatgcaaggctatttgcaatttagttttctgattcagaagccataactctgtgctggatttgattattcattatttaaccaaacatttttcaaatgccttccttattttctgtcttaactgcgtagaattaagcccatttccaaaaggattttgaggtaattctggagtttgagattaatatttttaaaaagaaaccagagttcattttctgcagagaaagcttttaatcaaatatacatatagtaccctgtgtccttaattgaattgagggtttgacttttctccatgcagaattcgagttgatatttttgtagtttaggagttttgacttttctcttttgcctttatgttaacaaacttgtgagtttgcaaggttataatagaaagagtatatagggtttggagtcaggaagtcctaggttcaaattttagcttaatgagcaagttacttaatttttccaagccacaggttccccagctatgaaatggaataatattacccatctattggggttcttgtggggattaaatcagatgaaagtgcttagcatagcatataaatgttagtttattttcctttggcaattatttaggctttagggcaaaattgcctacttgttttggaatgaacccaaattttatggttaattttaggctttttcttcagttagacttttgatatgtctaactccttcccaattttttttttttttttttttttttttttttgagatggagtctctctctgttgcccaggctgaagtgccatggtgcgatctcagtttactgcagcttctgctacccgggttcaagcgattctcctgcctcagcctcctgagtagctgggattacatcactatgcccagctaatttttgtatttttagtagagatggggtttcaccatgttggccaggctggtctcgaactcctgacctcaggtgatctactcgcctcagcctcccaaagtgttgggattacaggcatgagccagcacacctgggtggcagtgcattttttaatgaggaagattgaacaacttgacagaagggtgagctcatattctgaactcttacagttcatctaatgtcaaatttctagaaaaaaattatctaaatctaaaagttagtatgacactccataacattaattgtgagtccctgagggggcagctataaagataaaatggagtataggatcccccaacacacataacacaaacgcttgtgattgagtgtgcattggcacatgtacacctgtgtgctcacccctcctctcccttccttcacctctatcatgagtacaggtgtgttgctttgaattggtgaggagtgggaaagagagtccttttggtgacaagaaagcaaactggttttatttagttcaccaaaatattgttttgatccttttttgtttgtttgtttgttttgagacagagtcttgctctctcacccaggctggagtgcagtggcgtgatcttcgctcactgcaacctctgcctcccaggttcaagcgattgtctcacatcagcctcccaagtagctgggattacaggtgctcaccacccagcccggataatttttatatttttagtagagacagggtttcactgtgttggccaggctggtctcaatctcctgacgtcaggtgatctacctgcctcggcctcccgaagtgctgagattacaggcgtgagccactgtgcccagccgatccttttattttcaatataaaactgttgctgtaagcacgagcatgtccaaagggaacaccatgggatagtagtgaattgagggtgataatccagttttgaggcttaagtctgcaattcctggattaatttggctgctctgttattggtggctttgctaggatcattttcaaatcactttattttcctttatggtaagtgtattaatagtatttaataacaagattaatctgggccaagggctttcctgtgaaagttactattttcattatgggagaaaaatagagcagcatggccagtgtgcatttttgttatcccatccttaggtaagtgagtttagacagcctgagctaaatacctagatttgcaaaaacacctcctacccccatgctttccttttaccatttaaaattgtttgtgaagatcttttttttctttctttctttcttttttttttaaacacagagatagggtctcactgtgttgtttgtttgggtttgcaactcctaggctaaagggttcctcccgcctctgcctcccaaagtgctgggaatacaggtgtgagccgcagtgtgcagcagcttaagtttctgatctccctcaccacctcgcactttcactcctcataccccttccttgtttaatagaaggatcctttgttttgagtagtctccaagtggagtattttggagagactttgaataaatcctggcccaagcctgatcacaacacttggacattgagcttacctgcattctgctgttgggtagatatggaatctctgcccctcttgatcaaagctacatagcccataaggaaacatccattgagcagccttctttcctttcacttaatcaatttcaatgtattgtggtagaggtctttgtgatattccattttagactatatgatctttaggaatgcttaaccctgctgtgccaaagaccaggggaaggctgtgtattcaaactcatttgttctctgcttttttctttttaattattagtagttaactctaaatgaaagtatagaactgtttagtttgagcaaggaacactatttgttggcctctgctttctgttccccttccttcccttccctccctttactgtggcatcatgattcttccttcctgtattcttggtcattctcccagcacctcactttagccctacagtggagattcttctgttcactaataactgcagtggtgtcagtttcagtagatcagccttcgtcttcctttgcttgaatggagtgtttaacatgctggatatcctgcctctttctgctgaagcatctttcctggggtcattttgacttgctgcttatataactattatgtcctttgggtttgtgatactttatattatcaaaagcagcaaaagatagtaatagaagtaagatttttattactctcattctatgaatcagatgttattatcccattttagagataagtaaattaagagagtggttatacctgaagttccagagttattaaatgacatgactggattcaaacccaagagagcctgacttcaaaatctgtgcattgatctctactgagtctgaaggttactgacccagtgaaccagtcactgttctgtttctaagaaacgtttaggttctggctcttgcagggatctttatagtcctgtatttgcaaaaacacctcccacctccatgctttccttttaccatttaaaaatgtttgtgaagatcttttttatctttttttttttttttttttttttttctgagacggggtctcgctctgtcaccaggctagagtgcagtggtgcgatctcggctcactgcagccttcacctcctgggttggccaggctggtctcgaactcctgacctcaggtgatctgcccgcctcagcctcccaaagtgctgggattacaggtgtgagccaccatgcccagcccacattttgtttttatattctgagtattatatagtaaaaaaggagaagagttcattgatacagtcttttaaaaactgatctcaatgatatagtaggaaaaacactggattaggagataggggttttaagttctaatcctgcctggctgtgcccttaactagctgtatgagactaggcaacatttaccatttccttcccaattaaattgaggtagccgtactagatttatctaacatgcctttcattgctcacatcatgcgacattaagctttaattagaaagctttggttttgggacctctttgttttcccataggctttaaccttgtttcctttcttattgcccagcaggaattggactagagttggccaaaggtgggatgaggagaagaggtaggaatcttacaagagttggttggagtaaagttattgacaggtgggaagaagtattcctgtgactctgtggttgttcccttgtaagatttgaaggaaagtaatgagtcaggtcttaataatagtgcctctatgttatttcctccaccccattatcttttgtcagaattgattagcaaaatgcacttacccaagtattttcagggtccctgtttggatagtctaaataacgttgttctttttttttgttttggagacagggtctcactttgtcacccaggctggagtgcagtggcacaatcttggcttactgcagcctcgaccttctgggctcaagcaatcctcccacctcatcctcctgagtagctgggaccacaggtgtgcaccatcacgcctggctaattttttgtattttttgtagagatggggtttcaccatgttgcccaggctggtctcaaactcctgggctcaagcgatctgcccacctcggcctcgcaacatgctgggattacaggtgtgagccactgctccctgcctttagttacctttatcaacctatggtcctaaaggtagattcattgaacttgcctgtcagtgcttaaggatcagtcctgtcttagttcagacaagttaaattcagggttgcattctgtcaactttgtttctaatcagtggatgatcagatgatatttggagaggatttttaatatatgtgaatcttatggtggcattctgttacttaataaatactttaatttcttagcttttttccccatattctccataatttttgtagatagatgctcagacgaaggcagcagtagcacatggataatcagagttttttgtttgtttgttttaacatttctcgttaaagtataatgttcagcaatggggaccaatctatactcctcatctgtagtctgtcaataaataggttgctccgactttaaattctcagcttgaattgtttcttttttgtgtgtggaatttatgaccctctgtgatgttgaccctacctaaagcaagtagaatagctacaccagcaaaatgaaataccataacaacaacgtatgcttatgtttatatagtgcttactgtgtgcctggcatggcattgaataaatatatatatttaataaatagagttggggtctcgctttgttgcctaccttgtgttgaactcctggcctcaagtgatccttctgcctccgccccgtcaaagtgctaggattacaggcatgagccactgctcccagccagcattgaatatatttttttttttatttcatcctgagaacaaccttatgaggtactttcaggtcatacttttattaccctcattttatactagaaaaattgtgctttaagatgttaagcaaattgcccaaagtgcaaaaccagtgtgttggagcttgaattccaaaccagatctgcctgagtcaagcttttcttttatgttcttatttactaaaggcttcttgaacagaagtatgtgagagttgggcacatgcagcttggtcaattctatgtaaacccggtcagattctgagtagtgtagatctgataaagtcaatgtgaatttcttatcattcgttgcaagagacttaatgtagcaaaaatcagtatcataggaaacgagatgttactgtggtaggcacactgttctctctcagctacctcatttttgttgttattggtggtggctattgctctggcaactacaaaggcagcatttacttgacacggcgtgtatgcttaaggcagaacactgactgcttttcattgctggcaaatccggacttcatcagtactggctacctgtaaggaatgtgagcatgttggattttagaacaggaaaaacacaacttccacctcatttcacagtagagttcacttagggatacagactttttggtgacagtaactgttactttctgcttattaattcagatacttgcataatgctaacctggtagatattgtcagatgacaagccttcctcctacatgttctctataaaagaactgctagtgacaagcattttattatattaaaaattctacttcatactgttttaagttaaaatgtatttattatgaagccaatattgtgaaatgtttttttctttttccagaatgtggtttttttttcttgtaatggactaagatgcaggcttattgtgtagaatgaggagctattgcccagatggaccttagtgaaagtaacttaaataagcaagtagattttgcttctgtttgggaaaatgatctaagacggatgctggtattttgggcaggtggagactaatgttttatctcaatgtttgcaacttaagttcagcctacttaagggctgtcccttaagggtgtccaattgtttggcttccctggccacactggaagaattgtgttgggccacatataaaaatacactaacactaacaatagctgatgagctaaaaaaaaaaaattgcaaaaaagtgtgataatgttttaagaaagtttatgaatttgtgttgggccacattcaaagccgtcctgggacgcatgtagcccacaggctgggttggacaagcttggtctagaagttttctagattttactacaatgttcaaatggcaaactttaaaagtggggaaaggaattttgggtgagataaaaagacaggtttgaaaaagcatacaagttcagggaactgcaaatggtttcttaagaccaaagcgcaatgtcagtgtgaagaagtggcaggcaatgggaaaggataaatcagtggagcccagacaatgaaggagctttgtacttgatgctgaggagtgtggatttgtttctgcagataatggggaacttctgatttttctttttttaggtggacagatagaatcaagtttgcttttgttaattcatgtgacaatgtagaaggtggactgaaggtagggagagtattgtattcattggagactcattaattgttagaagactattgtaatcattcaagcaagaaataatgacctaggccaggtacagtggttcatgcctgtaattttagcactttgggaggccgaggtgggagaatcgtttgaggcctggaggcagggtcttgctctgttgcccgggctggagttcagtggtgtgatcatggctcactgcagcctccaattcctgggcttgtgattctcttgtctcagcctcccaagtagctgggactatagacgtgagccactgtgcccagctcaaattactttattttaaattttttttttttgagatggaatcttgctgtgttgcccaggctggagtgcagtggggcgatctcagctcactgcaacctccacctcctgggttcaagtgattctcctgcctcaacctcccaagtagctgggaatataggtgcacaccgccatgcctggctaatttttgtagttttagtagagatggggtttcaccatatttgtcaggctggtcttgaactcctgacctcaggtgatgcacctgccttggcctcccaaagtgttgggattacaggcgtgagccactgcacctggcctcagattactttttatacattgaaagatgacctagaaattagtcaagacattaatttagatagtcatacagtcaagtgacataaacctcagagaagaggaaggtttccgtgctatcgccccacccactagagtggaagaactttgagggagatagaatagtgatattataatctagttcctatagataaagaatgtttgccaagaaggttaacttctgtagctgagctcctttgctgagaagatgaaggaacactgtttaatggatagatttagtctgtgattctctgtggaggtgattactgtcagttctctttatcctagcagcatttggaaaactgcagctaagcaacccgtcgtcatttcctaatgttactataatctggtgtcaatgactaatgatctcattgggctagttattcccttccagcgatgctggcatcaggaagcacattaatagtctgtaagaaatgcattcattaaaaaccaggtaatcactttggagctggtcctggcagtgtctgaataaattggacaagttagagaaaatcttgaacctgaaagctactttgtctttcagcttggtttgggcaaggtaggaagagatgaatcagttataatttgatgggatctaatgttacttttataagatacatcactttaatatgatgcttcatcattaatgttttagtaatctgacagcattagacagaattgatattccccttattttattatttcttggcttcatgacagaactgtgcattaaaaggcacttaagattttaaaagggatatctaagaaagtggttaaaaaacaaacaaatcccaagtggcttgatctgacttacaaactctaacaatgtgtagctaattgcagatagattttattattcacagtattgtgtcaagtctcctgtgcacatcttctgtattggagcataagtaatggagatgttatcttgcccaacattaggtttgaggaagtcgtttttaagacagaaatagtagaacagtgttattccatactgtactttccccttttatataagcttgctaaaattaaggttgggcaataggcccttgagctaaatgtgacctgatagaaagttttagcaacaatgaaaaaaattataactatctaatatacatatctaatattagatatttaccttacttacatatcatgcacaatcaaacaaatggcaattataactacattcttttttacttgccataatggaaaaactttattaaacaaattatgcccactgttgctctgggatttggggactaggtaggcatgatttcaatggaaaataatttagtaatggtatgtctcaataatgtatcaacaacctggaaagtatatattctttgacttaggattttcatttctaagaatttgtcttatagaaataatagtaggtcaaaacaagaatgtagtcataagagtatttactgcaatgttgtttagaagagggagaaaacaaatgaaaatgggctgggtgcagtggctcacgcctgtaatcccagcactttggaaggctgaggtgggtagaccacttgaggccaggagtttgagaccagcctggtgaaaccccatctctactgaaaaaacaaaaaagaaaagaaaagaaaagaaaacaaaatgccacaaaaaacaaagagatgaaaatgaaaagagatctcacaagacatatgaatatgttgcacttcaaactgatgcaaacaggtgtccatctaaattcaatagtgggcagttagaatttgaaacttagttgtcattgatgattgccctgtgctcagaggaatcacagattaaaaaaattttttttagaaagaattgaagttgagtttcagaaaagtcagacatttaagtttacaaccgtagttggagtgcaaacacatatatgtcttaattacaaaatgtctgttctgttagtacaacttagcataaagaagagatggacctacaagtgaagtatatcaactgataagaaacaaaatgctttaaaactttggattcaaacctatgattccagaactgttctaacattttaaacaatatggtcaaactctaggcaagtttggttcccttgtgtttgtgaaactatatttttcatacatcttctgaagtaaaaactaaacactctcattagttgtttaaatctggaattggatttggaatttgccttgattttatatacctttgttcttgaggctacctgtatttgtcagttttatcttaacttactcaaaatgggtcacttagtaaaaataattgtctaactatacacttttagtttgattaagctttttggattagtttgggattttgactaagtttctatatttgtatgatcaataatttcatacttatagtaaacaaaaatttatatatctgtactcctatagatttatgattctgtggctctaaaaatttcagtgctcttagagttgtggaaagagcagagcactagattaaatgaaacctctgtgtgccaggccctagctgggctttctcgaggcattagagtgataaagttggttgaggaaatggtgaaagccatacctttgtcctgccattttttttctttatgagatcatggttgaagtccctgactctcatgatagtgaaattgagattttaaatatttgtttctctttacatcccaaatccattatagctaagaggaggaatttcagatatttttccaagagcggttgtcaattttttttttttttttttttttaagacggagtcttgttctttcgcccatgctggagtgcaatggcatgatctcagctcactgcagccttcgcctccagggttcaagtgattctcctgcctcagcctcctgagtagctgggactacaggcgtgcgccaccatgcctggctaattttttgtatttttagtagagacggggtttcaccatgttagtcaggctggtttcaaactcctgaccttgtgatctgcctgcctcagcctcccaaagttgtcagtattttacttacttttctttccttgcatattggaatagcttttttttttttttaaattatcatatacactacctgtggaggtaaaaacataaactgttgttttcttggaggctgaggcaggaggatcacttgagcccaacagtttgagaccagcctgggtaacatagcaagaccctgtctttataaaaataaaaagaattactgggtggtgtgcacctgtagtcctagctacttgggaggctgagtcaggaggattgcttgagcccaggaatttaaagctgcaatgagctatgattatggcactgcactgcagtctgggtgacaaagtgagaccccatctctaagaataaaataaaatggaattaacattcactgtcaacaaaggcactcttgtgccgtttttgtccccttcttgactgtcctggtcgtatgagatctgtttttcctctaaattcattgtatactattttctttacattgtacatttggccatctctgggaaaatgttaagaatgttaatgttctcattttagtatactgatatctcacttttcagaatatcaccttcctaatctttttctttagtcattttatccagttgtacttatgtaagctaccataaactttttctgaatcaaagcaaaatataaattaataaatgtttgcttctttaatagtgtatattttattccttttatcaaatttttaagtcagtaagtactgtgatttaagaactttttatcctataatactgaataaagtgttttgatatagaatacggtacatagatgtagatatgcatttagtgccttgcatatttgttgaatgaatgattactacacatatgagctaagtcagctgtttggggtcttctttttgcctgcatctgattggcttgtcaagcagactgactgcccacctgttagacccatatgggctggctgagtatatagctagtgttttgctcagcacacctgcttgtgcgcatggattgatgtctgctcttaaactagttgccaaggagtcaagtgtatggcaaggtgaaggaagactggcagtgaagatatcttaaagaggtaatctaataataatggccagtggttcccctgaatcttgtttgctcaagttgttcacatcagagagatgtaaaattgctttcatttgggtggatttgggaattcttttttgataatgggaaaaaatgagaaggtcctctatgatattgttgtggatggatgtgcatatggtcagagaacatgaacctgttaaattttgagcttgaatacttttcattaacaacttaattgagaatagctagatagcatctattgtttattctttttataacaagtagagaaatagagaaatgtcttttttttttttttttttttttttttttgagagagagtctccctctggcgcccaggctggagtgtagtggcgcgatcttggctcacagcaacctccgcctcccgagttcaagcgattcctatgcctcagcctcttgagtagctgggattacaggtgcccgtcaccacacccagctaattttcatatttctagtagagatggggtttcatgatgttggccaggctggtcttgaattcctggccttaggtgatccacccgccttgggctccccaagtgttgggattacaggcgtgagccaccgtgcccggcctgagaactgtcatatttttaatcctgttgggtctcccccttctcctgtcactgtatttgagcaagtttatataaattattgatatttttctggccacaaaagtgcagctatatttaagataatatttttttattttcaccctcttgacataatcaagccataacatgaaatggagatttattatttattgtttattgaataaaattttgttccttcttctattttttttggagacagaatctcattctgtcacccaggctggagtgcagtggcacaatctcggctcattgcaacctttgtctcccaggttcaagcgattctcatgcctcagcctcccgaatagctgggattataggcacacaccaccacacctggctaatttttgtatttttagtagagacagggttttgccatgttggccaggcaggtctcgaactcctggcctaaaatgatctgcctgccttggcctcccaaagtgctgggattataggcatgaaccactgcacccagccagaattttgttcctttttaataattaattaattaattaattaagatgaagtctcactatgttgtccaggctagccttgaactccttgggctcaaatgattctcccatctcagccttctaagtatttgggactacaggcaggttctaccacacctgacttgttccttattttagatgttgaaaataagcaagtgaaataaaggcttatcaaagtgtacacagcactttgctagatactgtggatgatttttcagggaagatgccattcctcccctgaagaagataattattgtagagttagagctaacagacaaaatagatgatatataaatttattcttaggagccaggttgttgagaggattaagagcaatcactagacgattagaatattggggacttccaaaacatctgaagtgtatctagaatagtagataagatctgcacaggtaggaagtagggtgagccgggtgtggcggctcatacctgtaatcccagcactttgggagggttgaggtgggtggatgccttgagcgcaggagtttgggaccagcctgggcaacatagtgaaaccttgtctctacaaaaatacaaaaattagctgggtgtgatggtgcacacctgtagtcctagctactcgggaggctgaggcgggaggatctcctgagcctgggaggtggaggttgcaatgagccaagatcacgccactgcactccagcctgggtgacagagtgagaccctgtctttttttttttttttttgagacggagtcttgctctgtcgcctaggctggagtgcaatggtgcgatcttggctcactgcaacctccacctcctgggttcaagcgattctcctgcctcagcctcctgagtagctgggattacgggcatgcgccatcatgcccagctaatttttgtatttttgtagagacaaggtttcactatgttgcccaggctggtctcaaactcctgacctcaggtgacatacctacctcagcctcccaagtgctgggattacaggcgtgagccaccatgcccggcctgagactctgtcttaaagaaaaaaagaaaaaaaaaggagtgaaagtagaggtgagaagtgcctggaaaacgggacttttaaactgagcttgctgcagaggtggacacaaaaatttggggctgttttgtttgaggaatgaagaatagcaggacaaaaacagattgttttggggttggtattaataattgtataggtagcgtggggaaaacttttagagagccttaaaagctgaacccgtatgttttagtttggtgtgagtaaacgtagattcctggtgctctgtaacaggagtgtttgtcgcagtttagtccgacagtgatggcttatagtacatatgattgtggtcaagatgaggagattaattagctaatcccaaagggatttcgtgatcatttattgaatccttaccaccaagcactttttgtcatgaatcattatttcatctaaacctggcaactgccctgtgagtttgatattgttataatcctcaccgtaacaagtgagaatgctgatacccagcaagggcaagcacctttcttagggtcacaaaacgaggaaggagtagagcagtcagtgtggctccaggaaccagaatcttaaccactatgctctaaagtgtttttcagagaaaggaagattaacattctttccttcgatgtatttttttccttgctaattccctatctccttacctacaatgtggcttagtgatcttaggacaaaggtttggcttggagacttcaaagaggtttgtccatttcagactcttcaaaaacagttactggttacttacaaataacactttgtaattcaataactgaaaaatcaaaacaactttaaatagattttaaggctggagaagggaggctagctaatttcataaatttgttgaagtttgattttctttaccctagttgtatcataaataggaatggttttttatatttatacttgtttaaatatactgtttatacctgtttaaatgctaagccaacaaaagctctctgaaagaatacatgcacacaaacacatgtctgtttcgtcacggatgtgtaactcactcatggttgctcctcctgatgtctgtgtgccacacagttcggaaaaggcacttgcttggctgtcacgctgtaagttccctttgtcatttgtgacaattggtctctttgctgtacatcttttgggatgaaggattgagctcttgtaaaagcatttcagaggtttttcagctaatgatttttccgctcattctttactgtttggtttcctaggcaacccatcctccccttgcaccctgctgacgtctgttcagcccctcttcctctccactacccctcccattactcaagttgttttttcattgctgctttaggattgcactaaaggaatatacatgttttcctaaatatctgctcctctatactttttagaatatattagaaggatgggaagaaaaaaaatcatttttagaagctaagtaacctgtatttttaggtcagttataacagggtttcatccatataaggctaaatttattctgttgtttctaggttggttttcttttttaaagttaaacaataataaagaaattgttgtccatttaaaccaggaattccataattaagctattttaggaatgtaaggtgttgtataggaaaaaacagtctgaaaatggtgggcatagttgcgtttctagatggttatgctgtgatttatttttttaaaaaatcagttgtgtctgttaaaagcatttctgttactgtggggaggggtttttaaagttttaaaaatctagcttttgggtgagtgcagtggctcatgccagtaatcccaccactttgggaggctgatgtgggaggatcacctcaggccaggagtttgagacccatctgggcaacatagtgagactctgtttattaaaataaaaataaaagtagaaataaaataaaataaaaatctgtttagttgttgttcacatttggtcctttagagatacttttttgagacagaatctcactctgtcacccaggctggagagcagtggcatgatcacggctcactgcagcctctatctcctggacttaagtgaccctcccacctcagcctcccaaatagctgggactacaggtgcatggcactatgtctggctaatttttaaatttttctgtagagatgaggtccctccatgttgcctaggctggtcttgaacttttgggctcaagagtcctcctgccttggctccccgaggtgctgggattattatagtcatgagctactgctcctgacctagtgataactttttgaattccaattccttgatcctttagcatcctaggcaaagacaaccatttctgctgggtaaagcacagtgaaaagccctgcttctctgtatacaaatgaaacagattgtacaattaatatgtattgggtgctgcatggtccatcctaacagtagtgctaattgccatatcatttatttttacatttggaagtattttactttggcctcaatgtaattttgtttttttaatgctgtagagtgtatgggatataggtaaggagtggataagaaaggaaacaatagaatcagaaatagtaagaattgctatataaatgcctttccctgtaaatgcacacaaatatatgaggtgtttttttttgggggggggggtcttgctctgttgcccaggctggagtgcattggtaggatcttagctcactgcagcctccacctcctgggttcaagcaattctcttgcctcagcctcctgagtagctgggattataggcgcccaccaccacgcctggctaattttttgtatttttagtaaaaatgaggtttcaccatgttggccaagctggtctcgaactcctgacctcaagtgttctgcccgctttggcctccgaaagtgctgagattccaggtatgagccaccatgcccggccacgagttttttgtatgtatgtctaaatacgtagaaagacaagatttacccccttttttggtgtctgtaataaatttagtgatatacgtgtatgggtgtatatgtatatagatatgtatgctatgagttagaaatgaaaaacctgccataaaagcaagaggaaggaggagttaattttgcctgaagatgtcagagaaggctgcattgaaaaaatttgccatagacctggtgataggagattgaatgggccttactagctgtgtatagtggtttgtaccaaaaagtatggggataggaggggaaagtggctgggaatattggaaaatctagttgaaagataggttgaaggccgattgtgaaatagtttcacttactttatcatttaagtaataggttggttagaccttttagatcagatcagtattttgagagtatctctaatagtatagaattatttgtacttcttgactgaaactatatgttaaataatgaatttgtaacttagttattagagtgttcaaattatacctgtttctctcccttccctcaatttttagaaagcattctctaatgaggcaggggtttttgtttgttttgagacagcgccttgctctattgcccatactggagcgcagtggcatgatctcgactcactgcaaccttcgcctcccgggttcaagtgattctcatgcctcagcctcccttgtaggtgagattacgggcgtgtgccaccatgcctggttaatttttgtatttttgatagagacggggttttgccatgttggccagctggtctcaaactcctggccaccttggatccgcccaccttggcctcccaaagtgctggggttacaggcatgagccaccatgaccagccaaggcaggttacttttatattggttaaaagagtgcctgatattaaatccttagtctcccactaaccagctctctctctgaccttggatgagccttaaactttggtttaattcatttgtaaaacaagcataataatgcctacctgaaagaactgttgtgaggatttgattgaacgggataatatgtaaagcacagctcttgacacactgtaaatgtagctgaaaaatagtagtgattattttgtggtaacagctttcattgtagaagaaaattaatggaatgtgaaggattaatgattttgggaggtggaggggaggagaccttgttaagtagattaattaggaagttattggtttgtccaaacagtgcttttaggtgacaagggaattcagtgtggaagaggaggtttggtaggagaagaaaatataatcagtttagttgtagatgggttgagtttaaggtacccaaggacacaaaggtaatactgtggaggtggctgttggaaatacgaagcctggaggtacgaatgtggaagttattgctgtctggttggagatacttgtgtctgggaagagtgatcgagtgagtagtggcctattaatgttttctttttttaaaaaatttactttcaatatactgccaataaagtaatttgcactgttatactaaggtattagaccacgtattctgagttcagatttgttgcttgactcgttaatgtatgtaggttatacccagttttggtaagcctcctgacctttggccccattcacagcattatctctatctctcaaagggaaaaagaagttcattctttgaactggggagtgctctgatgttggcaggtctactcctcctcaggtctagacactcttggcctccacagtggttttattcaggaaagttctcacctttgaattgtagacttagtgcagacttgctggtagttggctaggcgggatcacaacagtgattggtattggtaagtacatgtattgctgccaagaagttgcatagttcatgtgttcagtcatagccttttctttatatgacgaccccgctgaaatacagaatggcctgctgccttctcacagaaggtctactgttccaagcttatttttttctgagtgagaagaaaaggtcttttgccactgttttcagactgaaatttaaatttcagctgccttggatcctatataataaaagattgagacacagaaattgttctattagacttgaaatttcaattgcttttacttcccagtttgtagtagtgtttgaacctaaaatcctatgtgtgtttttagttaccttttcaagttaaactttcagaaactatctgcttaacttaaaaatttactcttgttaattgcccaaccacatcttacttcatgtgtcaaaatctgcctgatatttttaatttggaagtccacagtagtgggaagtcataggaactcccagtcagggtattcacagtaactactcacagtaataggaactcacagtcaagtctaatttttcattttaatttttccaatcccttctttacttctagtatactaattgaaaaaaaaaaacttgggttgcctttagtttcaatttataatttttattaggattttactgatactgtatctttttggtactggaggtctcagaggactgacctggttctacttgtttgctcttgggatttagaacgatagtttctattgtgttgagccagcaacattttgcttattttcaagaggcagagtggcagagtactaaattgcaaggttgtgcagaccttaaataagtgtatggtgagctataaagttacaatgttaaattagtttctggctggcccacattgtttccaaagttgactttgcattttaaaagaccttactgatttaaaaagcgaatagagaactgcttggaaacacatatcatctgagagacattcgaacatgcggggaaaaaaaaaagtggaaggaaaggtgctgctggctgggcatcatagactagaaagctgcatttaaagtttaaactgcttgggtaagacatgttttcctggtttatcctcatgtttttttccatctgtgttctcttgccattattaccaccaaatacaggagaatactcctttacttattgtagtcttatttgggagacagactagagtgtggattatgtagggacagaaagggagacttgagggtttttttttgttttgttttgttttttcttccagtatttaggttcattgatgtacagggcatatgttgtcttcttttagatttttcagtgaagttttgtactcctctccataaaactctcacacatttatatttatacatatatatgtaatatatatattatttatttattgagaaagagtcttgctttgttacctaggctggagtgcagtggcatgatcatggctcactgaaggctcaaccccaaagactcaagcaatccttccacctcagcctcccaagtagctgggaccacaggtgcacattaatatgcttggctaattttttaatttttaaattattattattgtagagatggggtcttgctgtgttgcctaggctggtctcaaactcctgagctcaagcaattcacctgcctcggcatcccaaagtgctgggattataggtgtgagcaccactggctgggccaatgttttttctcttataatgtttcttctgatactttgtggctattctgaatgtgttcttttaaaaattatcattagaaagttacttcatttttctttttttctttttttttgagtcagagtctcgctctgttgcccgggctggagtgcagtggcgccatctcggctcactgcaagctccgcctcccgggttcacgccattctcctgccttagcctccctagtagctgggactacaggcgcctgccaccgtgccggctaattttttgtagttttagtagagacggggtttcatggtgttagccaggatggtctcaatctccttgtgatccacctgccttggcctcccaaagtgctgagattacaggcgttactgcatttttctgcaccaggatctctttattttgtacttaggctttgcttgctccctctttgctttagtttcatcatctgtgaaacaaaggggttaggttagaataagaaatttccaaagatctttctacttctcacagtacgtggtgctgtgtcgaggtaacgtcctttacatacctcatgaagttagtgctagttgtaccatccaaaccacacataagttctgtgaatacaaccaaacagctttgttcacatgtatttgcatgtgtttcaacttaccgtgttctctgcataatgattcttcaacagtttgaggtaaagagtgaatatttcagtttaaaaatacagtcaaaagtatagtttcttattctggtggacgtggtttactactacctcctccccctgtgttttagtttgttgctgtgctagttttattgcatattttctctcctaaaaatagatggtctttatctaaagcgtagtttttataaatatttgcatctcaagtaaattttttcctaccacatggatttcatgtggtgagttccatgaaagcaggttgtgttaagagggcattctcctagtacctgtttattcttttccatacctctgccccaaggatcttgtttactgatgtcagaatactggcagtttgagtagtactcttgaagagttatttttgtatttatttctgctggattgaaggaggtagatgttgtactcattatctctcagaacatctattcaatcctaacccccaaaatataccttagaaacaggctctctgtgtttttttttttttttttaatcttttatgaagacatacaatacacacatttctcttagatgctggccaggaatttgtttgaacaaattgaaatggcaagttttaaccctaatttgaatagagttccagaaaatgaagttagggcagaggttggtgaggggtcatattggagtgtcactgagctagtaccaatttgtttgtttgttttgtggtaaaatgcacataatataaaacttagcattgtaaccatttttaagtgtacggttcactagtgttaagtacacttgtatagttgtgcaatcaatctccaggactcttttcatcttgcaaaactgaaactctgtacccattaagtaacaactcctcatttccccttccctccagcctctggcaccaccattctgctttctgtttctatgagtttgagccagtatttgtttagctttttcatttttgtcttgagaacttgaccttctttatgacagctaaatggatgttgaacatgaagaggagagtaatccagtaaaactggtagccactcttcatgatccatgagtgttggtagttgccaaccccgaaattagagtatcagtcagtcttctgtaatgcagtttggaaattgctattccttgtgtttgaggatgatgacaatagctagtgactaacacttacttggtacttattacatgcctgaggttagaggaaagacctgcttctgggaagaaagagtaaaggaaagattgggtgcatgacaatgtatagatacataaaggaagttcttgtctgttttctctgttaagctcaaagctaagtcatctgttgaaagttagggggctcaggttggttaggaggtttaaataaagtgacagatgtttgcaattaccaggaaatgggatagagactcatcagggaaagtagaataatactaacagtattagtggtaataataacaacaacaagaacagctaataatgactagttatctgttctatgccagctacattttatgttgtaatctttatagcaaccttattaaagtagttgttattacaggtaagagactaagttgcagagttaggatgccagtgtcactctgctgccccaagcccaggtgttctttcctttttctgcactgttaatggcattgggagtgtctgcctgacactacaaaccagaagtttagagtataatttttagaaattgttcttcagagaaaggaggaagagtgggctgaagtaaacgctatatgtctaaaatatcacaattatgttgacttttttttgccaccagaatgattgatgcccttgatgggtcatttcactaaataaagtgagttaccacagcccagtagaaacccagatctggttgtgtgaccttaatagaggtatctgaaattataaattgattttcttccaatagcccgcatctgaaataactggattgaggttcatgtcagtaaattcttcaatttctatgtagggaaaaatgaggacctttttgtttgtaattattctatttattgaacagttattagttgtacttctaatctgtactagaagactatattacaaagtgtttattttccctaaacaatggcttctcttgattcgtgttcattattgccctaaataaattgaaatttagaaaaagaaaaacccagttttcttagtatcatacatgcaagcttaagttttcttatttgtttgtttttatttgacatacatgaaggttatttccaaagatacaaatggaggccaaaacagtttgacataaagcagaccaaaacagattgaattatactgtacctctacactgactagcattttgatgtctagatggataagtaagcatagtgctaatttacaagcgcaaactcaactagtaagattaactaatttctaggctgtaatgaatttatataaatattcttgttattcagatgggaaacctcataactgtgctgtagattagacttgcattgcctaaaactggagaatgtaactttttttgtttttttgacaaacccacagccagcatcatagagaatgtaactttgcctcccaaatctgtgtatgtcagatcacttataattggagctgcacagttccctcttctaggtttgactctttaaacttggtaacatctcattaggctaaatgaattctccatgccctattgtctgtcttgctatgttgcctaacactttgattttaacattaggaaaacaactaccaataaacatgagataaaacacaaaatagatgaataccactagcttggtaatataaaccattatataacagggatttgctgcagactcttttcacacatagaaaacttttccaaaagacatttttgaagtttcgctatgaagaaagtttgccagtgactgaaagaaccttttgtaggtccctatttgggagtgcggtaactggtgcttctggactctatacacagagatccaaggctaggaaaatatctcagggtaaagctatctaagttttgtatccaaaagctattaatttcttcagttatgagaagaaaccacaaattgcgtaatggccttggtattttgttggtatggagagaaggatgatctcagaagacttgtaggcctgtcttggggtgtctgtggtgtgtgtgtgtgttgctttttttccaacttataaaaaaactcaacaatcaatcttagccacgtttttgaaaccgtagatattctaagttagcaaatccaaatcagtacacgaaacaaccatttttgccagcaccaaatgcatactttgctgagctttcgtatctgggctccagagtttattcatagcaaattctgacatctgctaagttctattatgacccagaggggagcgaagtgaagtaggatgaagaatctggaaacgcatgctgcttatagggtaaattgcattgaggaatttgcatccatgtagcctttccccttatggaccactgtgacgtttagtaggctgagctaaaaggtcatattgctcaagatgaataacaataaatggtttgttcagtgacttgttaagcctactgccagtgcctactaatagccaaaatagctatttctcttctgggatatatgagtttggctgtcatctttttgggaatatggtaatttgtagccatcactttcagtgtggtggggagatctaacatttaaaagttcttatcccagtggtttacagatcccttttcccccacaaaccgctgctgcttcttttgaaccttgaatgctaccatggtttaattttttttttttttttttttttgagtcagggtcttgctctgtcacccaggctggagtgcagtggcatgatcatgactcactgcagccccagccgcctggactcaagtgctcctcctgcctcagccacccaagtagctgggactacaggcgtgtgccaccacacctggctaatttttagatgggatttcgcatgttgcccaggctggtcaagcagttctcccaccttggcctcccaaagtgctgggattacaggtgtgagccctcatgcccggccttcctttgctttgcttttcttcagttgtggttcagttctagaccatgtttacagtagatacaggggcacagctcccaatagtgtttaaaacatgtgaagtatcggggcagaagttagcacctctaataagtttaaattccctcggatttgctttataggaagtatgttaagaacattttccagagcattttcattcaactgatatattttacatagctgccttattaaaatacagatgtattcttgaaattattgaccaatttttttttttgagatagtcttgctgtgtcgcccaggctggagtgcagtggcacaatctcggctcactgcaacttctgcctcctgggttcaagcgattctcttgcctcagtttcccgagtagctgggattacaggcgccctccaacatgcctggctaatttttgtatttttagtagagatgggtttggcatgttgtccaggcttgtctcgaactcctgacctcaagtgatccatccacctcagccttccaaagtgctgggattacaggtgtgagctaccatgcctggccgatcaatttttttttttttttttgagacagagtctcgctctgtcgcccaggctggtgtgcagtggccgaatcttggctcactgcaagctccgcctcccgggtttatgccattctcctgcctcagcctcccgagtagctgggactacaggtgcctgccaccacgcccggctaattttttatatttcaatttttaagaaatgaaataagatgaatgatgagtaattcctttttcagtaatatagtagattagatattcagagaaatcccctcgggtcagaaattttttttttttttttttttttttttgagacggagtctcgtaccgtcacccaggctggagtgcagtggtgtgatctgagctcactgccacctccgcctcctgggttcaagcgattatcctgcttcaacctcctgagtaactgggactacaggtgtgtgccaccatgctcagctaatttttgcatttttaatagagatggttttcaccatgttggccttgatgtcttgaccttgtgatctgcccgcctcaacctcccaaagtgctgggattacaggtgtgagccagctggaacatttttaaatgaggctaggaaaggtaaaaatgtatgagcacatataatatacatataacgttctggaactagtgtaagaaaaataattgaggccgggcatagtggcgcacgcctgtaatcccagcactttgggaagccgaggtgggcaaatcacgaggtcaggagttcaagaccagcctggccaacatggtgaaaccctgtctccactaaaaatacaaacaattagctgggcgtagtggtaggcgcctgtaatcccagctactcgggaggctgaggcaggaggattgcttgaacccaggaggtggaggttgcagtgaactgagattgccccactgcactccagcccgggtgacagagtgagactccgtctgaaaaaaaaaaaaaagcatcatttcataaggcagaggaagccctgaaggtggtggtggttctgagggtttcttgtaggattagaggaaagtggagggacaagagacaagtagtacctaagcatagtggaaggtcctactggagactgtcccagatggaactgggaccctggagggtgcaagtcttcagtgcatgagtagaaaaaagatgtccaagatgtcctgcatgcagagacttgcctcttactgtcttggatctggttggagaggggaaagaagcctcccatgtgattgcctaagcagacgcccatactcaaagatttgcagtcagattttatactacctgtgaggactgaaaatctctaaactgaaaacttagttgaaagtattcctatttggttatggttcccagtgtctgggagaatcaaattcatatctcttttaaattaattaattaattttagagacagggtcttgctatgttgcccaggctagtgttgaactcctaggctcaagcagtcctcctgccccggcctcccaaagtgctgggattataggcatgagctaccacgcctggcgaaaacacactttctagtcaggccttaaagacttttaatagaggaagttgcaagaaatgtgagtttgcgtaagaaaataagcaactatgagttggttattttgagtcagatggggcagattctattttccagatatggaaacagtatttcctgactcctgctcttctagaacctcactattgtactatcaagaagtagaatctttttctgttgaagctgggcagtcctttgtgactgctttgaccaaaagaatatgacagaagtgatattatttcatttctgaggctaagtcataaaaataccacacatttctttattctcttgggatgctcattcttggaacccatcagcatactctgaagaagcccatggagagatccatgtggaaaggaactgaggtctcaggccagtggcaccagctataggcttccagctgatggtcagtactgacttgccatctttttaagtaagcgatcctgcaagtggatccttcagttctctatcaagctgccctgggtgatgccatgtggagcagaggcaagctcttctctctaagccctgaacagattactaatttgtgagcaaaataagtaattattgttattttgatccactaaattttggagtggtttgatatgcatcgattgacaggtaactaaacatcggtggtaaccatcagtcttataaagcctacagatgtttaaagaaataaaggaggaggttaaaaatatgatgaggagactcttaaaactgatgaggaaaatatggaagaagaactcagtctctgtagaacttctagaaataaaaaacatgcagatgcccccagacttatgatgatgatctgattgtaatttttctttctttatttctttttttttttcgagacagggtcttgctctgttgcccagctggaatgcagtggcatgatctcagctcactgcagcctccgcctcctaggttcaagtgatcctcccacctcagtctccctagtagctaggaatacaggcaggcaccactatactcagcaagttttttatttttagtagagacagggttttaccatgttgcccaggctggtcttgagctcctgagctcaagtgatctgcccacttcggcctcccgaagtgctggcattataggcatgagccacctcagctgacctgattatgatttttcaactttacgatggtgtgaaagtgatattcattcagtagaaattatacttcagtacagtattcatgaaatattcagcactttattgtaaaataggccttgtgttagaattcaagctgtctaaaccaccttgttttgttttgttttgttttaggcttttagcagtgtgaagccattgtttttagtttctctctctagtgataagcggaaaagagggttgaggaaggggctttaccgaaccaaccagaaacaggaactaagaacccaagcctgtgttccctcccttggacacccctgtaagatgattttgctcagtcgtaggctaacatcagtgttctgagcatatttaaggtggaccaggctatgatgtttggtaggctaggtgtattaaatgcatttttgacttagtaatatttcaacttatgatgggtttataaggacataagccccttgtaaattgaggagcatttgcagcgaaaaatacagtggaaagaggatacagagtagagtaaattaatgaactggaaaatggatctgaagaaaatttctagaatttagtacagagaaagaagagatggaacatatgagaggtttagtgacatagagaatgagacgataacatctgtctgatctagtggatcccaaactttttaaatcttaggatcccttatgccttatgctctctctctctcttttttttctttgtttgttggagatggagtcttgctctgttggccaggctagagtgcactggcatgatcttggctcactgcaaactccacctcccaggttcaaacgattctcctgcttcagcctcccaagtaactgggactacaggtgtccattaccacgcctggctagtttttgtatttttagtagagatgaggtcttgccatgttggtcagtctggtcttgaactcctgacctcaagtgatctgcccaccttggcctcccacagtgctgggattataggcatgagccactgcacccagcctactctttaaaattattgaggacccaaattgcttttgtttatgtgagttacacttataatttggccacatttttgcatatatgttatagatccattaaaagtttactttaaaaaagaaacatcatagagtgagaaggtgagccacaacttgggaaatgtactaacaaaggtttgttagccagaatataaaagaactcctcaaataaaaaaaaaaattaggaaaaatggaaataggaaagtcatgaaaaagttaattttacaggagtagaaacaaatggttcatgaacatatgaaagatcctcaacccttttagtaatcaagaaaatgcaaattaaaatggcaaggaactgtctatctcctgctcgtctcctttcccccaccaaacagggaaaaattaaaaatatagttacagttgttagagatgatatgagcagtaggagcagtcatactgttaggtaccttcatttttgaaaacaatttggctttacctagtgatgcctaggtatgtcccctagtgaaattcttgtgcgcatggcttaagagacatatgtaagaatattttaattattgttcatagtagctaaaaatccaaacaactcaaatgtctagcaactgtaaagcataaatacagttggtatatttataaaagggtgacctctgagcataaaaggaatttaagtgccactacatgcatcttcgtagaggaatattccaaaatagtggggatcaaaaaaggcagttagaaataataaatacggggtgggtgcagtggtacaggcctgtaatcccagcactttgggaggctgaggcaggaggatcccttgagcccaggagttcaagaccagcttgggcaacatagcaagaccctttccctacaacaaattaaaaaaaatattatctgggcatggtggtgtgtacccgtatttctagttactcagaaggctgaggtggaaggatctcttgagcccaggagtttacagctacagtgagttatgctcatatcactccactccagcctgtacatcattgtgagaccctgcctcaaaaaaaaaacgagtatgattctatttgcataaagtttagatgcaggcaaatctaaacaatatgttgtttggggatacatatatggtaagattataaagaaaagcaaatgaacaaacttcaggatggtggttttcttggagtgggatgaggtggtactggggaatggaagagtacgtaggaactatggtttgaatatgacatattttacaataaaattttttataagcttgttgttgaaaggaaccctgaggtgattcttttttctgaagaagacttttggtaatgcggatagtaattttttttttttgagacggagtctctgtcaccaaggctggagtgcagtggtgcgatttcggctcaccacaacctccgcctccccggttcaagcaattctcctgcctcagcctcctgagtagctgggactacaggtgcatgccaccatgcccagctaagtttttgtaattttagtagagatggggtttcaccgtgttagccaggacggtctcgatctcctgacctcgtgatccacccgcctcggcctcccaaagtgctgggattacaggcgtgagccaccgcacccggcttgcagatagtaattcttaatcttttggtacatgctcttgcacataaagttttacagtaaatatatttttcatttttttcctgaatttctttatgtcaaccttgctaaatagagagcgtgcctaggaagaagatgaaactaggagaattcatccacaagcttaagttcaatggttgtagccttagaatgagaaattaggccttttattctacctgtcttaaaattagcttattattgttaaaaaccaaagactgtttcttagtttgtttatttttattttttgttcaggagcagaagcactcttttgcccctagccctagcctgcatctgctgtttgttaaatacctccatgaattgacatctcttccttttccgaaggaatgtgaaacccaataattacacacagacctgacctactttggaagaaccagaggacaaagaaaccctagatttcttcgtctttttttaactaaaaagcagagatttttgggaggcgagggccagaacttcctgtatctattcttctttgaagagcccaactcacctaagaaatttctggctgggcatgatggctcatggttgtaatcccagcactttgtgggactgaggagggaggatgccttgagcccaggagttcaaaaccattccaggcaacataacgagactctgtctgtatgaaaaggaaggaagggagggagggagggagggagggagggagggaggaagaagagagaagttttcccttgtgtgtgctgcttgtaggctagtggacttgattctaatgaagcctttgcatgtctgctgatccggaaatatttggccttttcccaaggctctatggctttgggaaaataatgatgaaatacctatttattttttatttttaattgtcctattttatatgtttgatttttgtaaacacctcagccctttttaaaaagaaatagttggaatataaacatatattctcattaattaataaatcagctggatgactagtccaaactattattccattatcattgtcactgccctgtaacttattttagttctgtgttagttatatttacctgttgttattttgctaatttgatagtttattgtgaaaacaatttttaatatttgtctactgacattttttaaaatagaaaaaaattctcctaaaccacaatcagaaatcttttcatttgattcattaacagttactaaaacaccacaactgcgttctgggtcctaggccctgtaggggggctcacacaacttcactaaacaccagccttagcagaggaagataactatcaatatctggaatgtcaagaactagaagaaacaagataatgtggtcctagcagacagataaatgggatagattcaagaattcagaaataaaaccttacacttatggtcatttgacttttgttaagtctgcaaagataattcattggagaaagaagagtcttttcaccaaacagtgctggaataagtgtatatccatgttcaaaagaatgaagttggacctttgctttataccatatgcaaaaattaacttcaagtggaccacaaaactctctaagagttttcatagagttttatagttttagctctcacatttatgaagagaagaaaacatacgagcaaaccttcctgatttggagttaggcagtggtttcttaaatagactaccaaaagcagaagggacaaagggaaaaatagataaatggactacatcaaaattaaaaacttttgttctgcagacaataccatcagaaaattgatgacaacccatagaatggaagaaaatgtttgcaaatcgtacatctgataagggacttgtatctagaatatataaaaacttttataactcaatagtaaaaagtctaataatttaaaaatagaggaaagatttcaatgtgtaatgcccctcaaagtgtatgcagttagtccacaaacacatggaaagattctcagcatcattagtcattaggaaaatgcaaatgaaatcctcaatgagataccacgtatccactaagatggctgtaataaaaaaagatggacaataacaagtgttggttaggatatgtggaaagtagaactttctggcattgctggtgagagagaatttaatgatgcagcagctttgtcatttcttcaaaatgtttaatgttccaaaaaatgttaaaagtggaattaccatataacccagcaattccactggtaggtataaacccaagataagtgaaaacacattcacataaaaattttatgaatgttcatggcagcattattcataatagccaaaaagcagaacaaccaaaatgtccatcaactaaagaatggataattaaaattaatatatccatacaatggaatattatttggcaataaaaagtaatgaagtactgatacatgctgcaaggtgaatgccccttgaaaacattatgccaagtaaaagaaacaagtcacaaaaggaccagatattgtatgatctcattgagatgaaatatttagtataggcaaatttatagaaagaaagtggattagtggttgcctagggctggtggagggataggagtgggggaatgaggagtgacagctaaacaggtatgaggtttttttcagtcggaacaaaaatgttcagttagattgtgatggttgcactatcctgtgaatttataaaacacgttgaattttacactttaaattggtgaattgcatggtatgtgaatatctcaataaagctgcttttttttttaaataactagaatacaaagaaagcagggaaattcttgctgaggagaaatactaatgtgattatttgtcttgttaatgaatttcatgtcctcgttcgggctaaatatttgtcaatttttaaaaaaatctactttcagaaagagtttcaggtatctttaacagaagatcaacagattaaaacaaatttaaaagaattagggccaaatagtctagggaagaggagagatggatactattttaccagaaaacttaggctaagtagagctaccacagttcacttagcttttgctttctggcagtacaggccaacaagaaaacatggattccttaactaacattattaaataaaaggaaaaaatacaattgagaaaaccgatttcccagcaccacactgtaagtcaaaacttaataccctgtgacttgatatcaggttcacaaaactatgtctaaaagaaaaattcttcaataatacatttttaaaaaagatttcaaggccaggtacggtggcttatacctgtaatcccagcactttgggagtccaaggcagatcacttacagccaggagtttgagtccagcctgggcaatataacaagacactgtctctacaaaaacaaacaaacaaacaaacagaaacccctatggtggcacatgcctgtaggcccagtcgctggggaggatcacttgaggccaggaggttgaggctgtagtgaactgtgatcgtgccactgtactccagcctgggtgacaaagaccctgtttcaaaagggggaaaaaaagggttccaaagtgttctttatatggaaaccattttgattctggatataggtctagtgagtctagtgaagaaatgttgtttgttaagcgatctggttacttgaactgacggaaagcagaaagctgttgtttagtctggtatctccaacattaaatagaagtttcctaacaaaacaatttaagactgaatttgaatgtagtgctagaagagcagagcattccattatgatgtttgcagttaactattttagaatagctttagatgtgtagaaaaattgcagatacagtacagaggtcccaaataccccacggtcagtttcctctattcttattatcttacagtaatatgatacatttgtcataattaatggaccaatattagtacatccttattaaagttcatactttactcaaattccgttagtttttaccaaaatgtcctttttctgtgtcaggatcttgtccaggataccacacgccatttagtcaccatgtctccttaggtttctcttagctgtgacagtttctcagtcttttcttgtttttgatgaccttaatggttttgagtagtactggtcaggtattgtagaatgctcctcagttggaatttgtctgatgtctttgtcatgattagattggggttataggttttgagtggtaagataaccaaggtaaagcgccattttcatcacatcataccaagggcacatactatcaacatgacttattactgttgatgctaaccttgatcacctggctcaggtagtgtttgtcaagtttttccactgtaaagttctttctttccccccctttcataatgtactgtctggaaggaagtcattagatgcacatgcttttgatagcattttgtgcaattgaaaaaagtaactttgtttggtaaactaaggagcctgacatatttacttttccagtggagagcttacctatgtttacacagagtttgctggaatctctacaagtaaggctaaagcaaagcttttctcaagaaagagctttagttttgttcacatgcttgaactcttgcttgaaactgctacagttctgtactataaattatggaagagatttccttggcctagaatttcttggagatgatagttgtctaccttataaagaaccatgagctgttagttttctattactatgtagcaacctgccacaaatttagcagcttaaagcagcacacatttactgtcttacagtttccatgggtcttgagtcctggcatggcttagctgagccctctgctcagggtctcagaaggctgtacagtattaaatggactgcattgtcacctggaggcttaactgggaaagtagttacttacgagatcgttcaggtagttggtagaattgctttatgagtgaggatcccagctttttgttggctgttggctggggcttctaaagagactgatcctagagagactgcccgcagttctttgatgccacccacagttccttttcctgagggcttccgtaacatggccatttacttcattaagctctctagctccacttggaagaaagggaggatattacataaaggcatgaataggtctgtcattatgtgtgtgtgtgtgtgtatgtgtgtgtgagagagaaccattgggggccagtcatcatggggtctgtttgtcacacagaatatgacttttatttttatttttaattttttttgagggtacatagtaggtgtatatatttcataatatgacttctgaagagaatatttaattttgagtaggactgcatccagtaagtctgtcttgatgaaaattagtcacagagtacatcccaaatgttagtttaacccaatagagctggttgtagtaaaaagaataaactttacttttaaaaatattgggtacaaggttaaatggaggtaggtagagctgttcaatgcagcataccagctggggatgaagaaagaagttggaggataggtgaaatacggggatatgttttccttgtttcaaaattttgctaaagtctgatgctgtcagtcatccattcttttattagtcaattatctctgtttatatttaacaactcattaccataaaatctacttttgagaaggagcaaaacataatgaagtggagggctcaggttcttgagctcgactgtctggcttcgattcctgcctctgccattcagtactgtatatccagggcacataacttcattggtaggtgtctcagaaacatctgtaaaatgagaataatagtacctactccatagggttgttgtatgggttaagagttaatgcctgtaattattcttttcttttttttttttttttgagaccgagtctcgctctgttgcccaggctggagtgcagtgaggcgatctcagctctctgcagcctccgcccctccaggtttaagcagttctctgctcagcctctggagtagctgggattacaggcgcgtgccaccacgcccaggtaatttttcgtatttttagtagagacgggatttcaccatcttggccaagctggtcttgaactcctgacctcgtgatccacccgcctcggcctcccaaagtgctgggattacaggcgtgagccaccacgcctggccattattcctcatttttttcaagtgcagtaaagatgtcatagttatgtttaaaaaaagagaaagactcctgtttgaggtatattgaagtagttacagatgaaatgatacggtgattgggattttggagaaacttggtagagatatagataaaacaattgactataaagtaataattcttgaagctgattgatgctttgaattattttattgtctacttttgttaatatttgaaaattttcattacaaaaagtaacaaaaaaatttagtgccttgggacatattaggtgctcagtatattttacctattcttactatgcttatgtttaatatattggaattaactagtctaaaacaaaaaatataaaacaaactaaaattgactctttgagtttctcatttctaagtgagaaatttgataatggaaacatcgtcaaatttggctgacattggattatgcaacatttcttagactcggattcttggtttctgtgttcatgtctttctggtgtggttgtaatttacagtttaattaatttgacctacttgttgcccgtttcacattccatttaatttagtctgccattgtttgttctgtaagtgggatggaaattaatgtcaatattattatttagtgttcttagttttaacagtgggaaacattgactttaccaatagtgaaaatattagcaaatgccaaggcttttctgggcaaacagtggtgttatgctttagttttaatgtatttaattgaggaaagaaacacttattcaccaaggttatctcaaatgtggtaaatgcagttttctgcttattatcatatggtcctacattatatagcactgtaaaactagatgacttagggctgggtgtggtgactcatgcctgtaaccccagtgctttgggagcctgaggtgggaggattgcttgaggccaggagttccagatcagcttgggcaaaagagcaagacccttctcttaaaaaaaattaatttagctgggcatggtagtacatgcctgtagtcctgactactcaggaggctgaggtggaggatctcttgaggccaggagtttgaggctgcagtgagctattatcacatcattgcactccagcgtggtcaacggagcaagactctgtctctaaaagaaataacaaatacagccgggcgtggtggctcatgcctgttatcctagcactttgggaggctgaggcaggaggattgcttgagcccgggagtttgagagcagcctggactatagtgagacctcatctttacaaaaataagtaaataataaacagataagagaaaataaaagaaataataactaaaactaaatggcttgattactttaactaaccaagattgagagttgtatgactagtagtgattctgatttatgtgaatgaacccttaggacttaaatgtcaatttaaaaacttaaaaaagtcaaaacccaagtctcccagagttcgaattaggaattggcacagtgagaaccttatcttgataactctctttctttcttttttatagtcagggtctcactctgtcacccaggctaggagtgtagtggcttgatcacaactcactgcagccttgacctccggagctcaagcagttcttgtgccccagcctcccaaaatgctgggaccacaggcacatgctaatgtgcccaaccaatttgaaattttttttgtagagacaggattccactatgttgcctaggctggtctgaagctcctgggcttaagcgatcatctcaccttggcctcccaaagtgctgggattgcaggtgtgagccactgtgcccagctgatacctctgctttcaagtcatgtaatagatgaaaacattgaggattagaggggtaaagtgattttcccaaggtcacaaacatatcttagagatacagctggaaattgaactctcaatctcagcacccactgcattcgtctttttgctgtcacagtgatttccaaactgttctgcagagccctaggcttctaaaaagttttgtctgtaaccaggatggatactcttttttctgtcttatgtgttagggtttatgtgtgattttgttcagaaggaaaaagtttctactgctgtgtatgatcatttttatatccttcctacactctgagctccttattctgtgctgttttctacccagaaaagtacatttgattcattgaagggatttttttttacttagtttcaaaaaatgccaacttgatctcttagtttcaaaaaatgccaacttgatctatcaagaaacctgtgacccagagacctcaggaaagttgcacaaagacttttaaatatggagggataattagttttattatgacattattatcaattaacattttacttccttctagctctctacattttcattttctcatctcataaatctcattccttatgattttttggtggggatgtgttacttacggtctcttattttcctagaacaatatttatgcaaatatgtctttttttttttttttttttttttgagacggagtcttgctctgtctcccaggctggagtgcggtggtgccatctcggctcactgcaagctccgcctcctgggttcacgccattcttctgcctcagcctcccgagtagctgggactacaggcgcctgccactacgcccagctaattttttgtattttcagtagagacgaggtttcaccgtgttagccaggatggtctcaatctcctgaccttgtgatccacccgcctcggcctcccaaaatgctgggattacaggcatgagccaccgcgtcggccgtctgtctatcttaaatgaaactatttctgatatctggagattcttttggatctcattggcaatgaattaggggtcatgttaattggcttaaaagtagtattgtcataagacataaaagaggggctaatagtataatagttgggttttacttaaattgtggatgcttttaatgatttttaaaaacccacaatgttattaactatactcaatactttaatgaattgatacacagttacgacaatttcctttacataaaatccttggttctaccttagcatctttttgaaattctacacttgtactctaatgcaaatttaggaccatcagagaaggtcagtatttaggatgtctgtaatcctgctacaggaaaacacaaagaatcttgttaaatgttaactctgttatattaagcatatacttcatgtagctgtcttttgacatctgttgtggctatgtttaacctatataataattttatatttcagtggaatcattctcagttttttctatggcaatgttgtttatcagttgtccgcttaccacctttaaaataaatatcagaaatttggccaggcacggtggctcacacctgtcatcccagccctttgggaggccaaggtgtgtggatcacaaggttaggagtttgagaccagcctggccagcatggtgaaaccccatctctactaaaaatacaaaaaattagccgggcatggtggtgcgcgcctgtagtcccagctacttgggaggctgaggcaggagaattgcccgaacccaggaggtggaggttgcagtgagccgagatggcgccactgtactccagtctgggagacagagcgagattccatctcaaaaaacaaaaacaaaaaaacccagaaatttaagaattaattaatgtttactattagacttccagggattgatttaagttacttaaattacactattcatcacatgaaatgcaaacattcattatggaaataacatttgtttgacttgaaaatgtgatgattactaaatataaggaactcattgaaactggaataaatgcacaagccatcacacaaaacattccattttgaaggaatcccagaggggcattatctgtcagcgctggtagtgtgcacctgttcttcggaaaacaccttggaaggtagttggtgccatgttcctgatgggcacagggaggctggcttcttactccaggctgctcagggaagatagtctggtatcataaacatccagacaagaaatgcatgatttcacaacgatgcaccttttgacaaacaatgagcacactactgacatccgaggatgcattacaagtgagactttcagaaataggaggatgaaatgcagtctgaaaatggatattgcttcctgtttttccttagtcttcattgtcaaataattgggagatgtcaagagatgagggtttaggatagtttttcaactgttttctgtttccttggttcactcagctcctgctacttcacgcagactgtgttattagtccttgagggcatattgatataatttaaaacaatttaaaatatgaactgttgctgattttgttcaacaggaacagcactaccattgtaaggttagcaagatacccaatataataaatctccataggggaagtttaagaaaattatgttacggcagttgagttcagctctcttttcagctggagccttaagtcttggagcgttctaggttctacatctaaatgtgcttaacagtacacaggcttcttgacaaatgctgttcttgggaagagtacaatccttctgtgagtctgtgttatttttacctgtgagttggcattccaggaaagagtagcatgtactcattaagaaaattcatcttaaaatttattcagctttttgtcttctgacaaccttgtattttaggccctattgccaagttatttcccgtctttctgtcctgggactaaagtttctttttttcttttctttttctttttctttttctttttttttttgaaacagagtcttgctctgtcaccaggctggagtgcagtggtgtgatcttgactcactgcaacctccaccttcctggttcaagcaattcccctgcctcagcctcccaagtagctggggctacaggcccacgccaccatgcttggctaattttttttttgtatttttagtagagacggggtttcaccatgttggccagactgatctcaaactcctgaccccaggcagtccgcccacctcggcctcccaaagtgcaaaatttcattttttatagtttaatttcccaccataactttgacatttttctttggaaataaactacttttttaaaaatttcaaaatatttctataagttgtaggttgaacacccctaattcaaaaacgaaaaatgcccccaaatcttaaactctttgagtgccaacatgacaccatgtggaaaattctatgcataagcacttaatacaaacttgtttttaatgcacaagattatttaaaatattgtgtaaaattaccttcaagctatgtgtataaggtgtatatgaaacataacgttttggataagggatattcaacctgtattgttattcttattatttttattgttttattttttgaaatggggtctccctctcgcccaggctggagtgcagtggcgtgatcacagcccactatagccttgagctcttggactcaaatgatcttcccacctcagtctcctgagtactaggactacaggcatatgccatcatggctggataatttttaaaaaattttttgtagagttgggggtcttgctgtgttgcccaggccggtctcgaactcctgggattacagcatgagccaccaggccggcctattttgtcattatgccactttcttagacagtgttctttggttgccattttgaactattagaactgccttgttaaaccatttagcttttgcccttttcttccccagatccctaatacttttctgcccaatcctttctctctattcagagtgtttcctgtttgtcctacattctctttctgtcctccttctttcctgctcttccctctttttttttttgagacggagtcttgctctgtcacccaggctggcatgtagtggtgtcatctcggctcactgcaacctccacctcccaggttcaggcgattctcctgccttagtctcccaagtagctgggactacaggcatacaccaccatgtttggctaatttatatatatatatatatatatatatatatatatatatatatatatatattttagcagagacgggttttcaccatgttagagaggctggtcttgaactcctgacttcaagtgatctgcccgcctcagcctcccaaagtgctaggattacaggtgtgagccctgcacctggcctcttccctctcttttttttagggctttgaggcatccttttcaacagctccttaaccttaaaattaagccatcaatcccattctaagtatctccctcttaaacttctgcaatttgtttaatctgaaataaacacctgaaaatagaaaattgaatatctatattttgtaaataatcctgattgacctttatttttattgtcaactctcttttcctccactccttttttttaaaaaaaaaaaattgttgaatacatttaagtgataaacctgtaggacaagagttgatttaactataaaacattgttggcactttgcaacaataacaatcatgtcagtatgcctgagagagttgctcataatattggagacactcgtaggcttctgttttctgagagggtaaatgtcaaccagatgggaattactggaactgagaaatcattttctttttgtctttaaaaatttctcttctatatcttgaatttcaagtaatcacagaaaatttcctttgcttcagataccatttactaattttgcacagtataccattttccaacttattttcccactttcagtaaactttctgttctctatccagacattggaaatgcatgaactattttacagtcaccattcagtacagcctagagggcagaaaaataaaagttcaaccactcacctaaaaagcactatacattttattgtattttattattattattattattatttttgagatggagtttcgctcttgttgccctggctggagtgcagcggcgccatctcggctcactgcaacctccgcctcctgggttcaagcgattctccctgcctcagcctcccaagtagctgggattacaggtgcccaccaccacacctggctaatttttgtatttttagtagaggtggggtttcaccatgttggccaggctggtctcgagctcctgacctcaagtgatctgcctacctcggcctcccaaagtgctgggattagaggcatgagccaccgtgcctggagtgctatacattttaaattatagttgttaaccactttctgtggagtttattgaaagctgcctgacccttatctttgctggccatgtagagtccttgtgtctcgagttggctagcatccttgcatcccagccattccttaggcttgacagctgcatattttcccagaaacagttgtgattggtgtgtataatgaatagaataacctgttctttccaaatatacatccctgttttgccccttagtacttgatttgactaattgtttcaagctgaaatatagacttcaattaaaaaattggaagccaggtgtggtggctgttgcgtgtaaccccagcactttaggagactgaggtgggaggatccattgagaccagcctgggcaacatagtgagaccctgttgctacagaaaattaaaaaatatatattatccaggtgtggtggtgtgtccctgtagtcccagctactcagaaggctgaggtgagagaatggcttcagcccagaaggttgaggctgcagcgagctatggtcgtgtcactgcactccagcctgggtaacagtgcagacgttaggatcttcccaagaatgtggccagcctacatcctgaccttggtcatgtggcacgttattaatcatggccatttaatgtgtaacaggttgcattcaagagcctagcttgtgttggtttggggttcttttaaatttgttttctgttgacaattctattttctagtaaattttaaataaaaatgttttttcattaaggctgattccaaaggtacttaagttcctttctagccagccattcttagctgggtcctgtgaaagcattatgccctatagaaaagaaaattgagtgactattttctcagttctcccaaacatggtactattctagatgcattgaagagaagtcaattcattacatacagtgatgctttaagggcagttgttctcagagtttgattcagggatgtcatagactccaatactgtttcagtgggtcccctaggtcaaaaccatttttaaagaaatgccacaacattattttcacttttcattcatagtctctcacaattataaaatagagatttccagagactatgctatgtatgatgctgcaattgctctgatgaccaaggagatgtgtggttgtatacacgtgtcttttaaatttttgtcttaatttctgatttttaatttgatttctaagcaaatattgaaagatattactcacataatcaaaacttctttgaagtttctcctaacttttaagagaaggagtcctgagaccaaacagtttgggaactgctgtcttaaggctgtaagacttaattctctgagagaacccctcctgggaatggctgcacacaagggcagtacagtaaaccagtcagttgctcaatagacattttaaaaattgaattaaattgagctcctagaatataacttttgagaccttatttgagattttctcccaaggcaatgtttgagcattgagagccttgtaacttgggccaggtttctgtgagatagacagttggcaattctcaatatcaagtcaatgatttcagaagtcattttcaaggaatacgtcctttaactggtagattaattatgtagcctgttggcattatgtggatcagtgccgtccaagagaaagagggcacatatattatttacaatttttaaataatcatattaaaaaagtaaaaagtggtgaaattagttttaatatcttttgtttagcctaatatatctaaaatattataatttccacatgtaatcaatataaaaatgtatcagggagatagtttaattcttttttatattactatctttgaaatctggtatatattttacatttatagcgcatcagtctggatagttacacgtggctggtgcctactgtattacactgtacagatctagatcataaaatagttgtagagctgagccgagaatgttctagagtagataagctttgtcataaaaatagagaataaaaattttgctacagaagttagtataaaaacataaccccattgaaaaaagcttacaatgacaaaatgtttgatatctgcctaaattctaaagacatttctaaaagaaatagagctctttccttaaaacaaattttttaaaaaaataagcttttcttcaaactgtaatgttttctctttccttctaaaaagcatgcagtctgctcactatattctttgaaattactgtatgttcatctgcataccagtgtaaggagatcctctttctcgtcttggaagaatttgagcccttgtgatctttgcatttccctcctacgtagttctttcttgaactgtccatttgtcctggcatatccctgaatccgtactatctgctatagggcatttatttctgatggggaagggtggtttgttttgatcttaatgctgaactgtcccttagttcattgtcttttactctgttgccgtatcttgcttacaaatatggtgtcagaatatgcaagtgaatttattgcctgttgtgaagaaaccactatttttttcagcttcattcactatgaacattattgtgcttacaaaagtgagttgagttaaaaagaactgtgttttttagaagtgagaattaaaagggagaaatagtaatttttcctctcatagaatgaataataaagaactatgactttaaatttggcatgatctaaatttaatttttttcctaccacatgccaattgaaacagaagaatttgttgaatgggaatgtcttgagtagggaaattaaggactctcacaatctgttatctctttagtagcatacttgatacagtgtcatgtttaattaatattagaatgtcaatttacaaaatcatgctctttggaagataaaagaattctgtgtagaacaggcaaacttaggaaatatatggtctcttggtaacatgttggaagttttctgctttgttataattttcatatgtaagtacaattaggagatttatagattttcaaccccaatataataacattctttgagagtttatcttttctttacctactgatttacctttgttgtggacacattcagtttttcaagcaactggtgtgtactttacaccaaaacctttattatatagtcttcagtaatctgtagctgtgaaactcatactcatttatctgtttagatattctcaaaacaatcatacctgtgtgccagccacctgctgtctgacttggcagtttctctgttccaactttatttttctgctttttagaaaactcccactttccagtttgcagctaaggtaggagctgagttcctttccctgttaagtggtcttatcaggcagttatgccattgccaagcaacagtaagttctctcctctcaggtgttagctagtaggtagggttggcaaggggagcctggcctgctgtgaagaagtagaccagtgtctctctgccacagccctcagggtcgggtcttgctgtgggttccatcctatggctcactgtgactttcctgaatggaatgcgtttattttttttccagctctgttctttccatgttcttcccacatcagctggcggcagccagttggttctgaatgctgcccacaaattgttagctattttgcttcttggtccctcaatttgtcccttgaataaggaattgatgtgtttcagatccaggattatgttgcttagtgaagcaaatctaatccttgccaaggaatgcctaaagttgaaggcttgattccagaagaaaataaaataacaacagcactacctgtaattaacatatattgcctgtttactgtgccaggcattatattaatcaggttgcatgtattagctttgttaatccccaaaatcactttaaagtaggttccattgttgcccacattttacagatagggagccattggaaaattaagtaacctgttctaggttatatattaagggatagttccaagattttgaatctaagtagcttgtcttcagagtccttgctttcagtactatattcaactgctaaataaagcttcactttggtttttttgttttgttttgtttttttgttttggagaaagtgtctcattctgttgcacagattgcaatgcagtggcgtgatcacggctcacttcacccttgctaggctcatgcaatccttctgtctcagcttcctgagtaactgggactacaggcacacactaccacacctggctaatttttttattttttgtagagatgaggtctcactttgttgcccaggctggtcttgaactcctcgcctcaagccatccgcctgcctttaactcccaaagtgctggaattacaggcgtgaaccaccgtgcctggcccaaagcttcacttttcaatgtcttctggaatctgaactctcactgaagagtagacaggagtttgatgttttaatctattaaaacttctttgtacgtgccttctaagaacagattatattcaatgcaatttttcctgaaaagatgaagtacatttgtttgtaaaattcatgtatgtatgtatttatttattatagtacatatttatggggtacatttgatattttgctgcatggatacaacatgtaatgatcaaatcagggtaattaggatatccattaccccaaacatttatcatgtctttctgttggtgacatttcaaatctccttcagccattttgaaatatgtaataaattattgttaattatagccaacaaaaggcattattgctagtacagatatttcttgacttatgatgggttacgtcccaataaacccattataagttgaaaatatggtaagtcagaaatgcatttaattcactctattgttatctacccacgtgattgtgtggctgactgggagccacacaatctctgtttaccattatgaagatcctattgcttcagaatgcaaatgaaatttagagtgagtgccttgtgaatcagggaggccccactatatgactccctgtgatctcttggaggtgaaagaatgcacaaatttcataagttaacctgaaggtcacccgcttttccccagttacattgtacatgccatcaattagtagggggtgggcagaggtggaagatttcaggcacaggccttagacagttgatgccctctgttattaaggtaaataaatcctagcagttcttcccaccttttgcacatcatggcatgcacagaaagttgagattggaggtgatccattattgcttgtaacccatttccaacacacttgtttggaagttctttttttttcttttgagacagggtctcattctgttgctggcacgatcatagctcactgcaacttcagctcccgggatcaaactgtccttccacctcagcctcctgagtagctgggactacagacacatgctaccatgctcggctaatttttaaaaagttttttagtagagatggggtttcaccatattgcccatgctggtcttgaactcctggactcaatcagtctgccctccttggcctccgaaagtgctgggattacagctgtttggcagctctgctatggggatatatctgcaagtttctaagcttgttatatttatgaaagcattctgtacattacaaggtgccattcacatgtaagattttattaataatgactattaagaccaagctatttgttctaggaagagacattgtgtaccatgattttttttgttgttgttttgggagctgtcctgagagaagcaggagcagatgctagaccagttgtggagttaaggtcttgtatgtgatctggtgcagtaatgaggagaagtagaaatgcaggtggtcaagggttatattatccaagacttcttacaggaaaccaagcagctggtgagatcctcattaaattctctaccttcttctctgcctatcccagttctctctgtagtgaaattctgctttctttgtcaagtctttcccagactttttctacctcttctcctgtaggtgaaggtcattcaccatcctctgtctgttgttatacctggtacatagctccattgcttgtacttccaatgctgcattgttttcagttccacacatcttttttcctttttagactgtgatctccttgaagtttaggctgtgtctgattaatccttgtagctccagccacacccagctcctttcatcacactccctcgttaggcatggcttgaatgctctttgagtacagctgaaatttatctccctgtgcctttctcccgtgggtcctcattttaacacctgaaacagcttcagataaagttacttttatgccagccatttatacatctgaataatctgccacgtatggctccaaacagtctttatttctctgagctaaacatttttacttttgtaattttgttttcctgattttttcctcagtaagtactgtatatgttccctttacctctctggtgcatagaatcttagaatgttaagatttggagaggactagagtttgactagtctaggttcttcatctaaccagtattgcttccatactgattacataattgaaactgagatatagacatattttggagcaacacaaatattttaagtatttcactgaggaagtttagatttagtaaatttttaaaagtccttcatcgttcattcttcattaaaatgtatttgctgatgagtatcttattaaaagggggcacattggaaagatatgttttatgatgcagtgcatgtatgctaaagaaagatcttcagattcttataacattcttattaagaatttgattctaaagccaagctacctaggcttcaatcctgcacctgccacatactaggtgtaaattacttaatcttgggttaattacttaatctctgtgtgcctcagtttctgtatttctaaagcaaggttaatgataaggtgggtgttaggaggtttaaatgagttagtacttccaaaccactaagagttatgcctggcccatagtaaacatttcgtatatggtagatgctgctactgctgctgccaccaccatcactgctactattattattattattgagttctacaagcatctggtgagatgtgtaaagcccctgtgaaagttctcatagaaccttagtaagacaccatgtatttatgatacaagcttcttgcctttttaaaaattttttattttatttaaagcttcttgtcttaatgagagaccctgtataccactctgcactgaaacatgatttgacccagaccgtaacgacatctatggagtaataaagtattttttcataggattttaccgtataagcaattgaagaaatggcagaagacccattagcttttggagtctgttcctttgagaccaacttgctaggaatccatttcctatctttttaaaaagagtaaattaattttcctcattgacattctgtaaacagaatactggcagcttatattttatggaacgtaatgttttaaagtgaacctaatttttcttagtaaactgcttttaataatgcatcagagtaatttttttccctctgttgtcaggttgctatcaagatcatagataagacccagctggatgaagaaaacttgaagaagattttccgggaagttcaaattatgaagatgctttgccacccccatatcatcaggctctaccaggtaggatcattagtgtatagcagatagctgcaaagaacccagaatattgtatgtatggctccctttgaagaaatgtgggtgggtgaacatctgtgactttttttgtttctatgttaatcctgctatctttcctacccttctgtttacgcgctcagcacttagtatcctcaagtttcccctggccatttactagtacgttttccttacccaggtaggtctttttaatttgttctttaaaatttgatgccattcttagcaacaactacacaaaatgttaattcagaagatgatgagaatttattttatttagttcagagttctaacacaggatgggaaactcaaaaagaagagaatttagagaggtgaaaagttagagatgaatataacatttttttaatagcattatttgaatactagtttctgtgatcatgttataaattgttatggcaaaggactgcttcttggatcaatcaaaacctacctcttttctattctaataggattgtagacttagttttccaaggtagtaattattttgataatcaagagaccagatcaagtgaccagatctctccaataggagagatttctattttagttttttttttttttggtcttcccaagaaacatgcatatttcatgccatcatcaaaatgattccctagcataactacaaaagcagtaaatctgatggctggaatttcaagcgggataggaggagaggaccttgccttagcaggctggtgaaagagatattttgggagaggtggggcttcgggatgcttctcaaattgcaatgtgttggcagccgagaactttgcctctgcataggcccaactctacttgctgctttctgccagaacagccatctcttagttctgaaggacgtggccacccacttggttattttgctgctgttagtctgcagtaaatggttactggcccagacataggaccatgtgtaaaagtggagaaagtacacccaaggctctatgggcaagctttcgtagcctcttagttttatggaaaagaaaacatgttgtgatattaacatgtgtggttaaaactacagcgttagagctcttccctggcatcagctgctcacataatgaaattaggtcaacaggagcagacctgttgaaatttatcagcctaaattatgttgaacaacgcctaccttctgccccacaagcaaacttatgaaagcttcctggtgctgcctgaagacctatatctgtgagctcacaggtgtctaacctcagcttccttcctatcctgatgggctgaataaatttcttgaccttaccttttaaaataaatcatctttaaataattgtggggcttaggctgacctttctcaagaggttgacttatagctattacccttgtaactgaattctgcaagtttgcctgtcttacccaagattagcctatgaggatttccacaggtccagtgctagctttgagcagtgccttctttcaagctttaattttgctttctggcagctgggttttttaaattttatttatttatttatttatttatttttgagacgaagtctcactctgttgcccgggctggagtgcagtggcatgatctctgctcactgcagcctgcgcctcctgggttcaagtgattctactgcctcagccttccaagtagctgggatcacaggcatgtgccaccacgcccagctaatttttgtatttttagtagaaacggggtttcactgtgttggccaggctggtctcgaactcctaatctcaagtgatccacccacctcggcctcccaaagtgctgggattacaggcgtgagccactgcgcctggccggaactgaatttttaattgtatttagttttaattaatttaagtgtaaaactaaaaataattttaaaaagaattgttgaaatgatagtattttggatatattggggtaaataaaaagtagtattagaattatcttcaccttttcctttttcctttttaaatgtggctactagaaaagttaaaataatatatgcagttcatattatatttctattggacagcactgttgtagaaagatatacaataagcagagaacagtgttcctctggggattgagatggaggagattgggaagaggaaagcctttggtcttttgttttataatgagtgtatgtaatcattattacttttaaaaatgtttgatggaaaatgtaaaaaggaagaaaggactgacaacatactacaatgaattttaaaaaggagcaacaaagggaccaagacaaaacacaaatcacttacgttactttaaaaggttgagtattttaaattactgttctctttttttcaaataaatgggcagtggaaaggaaagttgtcatttctataaaaaaaagaaagacatatgtgatttctgtggcgttcttatgtgactcccattattttccccaaaggcttctttttgctttagtttttttttttttgatttgatagggcatttttgtgcttcagatgattgatgttgaatctgaagtttaagttttggttcttgacaacttctttgcctctcagttttatggagcttaagagattgcagagacctcatggaacatcaaaaagcctatctctctcaagcaataaatgtttcctacttttaagaacttggaggaatatctaattttccctttcttcttaataacatttatatttgtttccccaaaaatgttttaaattttctttaatctatagtggttattaatatttcaaatgagaaaagaggagtcattagtttatcttcctgtatcagcctgtcatttgtgtcactgtctgtcactttcctgcctttgcaccaggttatggagacagaacggatgatttatctggtgacagaatatgctagtggaggggaaatatttggtaagtacatttattgcattctttaaacagctattgagcacactatggcaaacctaaaatagctgttcagtgcctttgtcacttgagcagcagtcacttgatgctgttcttcaatcctgccattttctatcaacaaaggcattttaatttgttttgattaatctagtaaaatccctttaacacatttgtttccttagcaaaggtgttttgtttatttcagtcaggcgctgacagttgagattaaagatctccaaaaacaagcatcctttctgaacgtgggacttagggtctttcctgtttgcaggttttaattgaggttaccaagtgcgacagaactcacacaagtgtgtgggcctctgttgtgtcagaaagagccacttagagcacataatctcacccgagtgcgttccttaaactttgtttaaatataacatgtaactatattatttaccatgtgttcacagttcccctcagtaattcttgtaattttgggggttctgccttcagtagctatattttcctctcacacttagctttagcacaatgtcagaaataagcaagagactttgttactgacaaatctgatttttaagatgctaaaaactgacaaaacgattttttttctaacagtgataaatggagccaagtagagttaaagggtaaacttccaaatctaaattgatgtgtcttttattttttcttttggcaactaactacagagaaaagtttctttatatactttatttgtctaatttcctcattttaaaaaaaatttatcaatatgaacacttgctagtttaaaattttttaatttttattttaaacatttgctccttcctgcacgataaaatgtatttaaaagcatagaatcacttttaaaatgaatcttcttattaatgactagtcagttgtggctgcatggatgtgtgtgtgtgtgtgtttgtgtttttaaagtttccctagcgatctagtgtttttttgtgtgtcaaagtatctttagggtaagtgctagtcctttttaaaagaggtatcattatttcttaattttatatttaattggctttgtatatgtgattagttaatgtcaaagctaatggtgatagaaatttatactcaatatagtatgggaggggatactttattttaaagaaatgaaagcattacaagatttgaaggatagcattgtttgtcaagaaggtatagtaggccttcactatgtatgataattatatgccaatcatgtgccttggagatgctgactcaattaagacactggttttcctttccgtggagaaatctggtggaaaacagacagggaaatcaacatattactttgaagatgagaatggaaactgtaaaactctgtatagtagagaacagtagtgcagatggcagtttggttaactcttggagatcagggaaatcttcctggagggcatggttatatggaaatttatgaaccagaaaatgaaagcacaagagagaatatttggagagagagaaatagcagtcatgttattgggagactatactatggtctgacattccaggcacatgttatgataaacctgccttaattaagatcacaaatgtatacaaaggcaaatagaaaactttcattatctagataaggttttttctttggacaaggtattgctctgctgccctggctggaatgcagtggtgcaatcctagctcactgcagcctcgaactcctgggctcaagtgatcctcctgcctcagccatctgagtagctgatactatagctgtgcactagcatacctggctaatttttaaatttttagtagagacgggggtctcactatattgttcaggctggaagatacctttttacaagttttattctataaaaagtcaaacatctcccaaatccttgagctgcctgttaggtattttatttcatagaacgacatttattggtggggaaacaatggtaatttggggagaaaaaagatcatgtcatcttaatgtttgtaataaaaaaagacccaaacacagggcacatcaatctaccttactctttaagaaagcagattttatttatttatttatttatttatttatttatttatttatttattcttttttgagctagggtcttggctctgttgaccaggtgaagtgcagtaacgggatcacagctcagtgcacccccagcttcctgggctcaagtaatcctcctgccttagcttcctgagtagctgggactgtaggtatacaccaccatgccaggctaatttttaaatttttatagcgattaggtctcattatgttgcccaggctggttgtgaactcctgggctgtagcaatcctcctgccttggcctcccaaagtgttgggattataggcatgagctactgcacccagcaggaagcagtattagagagatccgtttcttggtcctggacttcatgtgaatgtacctcaagggatgaacaaacagaataccacttctgataatgttattttaaaaacaaaatattttaggttggtgaaaaagtaattgtggcttttgtcattgaaagtaatggcaaaaaccgcaattacttttgcaccaacctataattatatattgtaacacatattatgtaatatataacaatagaatttgaaatgttattattgatactattaagtaatattattataaaagatccagatgtggaagaaaatagtgtattacctaaagaaattattgagactgcacagggatagaactgtctcatgagctctgatttttaaaaatgtctgtgtaaaaaagatgaaaggggcttagtcaagaaaacctgggctttggatgtatttagacctaggtttgaatcagatctctgtcacctatttgcccttttacttagagcaaattactagatgattctggtgcacaggttccaggtctgtataaggtaagatctagaatatttgtattatagttgtgaagattaaatgagatcgcatatatagagctctagcacagtgcttccttacgccttcatgtgagagagagatcaacttctgccgtcaaggtgtgaggagctctgctgacctgccttgcttgctgaaacaagtgaaaactattaaagaaaacaaaacccagtcatttaaagtctctggaaatcgtcctaagagtaagcagaaaatgaaggaacattattcaagaacatctgtgcaaattcggtaagaaacaaagtctggtcagcaaggtggaaattcccgtccaggctactgcagccaagaacgcagggcttccttctgtcaaaagacaaaattgcaagtttagtttgatgatcccagttggctttatttgcgattctagaatcggacaacatttcatttcatagaataagtgttccagtaagttgagcagaagagtttggcttatggacagaagggcttaagaagtctgaacagtgtattggttacttttaaacagaacaatagaaaattaaccagttaacatcaggttacttcgggctaccttttttagtaaggattaaagcagagggaacttcatcattgtgccagttaaagattttagactgggctgtttgggaaattggctgttatctctttctcctgatttctcaggtcagataacaacctagttttcgctttggaactttagcatgagtgactccattttgatatttagtttggtctgttggtgcctagtgcagaagtttattcgaaaacaatggtctcctgtaatttttatttgtcacttctcctcaattctctccagcatctgaatagcagctttcttcccaggaggatttggacatcagcaattctcattctgccccgagctgcctattgctgagtcctggagaagtgcagttaagagatgggggccccttcttctactcagcccccacttgtggaacttgatcaggtatgccgagaatactaggacccagatcactcttgccttgggtattaagacagtggtttcactgtcttttgctgctaggagaggcaagctgagaggaccccaggctgctgtcctcccccgctctccatccaccaaactctcagttcctagagtgggagcgtcactcagagaagtttgctgttgtccccaaccccagctccagagccctaactctgagatttttacctgtggagaaaaacaaaccataaaacagctcctaatttcttcccaaaggaactgacttcatttgcaacagggagtgaagaagttcaaacctgattgtactctcaagaacagtagagggaaaagaaaaaagaaaaagaacagtggaggttgtggtaaaggacatttgagaagagattcatgaaacaggccaaatggtaggtttgctagttcgcagggggagaaccaatgaattaatttagaaagagcttctctgggattagaatgaaaataaatcactggctgggtgcacacctgtaattctagctattcaggcaggaggatggctcgagcctaggagttggaggtcagcataggcaacatagggagaccctgtcttaaataaaaacaaaaataaaacaaaaaaacactgatggcaaaaattatttcttcaaaggaaccagaatttgattgtattgtttgtagaccaatttgtgccccagggcattattcaaaacaaaagggcaatcagccagcaactagtggagtttaacggctgagtatggtcagtaaatgagaggaagaaagtcctagcaaaaacactgtgatcccaaggtaactaactgtaggcataccgaagctgcctgttccagaggaatcacattagaggctgaacactgtaaatatggagaaataaacttcactagaagaatctagcttttagctgggcatggtggcatgcgcctgtagtcatagctccttaggttattgatacgagatctttctaactgtgggcattttacagctataaatttctctctaagcatgctttggctgcatatcatgagttttagtatgccgtattttcattttcattcatttgaaagtattttctgaattcacttttgatgtcttgtttcattatttatttattagtgtgttgtttaattttcacatatttgtgaatttcccgaatgtttcctactcttgatttccaatttcattccattatagttggttgtttttctatcctctatttcataatttctgctataatatttgttatttccttctttctgcttgcttcagttttagtttgttcttcctcttctagtgtcttgaagccaagcagaaagaaggaaataaagattatagcagaaattatgaaatagagaatagaaaaacaatagaggatatcagtgaaaccaaaagatagttctttgaaaaaatcgacaacattgacagatctttagctagattgacgagagagagaagagaaaaagagaagactgaaatgactagaatcagaagtgaaagaaaggaacattactacagtcccttaagaaacaaaaatgggctgggcatggtgactcacgcctataatcccagcactttggtatgctgaggtgggaggattgctttagcccaggagttcagtaccagcatggacaacatagtgagacctcatttctactaaacataaaaaattagccggatgtggtagcatgagcctgtggtcccagctacttaggaggctgaggcaggaggatcacttgagcccaggatgtcaaggctgcagtgagccatgattgtgccaatgcatttcagcctgggcaacagagcaagaccctgtcttaaaaaaaaataaaaatgattataaaggaatattatgaacaactatacatcaacaaatcagctgggcttggtggctcatgcctataatcctagcactttggggggctgaggtgagtggattgcttgacctcaggagttcaagaccagcctgggcaacatggtgaaacaccatctctacaaaaaaaaatagaaaaattagccatgcatggtggtgcacacctgtagtcccagctactcgagaggctgaagtgggaggatcacctgagcctaggaggtggaggttgcagtgagctatgattgcaccactgcactccagtctgggcaacagagtgagaccctgtctcaaaaaaaaaaaaaaagtcagcttagatgaaatggacaaattcctagaaagataccaactgttgaaacaactgacttaagaagaaatagaggccaggcacggtggctcatgcctgtaatcccagcactttgggaggctgaggtgggcagatcacgaggtcaggagatgagaccatcctggctaacacggtgaaaccccgtctctactaaaaatacaaaaaattagctgggcaaggtggtgggcacctgtagtcccagctacttgggaggctgaggcaggagaatggcgtgaacctgggaggcggaacttgcagtgagccgagatcgtgccactgcactccagcctggacaaaagagcaagactctgtctcaaaaaaaaaaaaaatacatacatacatacatacatacatacatacatacatatatatatatatatttccctagctaaagtaaaaaatggtgttctggttgcaaattgatagtctttacttcatttgacctctttgtagcatctgaattcttgactgtttccttctaaagctcttagttttgacttccacaaatgttcaacttctgattcttctattgttcggactgttccttcttagtatcttttgctgggcctcctttctctgactgctagaacatgttgacatgttgtagcatattctctgactttatatatatatataatatataaataataattatatataaaatatataaataattatatattgtatataaataataatttgtatataatatattatatataaataataatttatatataatatattatatataaataataatttatatattatatatatatttttttgagacgaagtctcactctgtggccatgctggagtgcagtggcgcaatctcggctcactgcaagctccacgtcccaggttcagaccattctgcctcagtctcccaagtagctgggactacaggcactcgccactatgcccggctaattttttgtatttttagtagagatgggttttcaccatgttagccaggatggtcttgatctcctgaccttgtgatctgcccgcctcagcctcccaaagtgctgggattacaggcgtgagccaacgctcctggcctggctagggaaatattaataaaatggcagaggtggagacagatgttaaagaagtggaggcattgggtgctattttgagaagcattgctctgaaggaaagaagggagaagacagtagtttgtacaggaagcaaggttgttgggagagagttctccacggatatctcacatttcttcatgtttcatgagtaaggcactgactgcctttgttctagactgttttctcaaggatgtttatatagtgagcacccttgaaagacagagatagtatctccctccacagctcaaagatctgtttattgcccagtgtgaaagattccctaagctccaagctcagggttcctctcctataatggacccgactgtgtgtgtaggcgtcatctggtcccctttgcagtgccctgtgaaaattagggcttggggaactgaagcaaatatgttgatgttcatgctgcttgctgtgccgtaagtgacaaagtcttttgtctctgacagaggggtttcctatcttctgccatcacccatgtaattgtggcaggttgagttattagcttgcagaaatggtgagatctcagaccctcttgatacttgacaggaaataaggaggggtttgttttattttgattcgtttaaatatgagacttgattacaggttgaggttgaagatgcagtagtggggaagatgagtttgaaaataattgatatggaaaacaatctctaaagcaagatcaatgaggaactgagggatgagcataattgcaagaaattagccttgcacatgaagaaggatagaagataaaggatgcatgtgggtgtaggcaattttttaggtagaagaatgtgaaaaagatgtttcatgcttttcatataattttctattgagagtagcagattatgttatcagatgaattaagggtgagagggtagagacctggatcagcatggagaaagtgaaattagctgcagggaggaatgagagagagggcaattaagaatagctaaataagttgattaaaggccttagagataggaaacagttaacttgttattccattatacagaattgagtgatttttttcccctaccaccaatgctcaattacctgtgtgtaaattgaataagacagacaattggactgatcctgtttagagtttacaggacatgtgcaaatgaagaggcaacaggtgacaagggttttgaggccactagcaataatgtaattaaagtgtgggcttttgggcttaggctgaagtgggttgggaaggcaagtgagaccaggatgactgatcttaaataagaatttttaaagctggctgggcatggtggatcatacctctaatcccagcactttgggaggcccaggcaggcagatcactggagcccaggagtttgaaaccagcctgggcaacatggagaaattctctgttatttaaaaaaaaaaaaaaaaaaaaaaaagaattcatgaagctacaggtctagatgaagttgaaaagcaagtgtgttagtgtgttgggcatatgaaggttggagagatgaaagtctaaaactacactgcccaacacgacagccactgtccacatgttgctgttgtgctcacgcctgtaatcccagcactttgggaggctgaggcgggcggatcacgaggtcaggagattgagaacatcctggctaacatggtgaaaccctgtctctactaaaaatacaaaaaatgagccaggtgtggtggcggacgcctgtagtcccagctactcaggaggctgaggcaggagaatgttgtgaacccgggaggcggagcttgcagtgagtcgagatccagccactgcactccagcctacgggacagagcgagactccgtctcaaaaaaaaaaaagaaaaaagaaatgtagctagtgcccctgaggaactgagttttgaatttaatttacatttaaatttaaaaactgaggtattatgaaaagttttaggccagctgtgagagttagccaactacagactaagagagcatagtctccaagatcacccctcactctgctgtcacctacaagttcaggaaattcccaaaaccggttcagtttgataaatagctagaaggattcacaaaattcactgaaagctaatatactcccggtttggtttaatacaggtaaaggatacagattaaaatcagccagggaaggaagtgcagagtccaggagaagtacgaaatgcagaacttttgttgtcctttccatgtggatacaagatatgttacactcctggtattgatgtgttacattgtgtacagagcagtacccatcagggaagctcagcccagcctctgtgttcagtgtttttattttacataagcctgattgattgattgattgattgctcacatgattgatctgtgtgtctcggtcaactgatgctcgtgacccaaagcccacacgtcaagtcacgctgttgtgcagccaacaatgtatatccagcctctaccctgagactatatgggtgtggcgaatcccagcctaaatcatgttattagactctctggcatgacccaaggctcccagacagagacactccgagcagacataacattccaagaacccagagactgcttcccagaagccaagggaaggccaggccttctctttgggtaaggccaagttcttcactctgcagagtctaaaatatttttctattaaacgcaactcttattttgataaaactacattacaccttggctatagacaacttagtattttagttgtgatacgcttataaagtataaaatacacagtggattttgaagacttactatgaaaaaagaaggtaccctatctcattgctattatttttattgattacattctgaaatgatcttttgatgtatttggttaaagtaagttactgattttcaaaatgagtgctttttttttttacttttaaatgtgattacaagaaaatctgaaattatataaatggcacacattgtattttatttgatagtgctaatttagaaggttaagataagagagggggaagtttagaatttcagagttaaaataatgtcaagcaaagacaagttcaagatgtggccataggaatagttgctatacattggtagagttctaggtcaccggagagaaagaaggctaaaggaaccatgaagcaaactgtcaaataagttatcctcattgatgttcacattccctaggtgatggcagaatttgagtggagggcgcaatagactacaaactaggtttcggtgagtgtctttgatgaatgtgaaggcaagagaggcagaaagggagtataccagctgcccaaacatatggcgtagtattgttagtggagaccttgaagaggttacattaattcctaatccctggtggaatattgtccctttttacctcaagaggcctgtaaaggaattgctagtcttagaggagttggttggaaaagtgattatcaatgggaggtgttggccccgatgtaaaagccctgctgcccttctttgccctctttgtccctccttaacttttgtgacccatctcaaatgttattccccctgtgaactctgctctgattttgccaaatagctaattacctttttttcttcactttgaacatacctctcctatagcactttttgaagtaattttttttttcatttctaagtttgtcttttactggtaatttagactctggtccatttctttttcctttgactattttccaaggggcttgattgaatccatgaatgtggtgcccacagatagagagggaagactatatatgctgaattcaatcacttatcaccacctccataactaccaatctggtctaagccaccatcatgtcttgctaagatcactgcagtagcctttaaatagtctctctgaatctgccctgacttcccccccgattatagctagaaggattcttttaaaattcaagtgggaccttaccactgagctacttctgttggctttcccatctatttggaataaatttataattcctactatagcctataagattatataatttggtctcctgctgtctctcaccacagctcctagcactctcctcctcacatcggcatctttctttttcattaaacccttcgctgtgctcccgctttaagaccatatattccatttcttcttcctgaattactcttttcctacatatccacatggctgtctctcctgtttcttgccagtctcttatcaaatgttatctcattagagaggtgtttgctcaccatgctgtctaaaatctcattcttcctactggcccattgctctgtagtctctgtcttgctttacttttctttttggtttttatcatgaactgacatatatttatttgtttttttactgtcttgagtcaataaaatttacgtgccattaaagactttgtcatttttgtttcctaccaaatcttcaatactcaaaatagtgcctacagggaatgcatgttccataaatatttattgataagttgaataaaatactaagtgaatgaaagaacatcactggattgctgattatggcgtttaagttttattcatctgtgtcttccttgtttaatgtagtgtctaacatatagtaggcactcagtaaatgtatttcattgtgtcataatgaaatataactaagtcaagcatggaatttgcatgttatttaataacatcttagttaaatgagtttttgacatggggaaagcaccttttttgggtaactgtatagagaaagacatattgaagattatgaattctaagcagtgtaataaatagacttcagtaattggttatttcatgaatatttactactcattcaattgacttatccagtttatttttgcatactattcagccttatattatgaaggagcagtgatgacagtgtgggtttatttaatgttacaaacagaattgagaaactggttagttttgtaaaccactaaatttataatttaaaacttccacactctgatatctttagatatatatccccaaacttcctatttgagaccatgaagtcataaatccagcactttatcaagcaaaatttcctgaataccaggcagaactcatgggcatttaaaacaaattactaatttaagaggagtctgttgaaatgtgtatgatttattatgaacattctcagtgtcttaaaaataatatttcttaatggtgccaacatgtatggaaccctgaacttctcacaaagccattcatttatgccataggtcactcaaaaactattaggacagaggatcagaaagactaacttgcataaccattgtgtacaagatactgtgttaagtgtttcacataggttattttatcttgtgactgcctggaagttcaagaatacaacacatttgtttgaacactactatgtactggtttgttgtggctttttttttttttttacatgtttttatttaatccgcagcatcctttatgtcttcacaactaaactaccattttcccactagtttatttactcctttgattattaaaaaaggtattttcggccaggcgcggtggctcacgcctgtaatcccagcactttgggaggctgaggcgggcggatcacgaggtcaggagattgagaccatcctggctaacatggtgaaagcccgtctctaccgaaaatacaaaaaattagccgagcatggtggtgggcacctgtggtcccaactacttgggaggctgaggcaggaaaatggcctgaacccaggaggcggagcttgcagtgagccgagattgcgccactgcactccagcctgggggacagagcgaggctccgtctcaaaaaaatcaaaacaaaacaaacaaacaaacaaacaaaaacttagctattttctaagggtctcctaacaagcaagtaaccatgctactgaactttagtcactctgaatcaaaataattgacttgtatttatttccctaattaatttcccatttattattattcattttttgttctgttttcttaatatcagatatgactaacatttattttatttatttatccttttttttttttaatgcccccaccaggagtgtgcaagtggagagatgcatggatgaaggaggggagctggcgggggtgggtctgtgaccagcatttatattgtaactggccaagatgtatgaggaagccacctgtgctttgacctcactttacactaaaacattcatttatagtctgatcatccagtcatttctaccatgacataaaaataagagccccagagaacaaatcaaattatttttgctgtattgagtatatataaatcccaaagggccaggcatggtggctcacttctgtaatcccagcactttgggaggctgagatgggcagatcacttgagatcaggagttcaagaccagcctggccaacatgttgaaaccccgtctttactaaaaaatacaaaaattagctgggcgtggtgacacacgcctatagtcccacctactcgggaggctgaggtacaagaatcacttgaatatgggaggcagaggttgcagtgagccaagatcgcaccactgcactccagcctgggtgacagagtgagactctgtctcaaaaaaaaaaaaaaaacaaaaaaaccttaaaggaatatttttgcctggctcctacattaacatttactttctctgaaaatcataaccctgtgtttgttattatccagtgtctacaaacagcccagcttctatagttaggtaaagtaaattcaatatcagttgttctttcataatcaaaacagaagtctacaatgccattcttacatacaacagcattgacagtaattccttactatcatgtaatagccagggcatgtttagctttctgcagatgtttcaaaacatcttcttatagtttgtacaaattacgatgcaagaaatccatacatccattgagttgaaaaatgtctaaattttttataatctaaatttttaaataatctgtgacaacctcatctcttccctacaaacatttactttttttctatgctatctatttatgtaagaaactggattgtcttaaaaaatgtcctacatttggaatttggctgatcatatatttattgtgtcattcaacatgttcctgtagttcagtgtttcttggaaagtggaagttatatttaggaatttgcttagttcagtttttggaggggaagcaggagtgctccatagttttttattgcatcacttcaagagttgtataatatctgattttcccacttttagtgatacttagaataatcttcaggtatagttattgttcaccaaattgatcctttataaagtttcccatcagtcttttacgtaatgttttatctactcctgtcatttagttgcctagctatttcattagaagttgcaaggccgggcttggtggctcacacctgtaatcccagcactttgggaggccgaggcaggtggatcacgaggtcaggattttcagaccagcctgaccaacatggtgaaaccttgtctttattgaaaatacaaaaattaaccagccatggtgatgcacacctgtagtcccagctacttgggaggctgaggcaggagaattgcttgaacccaggaggcggaggttgcagtgagctgagtccgcgccattgcactacagcctgggtgacagagtgagacttgtcttaaaaacaaaacaaaacaaaaaagaagttgcaaaatggtgattatttgaattctctcattcattcaacatttatgagttattcttcttctgtaaagaactttgccttataaactacttagaaattatagtaatgacaagataaatgcttgattctttcttttccttatgtatcagtttttagaataatgaattggttctctgcaatctccagtggagactaaggaagttggttttctattttgtaacataattatgcaattatggattttagtatattttatgtgcttcagtccattaagtcattcttcttttgaaactgaaattattccacttagccagtgggagcctggagcctcttcaggctgactcctgtgtccttttgatgtgagctcaatagtctttgatatttttgttgcttttaggcaagatgtcctatgcttatcttgaacatttcctgtaccagacatggaatcaaacatttctcctaggaattctggtttggtctcctctcctctcctctcctctcctctcctctcctctcctcccctcccctctcctctcctctcctcccctctcctctcctcccctcccctcccctcccctcccctcccctcccctcccctccccttccgtcccgtccccttcttttcattttccttttctttttctctccttctcttctcctctcctctcctctcctctcctcccctcccctcccctcccgtcccgtccccttcttttcattttccttttctttttctctccttctcctctcctctcctctcctcccctcccctcccctcccctcccctcccctcccgtccccttcttttccttttccttttctttttctctccttctcttctcctctcctctcctctcctctcctctcctctcctctcctctcttctcccctcttctcccttcccctcccctcccctcccctcccctcccctcccctctagatagagtctcactctgttgcccaggcgggagtgcagtggtgtgaactcagctcactgcagcctccgcctcccaggttcaagtgattctcctgcctcagcctcccgagtagctgggactacaggcacacgccaccatgcccagctaatttttgtatttttagttgagacggggtttcaccatgttggccaagctggtcttgaactcctggcctcaagtgatccacttgtctcagcctcccagagcactgggattacaggcgtgagccaccgtgcccagccaactctggtttctttaaatggaaaatagcatttaaagaccagaatttgggcctcagggatgctcgttagtgctactgggttattattgcttagaggaggggacagagctatgaaatatatatttttaatggagaggaaaatgaaacaagtttatactaacactccaattaaaatgtaagatttcagcatttttacttcttaaatattatatctttagttctcttttcccttatgttgaaaattgtggttccagatgacgttaacatagtcacttttttgatatgagtgaggggagagactgattgattgaaaacaataccagtagtattacaaataataaggagacttgtggttctttttgttcttaggatatatcccatgaagaattgtcttagtctatttgggctgctctagcagaatacttttaactttatgtatagttaggtattatgtaccgtaatctactgattttttacaggttgctttcaatttttagaaatgttcttctatttgattcaattctgaattgtttcagttatgtaagacattacttgtttccaaagttaaagctacaaaacaaggtgcattcatatgtctggcttccacaccttttccgtaagtaaccatttatttaacattattccttttggcaaatctaaataaatatatgcatatacatacacatgcatatttgtattttcccttccttcctacacaaacagaaacacactctacatatttttctacgtcttgcagtgcttcatggatataaacccatccatggaccaaaaatccatgggctaggagggaagacacacaagataagaaattactgtaatataattgtttgctgatgtcatagaggcagatagattaaatgtcattagacacaaattatggagcagtttttctagggcgggtgagtaggttagggttagcttcagagaaatgacctttaagctggactttaaaggataaccttgaattccaaagttcagctggggatggggatgagaataggagacaggcattccagcaagaagtaaaaccctgagcaaagtgtacagcatgttggtgaaacagcaagtacacatgcaggtgaactatgtttatgaattagaactatatattgtaggctgtgagattttgttgaaaagttctaagttaaatgaatgacacgaccaaagaaatgtgttagaataactggtaacaatgtaaaggatgatgggcagaaagggaaacctgaaggatagagaagaggaggcatactctttaaatgtaagtcgaaaatttagcgtattttgtaagtaattggatgttaagagtgaggaagaaagaggagttgaagatgattccaaagtttctttcatggacatctagatgatggtaatagggattcaggaggagaactaggttacagcaggaagataaagagaacgttagttcaggccaggtgctgtggctcacgcctgtaatcccagaactttgggaggctgaggtaggtgcattacttgaggtaaagagtttgagaccagcctgaccaacatggtgaaactccgtctctattaaaaatacaaaaattagctgggcatggtggcacctgttgtcccagtgacttgggaggctgagataggagaatcacttgaacctgggaggcagaggttgtgatgagccgagatcacaccaccccgcttcagcctggatgacaaagtgagtctctgtctcaaaaatgcaaacaaacaaagagaacgctagttcagtttggtccatgttaaatttagatatctttcaaatttttttaaattataaaaataaagatgggatctcactatgttgcccaggctgatcttgaactcctggactcaagtgatcctcccttcttggcctcccagtgtgctgggatcacaggtgtgagccaccacacctggcctaaatttagatatatttatgatacctagatgaagtttttcagtagacatttgaaaacaggagtttggagctcaggaggttagatgactagaaacagtgaatttggaagccattagccttatgtattggcattagttaccatctcatgctacataaaattccctggagacatgtacttgagctgttccctttggaagactagttagagctaggattgcaacattttgatagtcaatattttaacaaatcgaaaggtacctctgttgacttggagcatgcaggttatactaggatctgattagaacctctgttacaggattagcaaaccaagtattgctaataccttggtgtagcatgagaaacattggtactatatgagaaaacttgaataacatttttgaaaggccttttgtaatatatgagattctatttcaaagcctacctgggtttatgcttagtctagaaatactttttaagaagccataagaaaacaaatccttccttatacattactgtgaatggacttgatatgaaaaggatggcatgttttttatgaagacaacttaaaaagtgtgtagtttacaaaccttgtttaatagcaaaatgaagagtaaaaaaagtgtttttgtaaaagcttatagtctcttctctcattggtattccttgagttaatttataataataaattaataagtattaataatcaatataattaataataatttatcattattaataatagtttaaagatagggtcttgccctgttgcccaggctggagtgcagtggcatgctcatagctcactgcagcctcgaactcctgggttcaagtgatcctcctgcctcagcctctcaacagattaccaggtgcataccaccatgcctggctgattttgtttgtttgttttctgagactgggtctcactctgtcgcccaggctggagtgcagtggcacgatctcggcttactgcaaactctgctttccaggttcaagcgattctcctgcctcagcctcccgaatagctgggactataggcatgcgccaccacacccggctaattttttttttgtattttgagtagaaatgaggtttcaccatgttggccaggctggtcttgaactcctgacctcaggtaatccacctacctctgcctcccaaagtgctgggattatagaggtgagccaccgcgcccggcctatgcctggctgatttttaaattttttgtagcaatggggtcttgctttgctgttcaggctggtctttaagtgcggggattataggtgtgaaccaccatgcctggcctaatctataattattaagtatccatcataggcagagtactattttatgtgtaataaggaggcatagaaaaaaatagttctagttccacattttcaaaactaaagcatatcctgtgataatgtgtttcacgaagaaattgtgttgtctcaaaactctcagggaaaaagtttagtttatttggaagagacagaagaaaatttagtatactttttgcttgtatgccaagtacagacttggatatatgaagacaggtcatatatgttagtgtgcctttttagattagttgggaagactcttgaattcattgaggtgagcaatagcatttagcattcattttgctaataaaatctaaggttcaggaaatagttttaataaacagggataggaatgtattcaatcatcttttgttcttttaataaatacttattaagtgcttaatatgcgtcagataccgttcattgtactagacacagtattgaacaaaatggcaagaatgcctgccctcatggagcttgttttctagtggagaagacagatagtacaccaactaagtagggtagaatgtgtcatttgttagaaaatgataaagtgcgtaggggaagtgaatatgaaattgaaatatcaggaggtaagctgacaatagagataggaaagacctctctgagaaggttatacttttgtaaaagatcatgcagctatttggggaggagcattccaagtagaaagaatagaaagaacaaaggccctgtggcaggagtatttctgctgtgtttgagaaatagcaaggtggcatatgtgattatagtagaacaaaagagccagtgaaagaaggtaaggtcaaaggtcatgagctgggaacccatccggaggttttgacagaaaaaaatgatgtgatcttatttaagatttaagagaattaccctgctacatagaaatgcagacttaattgtttgagtgtaggagtttgaggctacaatgagccatgattgggccactgcactccaacatgggcaacacagcaagaccttgtctcttgagagagagagagagagagaggaaggaagaaaagagaaaatgcaaacttatattcatataaaattctatacacaattgtttaattgttgatagcagctttctttgtaatagctaagaactggaaacaaccaaaatgtccttcagtaggtgaatggataaggaaactcttgtacatctattccatgctgtactactcagcagtaaaaaggagcaaatggggccaggtgcagtggctcacgcctgtaatcccagcactttggggggctgaggcgggtggagcacgaggtcaggagtttgagaccagcctggccaatatggtgaaaccctgtctctactaaaaatgcaaaaattagccgggtgtggtggcgcacgcctgtagtcccagctacttgggaggctgaggcaggagaatcacttgaacccaggaggtggaggttgcagtgagccaagattgcaccactgcactccatcctgggtgacagtgagactctgcctcaaaaaagaaaaaaaaaaaaaaaaggagcaaggttaatagacacatcaacttggatggatcttaaggacattatggtgactaaaaatatcaggccagtcatggtggtttatgcctgtaatcccaacactttggaaggcctaggcaggaatatcacttgagcccatgagtttgagaccagcttggtcaacttggtgaaaccctacctctaaataattagctaggcatggtggcagatgcttgtagtcctagctgcttgggaggctgaggtgggaggaggtcaaggctgcagtgagccgtgatcttgccactgcagtccagcttgaatgactctttctcaaaaaacaaacaaacaaaaacaagaaaataaaaaagccaatctcaaaaggtcgccgactgtatgattctgtttatatagtgttcttaaaatgatgaaattacataaatgggaaacagattagtggtttctaggagttagggatggtggggcatagaggaacaagcatgactgtgtaggggtagtgcaacggagatctttgtggtggtgaaatatttttgtatctttttttgatacaaaaaattgaacaggggaaaggcaagatccgtttacacatgcaggcatatatgtgagagtactcagtaatgactgagtccgaatagttgtaattgctattgtagtaattgcagttgttgttccacaaatctacacatgtgataaagtgacatagaactatacatacgcattgtacccatgtcaaattctgggttttgatatcgttctataattatataagatttaaccattggcggaaactgggcgaagggtacacgggacctctctgcactgtctttgcaacttcctgtgaatctataattatctcaaaataaaaagtttttaaaaaaagattactaccttggctgctcttttgaggagtaatcctaggaggttattgcagaaatctaggagtgaggtagttgctgttaaatgaggctggtggcactagagtggagtgaaggcaggggtgagaaatagttggattctgaatatgatttgaacgtagagttaatagaatttgctgatggataggatgcagggtgtgagagaaagagaagaatgaaagatgccataaaagtttttggcctggtcaatggaggagcaaagaaaagagatagtaacaagaagcagcaacaagtcaagaagcccggtaagaggtagttggattcttggcaagaaagacaaaatgacaaaccctcttcctctagtcagtggcagccacgcctgggagttagaggacaataggatattaaagtgactgcactcttattaacctgcttagggggagctgagttatcttggcctcgccctgcttttttggaaagaagcgtttgtttgataaacaggaagtcgtttccatgggtgtaggaagaagaaatgatagaactgagtggcaaagcaaagaactactagctgtggttagtttggaattggcagaagttttttcaggtagtcacctaagatgaagatgagcacacatactgccttttcccttttctaggctgggttcattcttcactgaaatgtggtatttctgcctattgcttgtcctgctgtcagggtatgttcattttcagctagtgttttgcatcaactatgagttgtagacttagcagacaaatggagacactgtctgtttagagtggaaaagtgacttattttaagaaatgttggctccgcaccactatcccattagtggcatacctctgacactccattgaagctggcctagggaaggtaagactggcttctgtgtatttttgctctttgaaaggtcagaacctaaatgtaccacaagatattttcttcctgagtaagattgggacaaaattacaaacagtgaattctgaagcaaacttacgtgctggtgctctaatactttagaaaattcaaaatcgatttcctgtacttctaacaatattactcttcgtcgggtatgtaaatctcttagtgtcacttacttcttttcattttgcaaggaagggcagaccaaaaagattaaagaagaccaatgccaagtcatggtcatgggaaagtgagaaagagaatttaaaagtactttttacttttttttactttgttttactttttacttttgaaaagcacttgaaacaggagaaccattttttttccttttaaccgagagtcacctcatccctgtctgggtacatgtttggagtgaaattgtggtcaaagaaaactttaaatttgtcccagacctataatggcaactaaatagataagtagttgattgatggtgaaaaaagcttagtgtgatggacttgactttatgcagcaggtgtctacttgaggtttgtttagattggtgggggtggggagggggcaggactctagctaggggcatggctgcagtgtggatgattgggatgaggatatgggtagtatttgtgtctcagtatttaggagaggtagttcactgaattgcctggaagaagcagaacaactctggagttccttgcaattggagtttatcctgacaaggttcaacgtacattttactttgcgtattgagtggattcaggagccatttggtttcatttgccttctgaaagtactgcagtatttgtaaaaatgctgtgactatgtgttaagtccaggctggtctacagctctggatttcttcactgaaagttaaatatcacatttgaacttgaagaatgtttgctgcctgcctctagagcatatacgaatataaagcagctatttgtcagcaggcagctgaaaggcgattttcagcagggagtgaaaaccactgcaggctgctggcttcctggcacacccactagacctcgtaggtttacagtgaaagcaaaccaatgggagtaggggttggggggataagatgggcaaaaatcagggcagaggctgaggtctgaatgcgattgagccactggaaggagcttgcatgtgaagagcacagtgctcccaaagagaagaaaacttgaaccctaaacacaatggctaggagcaaatatctaatgtgaacactttaaaaaaaaaaagtgatttgttccgtaagtgtatttagagtccaggggaaaaaaaaaagtgatttgtttatcttctttgtatctataactataggggtactgaaggtaactttggggaaagtattatagtttaagctgtactacccagtgcgctgttacagctaccttttaaccagaaccattaacagtgacaatcgatgtgtagaaaatcacctttaagctctgcagaatcctgaaggactttgtgctctattgactagatgtttaagtattccctatatagtattcagtggaccttttcaaaaatgtcttttgcaacatctttgaaagtgaaagttttaacgtatgatactcttaatcagagtacacgtttattcccaaatattctgttctttctttgggtatagcatgcaacagagtttacttgtatttagaagatcaagaggtgggggtattggcaggataaatgatttgtccagggacaactgatgtgtcactgtagagataaaacagaactaggctgcattccagcagcttctggcccgtataacagttttgagaactttccaatcactttaggaaaacaaggtacttagaaatttataaagactttcttaataaaagaaatcacttattttggaaattgtgaaattaatcattctgcagcatttaagaagcactttgatgtgttctggtaattagtatttactgccagacaaatgtctcttgggcattttaattaatgggtagcttggccaaatgagcttctgatggtaaaccttcataagggtttatttttatgtttctcaagaatagctgtctcttcaaagctctttaattagacaaggtttagcaactaaaacatattattagaataattaggccttgggttaagagaaatagggggtcagaggagcaggtactgttagaaaatggcctcttaaaacatagcattctacctctgatggatggccagttctttcacagcttctgttaagttactctccctagtttggacttcgtgttgtttaaagttcatagcagacctcaccggaagcctaaacacacccgagtgggagcttacttatccccacctctgacctcccagggaaagcttgattctagtccttttaactgctaagtggaagacttcttattttctcctttttcttctattaaatcgataatcttggctataacaatgacttgtatttttgagggagatgcttcaaaagccttgtgtgtggcgaacaaaaattacaataattcctttgaggatctttcttaatgatttatattatctacatataagatatgttcttaaagtgactacagtatttgcattccagaatgttatatttcttgtggtcagaatgcagtttgaattattttgcaatctgctctgtagatgggctggcatctaactccccttcttcaaccttctcccctaccatttcttgccacaagcgctcagtcttggcagttattgctagtaaatatgtgctaccctgaacttcctctttgtggtgaaggaaagatacacctgactggtcctgtgagggagtgagatgtcaccaaaacaattgtgtattctaccaaaactgttgataaatcacaatatatttatctatattccctcatttttcactttcctactgtctcaggatgcttaggatggcaaatatgtccttttcccagctagatcagttgattaaaggacagtgctcatgagactattagacatttctaacagaacaactgtatcatagctgacatttctaatcccactagctgtcatgacctatatgtgttgttggtttgataaagaactgagtcaaagatatgtatgttgttggtttggtataaacctactgctattattagaaagttcttaaagaacctgctaatccatcaaatcatttttgaatattgaggatagcctgctttatagtattatgattttatcacatgtaaattcttttgatataccttagttaacaacatggccaatgaaatgattttatttgagttggtagaaacttcacttggtttttgattgatgttatctgtaaaaattatcattttgtaagaaccatttggtgagccccataaatgcagatataaagatgtaggtatatcgctatgcactccagagaacagttaccgagtaagtgtgtttttatgtcaaatcgaagaactttgagaaagcagaaagatagtaacctaaacagagtgctctgtcgaggagttttctccccctagcagtgacgaatttctgtccaccctttccttaaatgatttaatattggggccttgcttttttacctcctctttaacacaggaaatatttctgatacttatcttcatgtgtgtgtttgctcatgtctgtgcagtcttctgcagtgaggatatgaaaagaaaggtagtgagttctatgacccttgaaaaacaccagaactctcttttcctaatgaaagtacaagtgtgttcttatgcatacttttgtataacaggatttatacttaaaatagtttggatacttattactaatgaattttgatagatgcaaaccaggactatcaatgtgttgttctctcattgctcattttgcctctttaactcactcgagagggccccttgtagccctccttaagtctaccttttgaaattacacaagtgtccaaaatgaaaactgactgtattcttcttcaacacagaccacctggtggcccatggtagaatggcagaaaaggaggcacgtcggaagttcaaacagatcgtcacagctgtctatttttgtcactgtcggaacattgttcatcgtgatttaaaagctgaaaatttacttctggatgccaatctgaatatcaaaatagcaggtgagaactgtactgaggatgtcagatagggacaaaggagcttttccttggggttctataagcaagggattatctgtttccatctcttcagaaagaactattgtgaaagtaaggacaatttaagatgaaaaaaaaaatagcctgaaaattgataaactttaaaagtacttcccctcccctgccctttttttttttttttcgagactgagtctcattgtcgcccaggctggagtgcagtggtgcagtcttgactcactgcagcctccatctcccaggttcaagcgattctcctgcctcagcctcccaagtagctaggattacaggtgcgcatcaccacgcctggctaatttttatacttttagtagagttggggttttgccatgttgggcaggctggtcttgaactcctgacctcaagtgatctgcctgccttggtctcccaaagtgctgggattacaggcgtgagccaccacacccggcctgtttatttttaatgtagtatcagctggaactaggctggggagaaagaagggaaaggtgatatttaaaatactattactttggttaacgggtccttttttacataagaaataaaatatgtaataaagtggaaaggaaaactactaaaattgtataccctctcaccttcacttgagaaggttgatttatgtcactgctgacacagagcatacttattctaaaggctgtaattgtatgataatttaggaaaaatagatcttagagtggcttataggcagtccagctttttgtcttctcaaattttactagtctgcttatctgacagtgccttgagagcacttttcactgccttgatctgttcatgcttaattttagtaaactatcagcattttgcctaatgaatacagactcaccatttactaataaaattaagtgactgcaatctatagagaaactgtaaatatgaaaataagccatttatgtttgccgacactttccggtatagcatcgtgtatccccggtctcccagataaaaggaaggacatctcatatagaaaactaaaatatagctagaatgtaattgtctagaaaaggcaaggtataaagcagttctaaggattttcttccttagtagaggtgggatttgagagtttggatttttatcataggtcaaagttacctaagggtacctttgcagggtcacaattcttctgagagttgcttttgtgtagataagcctgttcacttttacatcctggagcatcacctagctttttatatatctgaaactgacagctacacttttgtttagaactttcatatcatttataagttctttcactcctgcactagcttattacagagtacacaggaattaaaggctttctttatcttatataaaatcatgtttttcctttgctctcatgtcggttttattttctccaaagctctatagatactggtagttcccacaaaggtgtgtggcatggaaaagcctggcaatttcaaaccttcttttgtaattatttgttgtagcttcaattaaattaatactaataatacctactaaacttcacaacccttaaaactgtaataaaagattgattagtgtcttattattactataacaaattaccacaaacttaatgacttggaaaaacacagatttgttagcctgtagttctggaggtcagaagtccaagctgggtctcacagggtgaaagttaaaacagcagcaagggctgttcctcctggaggctctgaaggaaaaatgtgtccttgccttttttagcttctaaaggtcacctgcattctttagctcagccccttccttccttcactccaacctgtggcttccattgtcacatctcctactcctaattccgaccctcctgcttccctcttgcaaggacctttgtcattacattgggctgtctcagataatccaggatcatctctctcccacccccacctttttttgtttttgttttcgagacagggcctcattctgttgcccaggcaggagggcagtggcgtgatctcagctcactgcaacctcaacttcctgagtatctggaactacaggtgcgcgcttctatgcccagctaacttttgtatttttagtagagatggggttttaccatgttggccgtgctggtctcgaactcctggtctccagcgatccacccaccttggcctcccaaagtgctgggagccaccgtgtctgtcctcatctccccattttaagatctttaatcatgttaatacaagtcctttttaccatgtatggtaacacattcacaagtatgggggattgggatatagatgtatttgggggccattattcaacatgccacagatgtcactgtaaggctctttggattatagattagggtagtgaattaaaagaaggccctctggacacgcaccacccactctgcactgaccagcccacctggatagcagaggacacccccagcccccaccaagcattgaagacatagtttatttcctcatatcctttctccttgggtgtagttggggtggggaaggagggaagactggggtcatctccattccttgggctctgtgcccgagtccatggtgcaccactgtgctgcgagctgtggggcctgctgcagtgggagtgtgtggaacaccttgaccaaaggggagctttgtcttgtgtgttttgaaaaaggcttaatgaagagaatgttgttcattcttagtagtatagtttgcaattcttaatgacaaatagtaagtttcagtagaaaacaaaacaaaacaaaaagaaggccttctttatattctctagttttattttccgtccgctgacccaagattaaaaattttcttaatgctcccttggttcttgattttgaatttaggatgattttgatttagttaaagaaatttcttttttttctttttttttttttgagatggagtctcacactgttgcccaggctggagtgcagtggcatgatctccgctcactgcaacctctgcctcccccaggttcaagcgattctcctacctcagcctcccgtgtagctgggattacaggcatgcgccaccacgttctgctaattttttgtatttttagcagagacgagttttactatgctggccaggctagtcttgaactcctgacctcaggagttcaagatcctgatccacccgcctcagcctcccaaagtgctgggattataggcgtgagccaccacgcccggctgttaaggaaattttatatcctttagtttttacattgagaaactcagagtaaaaacagagattattgataattgaagttggaaactctactgaaatatttggtaaggagatttttaaagacttttctgttgttgttgttgttaatagttaaaacaaattcaaggagtcacaatgagagtgtctacctgctgatatataattacagactccggggtgctggcagccagccttgggctctctctgtgttaacacatatactttggcaagatttttaagttcattaacccaaagcgtacatttttattatttgttttaagagcaaaacagaaaaataaatgagcacctctagttttgcggcctgctacaatacctaacattagctttgctcatgcagtctttctcttatatgccatcgttactcagtttctcagtcattgcctgaacctcctttcttgcacataaattaaatagaattatcattctcacctcccagttcttttttgaacttaatggactagtgggagaaatgcttctagttgaagccaactagaacatgactaattttggagaggtaggttggatgtttttgacaggataaggtcagataggtaacgaaatcaactttaattctaaaagccaaaagtaactttcagattcctgatcttttcaatggcctcccttttggtaaagtatcttaaatgtcagtaagaagaaactactatatatgaaagaaacatgcaagagagaaaaagggttttttggttttattttaagaagttagtcttggctgggcgcagtggctcatgcctgtaatcccagcactttgggaggccaaggtgggtggatcacctgaggtcaggagtttgagaccagcctggccaacgtggtgaaaaccggtctctacaaaagttcacaaattagctgggcatgatggcgggtgcctgtaatcccagctactcacgaggctgaggcagaagaatcacttgaacccaggaggcagaggttgcagtgagctgagatcacgccattgcactccaacctgggtgagagagcgagactccatctcaaaaaaaaaaaaaaaaaaaaaaaaaaagagaaaagaaaaggagaaattagtcgtaagcagctcatctttaaaataatcgtatatgttatagtaccaaaataacttggaactaataaaactcagattaggaagtataaaagattcatgttttctgtatgccattgtttaagtgattttaatgaaaataatcatgcatccagtttcgtgtagaagatgaataaattggtctgtggatatttgtgtttacattaatttatttttacattttgtattaatgtggtgatttacatttgatactgtttgtttgttttgtagagacagaatctcactatgttgcctaggctggtctcaaactcctggcctcaagcgattctcctgccttggcctcataaagtgctgggattataggtgtgagccaccatgcccgccccttcccccttcttttttaagaaactgggttaccttctgttgaccaggctgcagtggcataatcatggctcactgcaacctcagcctcctgggctcaagtgatcctcctgcctcagcctcccaagtagctgggactacaggcatgttccaccacacctcgctaattttaaacattttttgtcactatgttcctcagcctggtctcaaactcttggcctcaaccagtcctccctccttaacctcccaaagtgttagaattatgggcatgagccaccgtgcctggcctacatttgatatttgatactgtaaaaagctagctatcacaactgtccatactagttctcttcgagagaataagtgttccctggatagatagatattagttatagatattataagttataattatagtataagttatatcttcagtcataaatactataagattcagctgagcaaggtggcatgcatctgtagtcccagctagttgagatcaaggctaaggcaggagtcttacttggacttaggagtttgagtctagcctcatagtgataccttgtctactgaaaaaaaaaaaagattgaaccattgttccactgtttatgattttttttgtgcttaattcttatttatgaatttttgttctagttctgtttctagagagaataaagcccaggtgaataactttgttttctttctggttttagaattattagtaacaaatccgtgttcttaatggcagtagcaaacctgtcttctgtagaatttttaaagagatgtttctgtcattagtaatacagaagaagccttgatcattttcagaataaagaattttacgacagggagaggtggctcatgcccgtaatctcagcactttgtgaagccgaagtgggaagatcacttgaggccaggattttgagacctggggcaacatagtgagattccatctcttttttattaagaagaaaaaagaaaaaaaaagaattttatttctaaaggcagttaccaagtctagaactaagaatttgtggaggtaatctagaatcttacttgttaacgaagcctccttgcataatggcacagaagagaaaaaagaagcgtgaaacgtgactccagccctaaagaactgaggctatatgggcagcaaacattagatctttgaaaagttggtaacaccaaaattatgctttgcatatatataatgtacttcacaaagcatttttacatgtatcacctaattttattggcatgcaaatatatcttattaaaaaagtaaaatctcttcatcttctggcacttttaactctccaaaacttctgaatttcttgtaaagagcacccaggcaaggtatagagaaccccaatgctgggaaaagagtaggattcttggcctccgacttttaacttttcttgcctgagatgtgtaaggatccacagaagagcagttgaaggactgacgaggcacaacacagctcactcagcatggagccggcatcgctggatgatagtatccttaacagctaccaaattatagttggatacaatagaagagatgttacaaggcatgtcatgactcattatcacattaattgtacagtctaattagcataggagttcagaggatgatagaagtactgtagtttgtaagattccacaagattgtcagttccacaaggactgtaaccatgtcctgtttattgtcacactcccactggctcatacatgcctgttctgtagcaggtgctccccagctttgtcgaactgaagttcaggcggtactgataaaggacataaatattgtattgaggacatggcatttgaggtgcgtccagtgtcatgtgattggatgatcaggtgtagaggagagaattccagcaagtgttaataaggcacctgtcagttgcagacactgatacaggcacgggggtacagcagtcagtaagataaccccttggaacttatattctaatggggataaatagacagtaaacacaaataagctctcatagggctgtgacaaagataaactcgagtaacatggcagaatgatttgtgcgagaggtactgcttttagccaggatcttcaaaacattccacgcagaaagaagaacaatgcaaaggcctgagagagataaattcaacatagaagaaaggggtagaagaaagtccagcatggctggagataatgaataaaatggggattggaagaagttggggtgagagagatggcaaaggccagttgcacgtggttaggatgtgggatttcatttaggttccagtgggcactgagttggagcagcgtgggcagcagtagaatgcacaaggtctatttgaaaaaaaaaaaaaaagggtgagcagctcagtggaagggaaggctaaaggagaggagtctccccgagaaggcaggagcagtagatgtttatattagattgaaatcatttgaatataagatataaggcttaattaatccaattcagtatggagacggcaaaaagctggaagctgagggaagggaagggcctcctggtaataggaaggccagttaaaggctgtgaatggtaaaatcccgcatgagggtgatggtggcagtaaacatgcaaaggaagaaaacggcaacaaattcaagagagaaagcaagcgagaatttctaggaccagataaccaatcatatgtcttgaccaggaagagggaattttgaaagatatgtttagaaataaagaaatgaaattttcttactgatggattatattaagctatcaaaaaaatggtgttttgaaaatggttaatgtattgctattcgaaagtaattttaatgtccttgtccccaaagattaagtagcaaggtgtctatatttaaaatagattgcctgagaaaaaactgaaatgtagctggcttactccctgaagaaaagttctttcaaatgcttagacgttataagaatgttctgaaaattgtggaaacattttttttaaacctaaggaagttggaaacttttgtctttaaatgtcgactcccagaatggtctccatgagatagtttccactctcgtgttattgttttagttggcaatcagtagacagcaaagatcagaaatgcaactatagaaaggccaatatcctggaaagaattttcagagcatggatttaaggtaccatggaaaattttgaccttaatgcagtgagagctagaccattttattattttttagggagaaattaaaacatttcctaactcaattgacctttcacccttagtatgaatatactgagataccatcatatagaaaagaaaggttggaaaccttggatttttgagtacccttccacagtgtgttgactgacagtgcctctgactggtcacaggaagtagttatgcaatactcattatatcaatctaaattgtatttcatgattctaatgccctctttttaggctatcattcattgcacctcccaggttgacatgtccagtgaattgagaccagagaggcctttgtgtttgtcctgaattcataatagagtctaggaattttaatagctagacctgtgttcttgccctgaaatggcatatgaccattaccaagaagcggctctaaataaccttcctgcacgttgacccttgggaaaagaaaatttgaaatattatctctcttgaatcctattcctgagactagaactttacaaatttgtattctacttaatgtcatatctatattttttaatattaagattattaacttagtttaacacagaaaaaacgttgatgttccaggaaggtgcaccctatttagcctacggtttctcgtatatcttggaacactgaagtgtaacacctgaggctgtgtaaacagaggccagcctgagaagctgagaatcaagaatttgatgctcaaccatagattcctcttactcacacttctagtttgtgcagagtgacttctctattacttttcctcagcctcaaggattttcatgccattatctattaattgcacgtcacttattttggggataattagaaaaagggggaatgagaggttgggaatagaaaaagggagagaagcaaagggcagaaaagaaatggaagcttttgctttgaggtcttgtgggggtgggggtggaaaaaaaagtgtaggagaagcctgagcccaaaagcttgcctcctccctctacagggaaagggagttgagcggagtgtaagagggtggatggcatgcgcttctgacctaccaaagcatctggaaatttcagactgctctttgtctctgagactgtgttgggcacagcattgaataaagtgtggatcaataagtatgtgaagtgctggatatgttaattcactggatttaatcattcctcagtgtatacatgtatcataacatgtacgatgtaccctgtaaatatatacaactattgtaatttgcccattaaaataaaacaaaatataaataaaacatgagcagtgatgattaaaagccaaagtttcatcttaatctgtataatatctagaacaaagaaaaataattttatcggcattttattgaagctgcagaaaatgacagctttgaaaaatctcaagcaacgtatggtttaaggaaattaggtgtacacttaagctatagtttgtttgtttctccctttcctttcctttcctttcctttcctttcctttcctttccttccttcttcttccttctttccttcctctcttgtcctctccttttctttctttcgttctttctctctcgctctctttcctctctctctctctctctttcccttcctcctttccttccttgcctccctccctcccttcctgtcgctcagactggagtgcagtggtgcagtcatagctcactgtaaccttgaactcatgggctcaggggatcctcccacctcagcctcccaagtagctgggactacaggtgttttgccaccatgcctggcgaatttttaaattttttgtggagatgggactcgttttgctgctcaggctggtcctgaacttttgagctcaagagatcttctcaccccacctacctaactgttgggattacaagcatgagctactgtgcccagcctcttacctgtagtttctagtttaagaagttttagaagaacattgatattctatccatttagagtagtgttttacttttattagtggctatagaaactataagaactatagaaaagttatagaaacttacagttcttataggaactctaagaacgtttatataagtctgcccaaggtcatgtgtcctcatgaggatcgtaagctcctcaaatgcaagttgatgttgggaagggactaacgaatcacccagagtgctccttcactctgattctgagggagtctttattgtgttgtgtgaagcgtgttggaagccaggtgtggtcgcacgcacctgtagtcccagctactcaagaggctgagatgggagggtcgcttgagccgcagaggttgaagctgcagtaagctatgattacaccattgctctctagcctaggcgacagagcgagaccctgtctcttaaaaaaaacaataaaattttttactttttgtagagatgaggtctcgctctgtcgcctagtttggtcttgaactcctgagctcaagtgatcttcctgcctcagcctcccaaagtgctaggattataggcatgagacactgtgcctgacctaaaaaaaaaatttttttttttttttggctcacacctgtaatcctagcactttgggaggccgaggcgggcggatcacgaggtcaggagatcgagaccatcctggctaacacggtgaaaccccgtctctactaaaaatacaaaaaattagccgggcgtggtggcaggcacctgtagtcccagctactcaggaggctgaggcaggagaatggcgtgaacccgggaggcaaagcttgcagtgagctgagattgcgccactgcactccagcctgggcgacagagcaagactctgtctcaaaaaaaaaaaaaaaatttgatgtgatattatagaaatttaaaattaaagcaatgtcaaaaagagtgaggctgactttttaggcaagcctttgcaaggtggcagaatattagtaaaggtccccattatatcagaatctggttgtcatttatgagttctgaaatataccttatcagttctcttaaaatcataagagagtgagtataatatttgtatcagttttcttagcatcaaaaagtacagtttgctagtggtaggcatgggtatttcatctagtctttttaaaatatcctgatttgagtggtctttggctcgtctttgcggaggttatacacagaccatccttaatttaccatctcaagtagtatacaggatcttttcccagccagtgacttctgaatcctcagagattttcagtgttccaagagattcatgtcatacaaagtgataatgacttttctattttttagaagttaataaatgaaataattacttaggtctttccgcccttcttaaatggaatagtttgagagcctctgagtataaatcgagtctacctgctggcagggcgctaatgagcatgcttatgacttggtcattccatttattgttcaagtagttggttatcataatagctttgaccagggtacagtttttcattgtattttattaagtttacatctattatggatcactggattatataaagcataaagaacactaatgttgaaattcaaattgatgaggataaaaatgataattctgtaatgcctcaagacaaccttcaccaaattcatgatttgtctttgtttggccatggttcttacacagcacatcaaattgtttctagggcctcaagaaacaaagtttaaaaatgttacattacatacatacacacaaaatatgtatataccacatgtatatacattttttacacacatatccgtatctatatctatctatctatattatatccagtttgatttattgggaataaagactatctacattcatagtatattatttgcaaagaagtgctaataagtaatgacccaatatttgttaatccatttcattatttaaaagcaaggcatgaaaataattcatttaatcaagtctggtttttaggttcaaacatgtaagtgttccaaatcctaggtcatgaaaagtattcatctgttttgtgtattataatctcagtatatttgtggcttccaaagccaggtgccgtggttcatgcttgtaatcccagcactttgggaggccaaggcgggaggatccctgcataccagcctgggcaacataataagaccccatctctatcccaccgcctgcccccccgccccatcaaaaagaaaaaatacacatacacacacacacacacacacacacacacacacacacatatatggcttcctactaaacatgatatatcaattttaaataaatactttttcttgaataattgaaataaatagtgtgggtcacttgtatgatgggataatatgaatttgtcttaaaattcatagtgaacttttaaattaatttttaatgtactaatgtaaaataaaatgtcttttagctaaagtctcttctgtatcataaatcatagaaaaatgacaaaattatttttaaaatttctttcccgggaggtttttaagataatacattcctttgaaaggagtttgtgagtcagaaaagctggaaaataaaaaggtaactgtactgatttctttacattctaatccaagtataccatggttttcttgatcagattgagtgagtctctgaactgttgatagaaccttcttcaggaaagccccatttctctagaatataccaattgcccctctggaacttttccttaaaactcatccagtggttataattatatagttacatgtgtgcttgtttcatgtgtatctcccccactggactaatctgctacatgagggcagggaccatgtctgtcttgttcaccttgtactgagaatacatttgtggtccatcaaaaaattgaggaggcaggccgggcgtggtggctcatgcttgtaatcccagcactttgggacctgggcggattacctgaggtcaggagttcgagaccagcctggccaacatggtgaaaccttgtctctactaaaaatacaaaaatcagccagctgtggtggcacatgcctgtagtcccagctacttgggaggctgaaacaggagaattgcttgaacccaggaggtggaggctgcagtgacccaaaatggtggcattgcactctagcctgggcgacagagtgagactccatctcaaaaaaaaaaaaaaaaaaaattgagaaggggagtactttattcccattatcatattttcacatcacctttcagttgggttacttttcagatgtctgctctcatttgaagtttttttttgtttgtttgtttcctattagctttaatctaagatagtattttgttacctactcttaatttctaggtaacaccttagagcttcttaagtgacaatcctatcttcttttctctaaaagtaggcttctgcttatcagaccatatgtcttagtttttaatttggaaaaaggtttttgttttgtttttttgtttgtggttttttgtttatttgtttgtttttttgagacacagtctcactgtgtcacccaggctggagtgcagtggcccgatctctgcccactgcaacctctgcctcctgggttcaagtgattcaagagaatttaaggggacactgattcatcctgttctataaaaggcacactaaaattttgtataccatgctcacctatcattattagaaacttacctgattaaatgattaggcttttattgttcttgttgatattctttacaatcatgactatgatatactcattaatgtttttaagaattccgatgagtactgtttgcatgtgttgtagaaagtgtctcattataatcctttcctttatacatctagtcagtactgagtttgatgcaaagatcctatattgaggaggtgtttggggatttatatgagaagggttggatgttgctatctaaaataaatagagtggagaagactggtttattacttcatttaaaatagctgagttcagctattgtacctgctaaggtgttttgggataaaaatacataagtcactcattggaaatgccaatataatgctgatccaaatctccccccaaataagatgattacttgattttttttttttccttgaaggaattttctcttgtgtatatatgctaaggctgtgagtcaggagtttttggcattacttctctattagctcctagtgaggaagttcagccaggggttgaagtgattactaaatcctgaggacttcccaatatctgtttttaagagtgaactaatattgtgacttctgagaactttgaaactcatcctttgtcactaccacaattctgagatccacacacttgacttttgttttgttcaatttcaaataaagcccttaggtcatatggtttggccagtgacattatataggaaaagcagatttaattccttattagcgtcatgttccattttaatagtcaggagaacattctaaatcctatttatatactgttcttacaccagtcttgatctttggttctttgcatcatttctagcagcaacatttctaattattagaaatttctaataattggaaattaatcaaggacctaattatttctgtcttcatctttgggtctctaattgcaaatgcagtattgggattgtgaatcctcagaagcttttagctttgaaaacatgaaggatcttgtcacagtgatttttggtgaggttgttcatttagggtaagtaaatatcttcccacttcactttttcccctctgctccctgcttccaagctgtttacttatacagcaaggaagtgaagcacaagttacccttggaaagcagggttgtccgtcgctcaaagctgtactgtattgccttagagacactgagaacactagtactggctggaaagttgtgcctaatctgtttacatctgctttggattgttctttggttagccaaaaaagaagtcaagttcattgctctaaagtggtagaccaaataagaaaattgcctgttgcagttgccctgatttataaattaatgccgcccgttttgctcttttcccttaccacatagacatatccagttgatgatatacttatttttagggatatcagttatcactaccttatatatccccaggctcctgatctcacctccaacaaagaattccaagtctcaaaattgatagtaagctctggtatttaagccttcctagaagacagtcatatggttcaaattaaagtctcctgctctgtattaagagaaagggatttaagttgccatttcagcctgcggacaaatgctaaccaactagggtgttgggggttggaaagcaacttaacaaattatattgagagccacttgcgagtggagaaataaatgaccatggccacatgaagagaccaacttcgctccactcatatggcttctgttgtgtaggtgtgcgtatccatcttaaccagcttcttctgtttctccctgttcttccgtaactctttagaatattcatcattttaatgttgactctgtaggtcatacatctttcccattgccagtaaataagcagtaagggatatcaagtattttatcggcatcagtacctgagaattacataaaactaactgctcagtgtttttgttcttattgttcaagatgatgtcttaaagtctttatacttaaaataaaaattttagttatagaataatgtaagcatactatagaaaatttaaacagcaacaaaaccgttttaaatattcaagctgcaatcccacctctgaaaccattgttaacattttgaatgcattttcttttgtctttttactatgcatgtttttcatacttataatcagtgtatttacaattttatatttcccatgttgctccatatagtcatcattttttttttttgagacagagtctggctctgtcttgcccaggctggagttcagtgccaccatctcgggtcactgcagcctccgcctcccgggttcaagcagttctcctgtctcagcctcccaagtagctgggactacaggcatgtgccaccacacccagctaattttgtatttttagtagagatggtgtttcaccgtgttgaccaggctggtctcgaactcctgacctcaggtgatccacctgcctcggcctcccaaagtgctgggattacaggcatgagccactgcacctggcctcatcatttttaatgagtgcacatcaagtagatgtaccataatttacctgatctaccccatattgtttttgttttgttttgttttgttttaaaagacagggtttcgctctgtcacccaggttggagtgcagtggcatgatcatggttcactgcaccttgaactcctgggctccagggatcctctggcctcagcctcccaagtagctggaactacaggtgtgcgccgcttcaccaggcaccatattgttttatgatctcaccaattcttggtattagcacaatcctcactttttctttggcatttattactgcattctaaaacttcaaagtgtgtttacttaaccttttgaacgtacagggaatcctttctttgccttaagtttctgtgttttttttgttgttgttgttcttgtttttcacttacattgaagttgtcattcttctggattttttttcctttatatttcaccagcatttggcctgctagcactcttcatcttgagccatgtgaactaaacttcagcttatggtagtctagtttactttatgtcttctggaatccagctagtggtaatgatcccaggccttgtccctttctctttcccaggctgacttgagctggagcagtacagcactccggtgttccttagagcgatatgagctctggaatggtgaaagaagattgttaccaaatacaaagtgcctgtggttttggggagatgatgaggctctgtgtgtttactggctgcttacctttgggatttgaataacttaaagattataatcagaaaaaaaatagattcttaaaaaaaaatggggagagttaagattatctgaaagattactaaaactatgtcaactttcagttatacaggtttttaaaaatattatctaggtttttttttcttcttttctggctatgttttttcatttgatagtttacatattgaaggaaaagaaggaaaacctaattttttttagtgttcttcgttaacagctcttgttagaactaaggaagcaagtgatattatagacaaaaatgaatttttaaattatatgtagtgtatactagctttgtctcttactaatatgggttactgagaaatagttattagtgtgggagtaatactaatattttcaatcatgtgactaataagcatatcactcacacctaattgccattttagcattaatgattatacctatcactaaaatatttactcttcctttaaaattatatttaatgataactggaaacttcatcattgtatatattcttcctagattacagtttttcttcatatatgaaaattgctattttcaacaaaaactttagttgagatctctgtcttaccaagtagttcccagttcctacactctgagttctgatacattcatttcctatttcaaactgtatcgctcttttcttccctttctcccaccctctctgttcttagttagtcagtgagttgttttaagatatttattgagtgctttctcttcctgtcagcactgtgctaggccctaggaaatcagtggtgagaaaaacctctgccctcaaaagccctaatgattgtggagcttagatcccagagcagtggttccaagtggcgagaaatagcagtggaggaggaaaaggagctattcttgtctcttttgtctttcatttattatgaaatattatgtttatacataaattttctttaagcatctgtgtatactttagtgaatcactagaagcaaatacctgtgtagtaattggcactcaggtcaaaaaactagaaaatttcatcagccaggctgtacacctcatcacaaccatatccttcccccaagagaaaaaaaattttttttgtacttttgtgttaatcacttatgtgctctactttataggtgtttttttttttcttttagtagttttgccactgatgtaatgcattacttaggagttttgctccaagggatgccatttatactgaatataatgtgtagtgggtccatccttaaacaatatagttttgcttgttttgaatgatacatgaatagaatcatattgattatattattttttgtctgtttcatccaacagtctgtgagatttatccatgttgtttgtatagctgcgatttattcatttttatttctatatagtattccatgatatgaatataccacaagttatttttccattgtacctattaatagctattttaaaagcagaagcccctattgctttcagtttggggcacttactaacagctgcaacgaacattcctaaacatttatcctggtatactcttaaacattagtgtgtattcttaaacatttaagagtgtaaactgagaagtgaaattgctgggtcatatggtgtgtgtttttaggttttatttggtaatgctgaactgtttccagtaggtgtgagagttccacttgctccatgtcctctccagtgcttgttattatctactcttaaatttttgcccatctggcaactgtgtaatgattatcttgttgtggttttaatttttactgtttctctttaataatgagattgagcttctttttgtgtctcttggcctttttttgtcaattgtcaatagtcttttgctcatttttctactggattctctattggtcttattgatttataggagtttgtttctttttgatagtctggatacaagtcctttgttttttttgtttgtttgttttttgttttttgatgattgattggttggttggttgttgagatagggtctcactccatcacccaggctgcagtgcagtggcgtgatcacagcccacagcagtctcggcttcctaggctcaggcaatcctcttgcctcagcctctcgagtagctgggaccacaggcatacaccaccatgcctggctaatttatatttagtttttgtgaagacgaggtctccctgtatttgcccaggctggtcttaaactactgagctcaagcaatcctcctgtcttggcctcccagaatgctgggattacaggagtaagccaccacgtccagccgagtcctttattttataagttacaaatatcctccctcactttgtggtttctcactttctgtttaacgtgtgtataaattttggcataattctaatgtaacgaagtttaccacttttccctttatgattagcactttttgtttcttgtttgagaaattcttccatcccctgaggccgtaaagatacctgctttttttttttttttttaaataaaaacgtgatagttttacctttcacattagggctataatccacctggaattaatttggggatagagtgtgaggatggcagcctctgtaatttttttccatatgaataacgagttgttcctgtgccactttttgagaaatttatccttttcccattgatatacagtgtctaccattcttttctatgcatgtttttaaaagaaacttgacgcagtattcctgaagcattatgtgtctttgggaattaacataagcagagcaaagggtggcagtcaataataaaatgaaaaacagtaaactgtaataactaaggaatttgcaagttttttgtttttttgagacagtgttttgctcttgtcacccaggctagagtgcagggtgcaatttcgactctggtgcaaccctccgcctcctgggttcaagcaattctcctgcctcagcctcccgagtagctgggatttcaggcacctgccaccacacctggctaattttttatttttagtagagacggggttttgccgtgttggccaggctggtcttaaactcctgacctcaagtgatccgccagccttggcctcccaaagttctgggattacaggtgtgagccactgtgcctggcaaatttttaaatttcaataaaaataattatgggatgtacgtgaacttaaatataaacacatacatgatgctgaaagcacaatgtggggctggattttgagggcactgagaactggcgttataggctgcatctgattcatactaatttttctttaacctttatacttgggaatgttacttttgaacctcacgtctcaggcataaaacaaaaataatgctcatctcaatgaggtaataaatacaaggtgctgtagcgcagcactcaacagaaggtcctttgaaaaacaactgtttaatactgcaaagtgcagcacaaataggaaaactgttgcactggagagatgagtcaaggacagtccagttccaagtctttctgggatacatggctccctccagggctcttgccactcacctgcatggccacgacgttcgtttctaagtactctgaatatatttgtatataacttaggattagtatctgttggttgtcatcaatcttggtaagaaatgcctaattttattcacagcttgacattgtagataactctgaatggatctggattatatttgtagtccatttctgtgatgtagcctgtctttacaacaaataaacaaaaattctgaggggaaaatgataccatttctcatcgagaataattatgtcatcatttgttttccctcagatcaaagttacataacacttggatgagattacatggatgctgtaagccacctttttctgcttttctgctctctcggcttccttgttacattttcctgactttcttcctttagccgcgctttctctctcctttttgctgcatcctctttctgttctcgcacctagggaataggaagtacctctgggtgttttcgaagccttaattctcatccttcccttttctctactttttctttcaaaaatattttatccttttactactataattcagtttctcagaatatcttcacttaaatttctgatcaccttctcaaactcaggacataaagaaaaagtaattttttttcttcccaaaccaacttctgctttccttaagtctgtcatctgctcagggccatattctctacttctccttctttttcatcccatatattctgtttgttatcaagtactgtccgctcctttcagaacatcttttgaattgtttttttcattttcaatatctcatctgatcacagccttcaatattcacctcacacctaacctaatcttgctttctagtttattttaccacttcacctgcctgctcagaagtcctagcaactccttattgcctgtaagtgtggctctcaaacctcttcagaaagaactgtgttttactggtacctttatattcacaccaaaagcataagtgacaaaaggaaatacagataagttggacctcatcaacatttaaaacttttgtgcatcaaaggacatcatcaagataatgaaagtccacagaatgggagaaaatatttgcaaatcatatatctaataagagatttgtatccagaatgtataaagaacactcacaactcaataataaaaagataaccaattttaaactgcacaaaagatttgaatagacatttctccaaagcagatatacaaatggctgaaaagcacatgaaaagatgctcaatattattagccatcagggaaatataaatgaaaaccactgtaagatatcatttcacatccactgggacagctgaattgacaataataagtaataataataaagacaataagtgttggcaaagatgtggagaaattggaatccttgtacgttgctggtagggatgtataatggtacggccactttggatagcagtttggatacttcctaaaaagttaagcagagttaccatatgacccagcagttccactcccaggtatatatccaagagaaatgaaaccatatggccacacagaaactcacataaatgttcatagcagcattatttttagtcgctgcaaagtggaaacaacctgaatgttcaacagatgatgaatggataaataaaatgtggaatgtccataccatggatgttattcagcagtaaaatagactcaagtgctgacataggcaacaacatggatgaacctccaaaatattatgctcagtgaaagaagccagacactaaagcttatatattgtatgattccatttatgtgaaatgtccaaaattgacaagtctcatagagacagaaagtagaaagcctagggctgggccattggtgaaagacttgaagggtgttggggagtaactcctaattagcacagggtttctttttggggtgatgaaaatgttctaaaatttcttctttggttttttcactgccttttccttacaaggtgaaaaatgttctaaaactgattgtggtcatcgtcgcacaactctgtgaatgcgctaaaagccgctgggcattacactttcaatgcgtgaattgtatgggatatggaatacaagaaatatgttatggccaggtgcagcggctcatgcctgtaatcccagcgcttcggaaggccgaggtgggaggatcatgtgagctcaggagttcgagaccagcctgggcaacacagcaagaccctgtctctattttattctatgttttaaaatttaaaaattaaaaagaaaaaagaataacattttataagaaaatattttatgagagacttataaaagagacattaagaatatgaagtaatatatttcgtattccttatctcaataatgctgtagggaaaaaacaattgaaataaaagcagtaaatgagtggagcatggagagtgtgtcatgagccaaaggttataataaattcataatcaagtttttttgtatctgaagtctaataaaatttttaaatgtggaggaaaaaaaaaggaaagaaaaaatagtaatggttcacaggatgaagtccaaggtcttcattctgtcatttgaagctgtattttatctggcatgatgctgctgtgcactctttatttcttgccatatgcccctacaaaccctttattgtacccagggcagtgtcttgcttgtcacttgaacttagcgagttaattctaagtgttctgcccttgctcgtgctccctcctgactgccattcagagcaccctttccaccttccttcattgcctctccagatcctggccattcaaccaagttctgcttcctttgagcctttccctagaactatgttttatgcctttggtttgttagaagatctaacacattgctattcccattggaagagttccataaatacatgttacataaagagtgaaggaaatggaggaacttacttagagacttataaaagagacattaagaataggaagctttagtaaataatgaaagatattgtgaattagagtagctccagagccaaaataagatgaaaaagcctattaaatagaaatggttttctaggttcaagttcagatcaaacttaagctctaaagcttttcttggcttggtgcagtggctgttgcttgtaatcccagcacttacgaaggcctagtcaggaggatcgcttgagcctaggagtttgagaccagcctggacaacatagcaagacccccatcactacaaaaaaattttttttaaatagctaggcatggtggtgtttgcctgaagtcccagctacttaggaggctgaggcaggaagatggcttgagcccaggaggtaaaggcttcagtgaactatgattgtgccactgcactcccatctgggaaacagagcaagactccatctccaaaaaaaaagtttttctttacctttttctttggcatttctgacttaagccagtgagaattcttcctcattcttttttactcattgcttgaatttgtgttatgagaatttttttcctccaacttggatgatctttcaattttttccagttgtctatacatgtagataactgaaaacagcaaagctcttagtgattctgttccatgtctatctgttccccacctccatttcctaccacacaccccagcattcccctagtacatcactaaactatcaacagaacctaaaatagactagtttgttttaactgtatttttctttccagtcctcttaaaatgtgcagcaaaatgtccccaaaggcaagcagctaagagaatgaagaggaggtattctcccatcacagttactcagtcccagaagtattgattggaaggcactgaattttcaaaatgacttccagatttagtacatggtaataatttgaggctttcccacacggataatttaaatgttcagaaaataagttatgttatagctgaatgggcagcaaattagacagaattttaacttacaagatgcatagcaatagtgaagattaatgtgaaatactagtaaagagccactggtagggaagagaagacagcgatatgctttcaatgaaaccgtcaatttataataatatgtatattgaaaagggagagtggatcagatcctgttaggtttggtacgttaaagaaagaattaggataccgcaggctcagtaattaaaggaatctgcccataattggggggtaaaaggtgtcttgtaggcagggaatagcaagattttgcttgaatgtacaccttagagttgggagtaacaatacttggaatgattatagaagacctctcgacaggtttctgagactagaggattttgtttggtgcataataggagatgagagcaagccagtagtatttggttgttgttgaatcttacagaaatcttgcatttggttattgggtctagctgttgaagccagctgtttggatgtaacatagtggaagcaggtgcttctgcagatgtggctctctctagttgtctggctgtaatatatcattcattctcatacactcatttctcatataaaatccttataactattagcagtctaagcctgcagacattgctgaagctggttccctttgatattgttttctttgtaacagtttcctgtttggtagataaaataacaagctcacactattaggtttgtgccttcacctccctggcaaagtaacatgctagaaaggttactaaacattagtggttcaaaatgagaagtctgtacattttatctgcttataggcgaatttaaactcaactggtttaaattcattgcttagcctgttgcatgctccattgaaaacacaaacaaaaaactccatgattcttctagccatgattcttctagagtttgttatccagtcattccagtgccagaatccatcaggcagaacagaatcattcgcatttctcctctgcactggagagaagaggaaggctgatcatggaaaaggacctggtgaaggttttttgcaaatctaaggatcttttttctgtcttttatttttgcaaacctaaggatcttccttctggataattcccagagacgtcaactttgctgaatctcagttgttgggatttttagcaacctgttcccactctcctaagaaaaaaatcttaatagtgaccagtgtgtgcagactttaatttgtaagtgaaagttacggtgtttcaaaagttgcaggttagttggtagagcattaaatgcagttttgttcatagtcaacattaagtgcccactgtgttaaacactgttagatactgtgaaagagagaagaataaggtaaggaactagagagagagggtagatctttacaagagaggatgtttttcaggagctagaagaatacattatttatgtattcaaataataaagggaaagaaagtacagacagagtagataggggacatttcttgtaggggatccaggaggacttcacagaagaagtattatttatttccattaatgaatgagagtattcatcttctcatagaagaagctataatgattctatttgtggtcctgactgccacaccccttatgatcattaagttaattttagaaccttgggagggacagctaggaggcagaggctctcgttgctggccagctgccattgtcagtttgagaagtctccagtagtcaggaggtgacaagaggattggcccagttattttattgcagtttaatttcgtgaccctttcttgagtctctgctatgtattagaaccactgtgtagagactaggataaataaaacggtatctcctccatttactaattaatggagggtataaacacacaatacaattaagtataatataaggcagaggctgggcgcagtggcttacgcctgtaatcccagcactttgggaggccgaggtgggctgatcacctgatgtcgggagttcgagaccagcctgaccaacatggagaaaccccgtctctactaaaaatacaaaaattagccaggcatggtgatgcatgcctgtaatcccagctacctgggaggctgaggcaggagaatctcttgaacctgggaggtggaggttgcggtgagccaagatcgcaccactgcactccagcctaggcaacaagagtgaaactctgtctcaaaaaaaaaaaaaaaataaataatatatatgtatatgtatatgacagaacagtaatgggatgtagaggcgtaaacaaaaggctgtggaagcacggaggaggaagccattgacatggtgttttctggtggaaatcagttaagccttcatacaggaagtaatatttgactgggccttgaaaatgagtgatactttaaagatggaaaagaaaggaaaaggcatggtacagagaggaaatagcatgtggaaggcatgtaaacacaggatgtgaatagtctagtgatgctagcatggccagggataaattggaaacataggatggagctgggttgtgaagggccttaaatgacaatgctgagatgaagactcttctgtaagtagaagggaggcagcccatgttttttgagcgaggaggtaacaggatctggtttgtgtaactttgtgctatgaatggatagcttaggggaaaatgaaataggaagtaagcaatagcatcagtcaagctagggatgataagagtatgaactgcagtggtagaaatggaaatagaaaagaggaggtggagtcaagacacatggagttgaagcagtaagagttttattaccaggttgaaatgggaaacgagggagaaaggacttgaagatgactccagtgtttctagtaacacaggtggtgatgtcactaatgagggtaaaagcactgaaagcgcaggtatgactttggaaaatggtgggtttgaggtgtttcttcccaagcaagtattggggattcatgccaagaacttaagagtggtaccagggccagacatataaatttggggtatttatatcaaatgctggtagaagtagcgagattaaaagagttagccctgagaaaacatagagcaaggagaggcagttaaaatcagcagagcctgctgaaaaacaccttctgtagaaggtagaaagaaggaaagcaaatagcaaaaggagagttgtcaacaagagtaaaactggaaaagagagggacgggtttcagagagtaggtgggtgcttaacattttcagatgctgtgatttcagggagcatggtgtccctggggcatgagggatttctagcctgtcacatgggtacacatacataaataaaagcatttctacaccagagactcaatcctttggccagccatccttgctcattgtcttagtgtagctcctgaagactcatccctgctacctcccatctgctgcgtcttgtagcagtaggagagggagagaagaagggaggaaaattgaagcacaaggagagttaaaattaaaatgtaagcattcttgcttcagtttgtaaataagttgcatattcttccttttgaataaactacttaattataataatgtcactttgtctaatttttaaatggtcatagatgtgtttgtcataagaagtaaatataacataaaaattctgggtccaagccaaaagaacaaagctggaggcatcacactacctgacttcgaactatactacaaggctacagtaaccaaaacagcatggtactggtaccaaaacagagatatagatcaatggaacagaacagagccctcagaaataacgctgcatatctacaactatctgatctttgacaaacctgagaaaaacaagcaatggggaaaggattccctatttaataaatggtgctgggaaaactggctagccatatgtagaaagctgaaactggatcccttccttacaccttacacaaaaatcaattcacgatggattaaagacctaaaccttagacctaaaaccataaaaaccctagaagaaaacctaggcattaccattcaggacataggcatgggcaaggacttcatgtctaaaacaccaaaagcaatggcaacaaaagccaaaattgacaagtgggatctaattaaactaaagagcttctgcacagcaaaagaaactaccatgagagtgaacaggcaacctacaaaatgggagaaaattttcgcaacctactcatctgacaaagggctaatatccagaatctacaatgaactcaaacaaatttacaagaaaaaaacaacaccatcaaaaagtgggcaaaggacatgaacagacacttctcaaaagaagacatttatgcagccaaaaaacacatgaaaaaatgctcaccatcactggccatcagagaaatgcaaatcaaaaccacaatgagataccatctcacaccagttagaatggcaatcattaaaaagtcaggaaacaacaggtgctggagaggatgtggagaaataggaacacttttacactgttggtgggactgtaaactagttccaccattgtggaagtcagtgtggtgattcctcagggatctagaactagaaataccatttgacccagccatcccattactgggtatatacccaaaggactataaatcatgttgctataaagacacatgcacacgtatgtttattgcggcactattcacaatagcaaagacttggaaccaacccaaatgtccaacaatgatagactggattaagaaaatgtgtcacatatacaccatggaatactatgcagccatagaaaatgatgagttcatgtcctttgtagggacatggatgaaattggaaatcatcattctcagtaaactatcgcaagaacaaaaaaccaaacatcgcatgttctcactcataggtgggaattgaacaatgagaacacatggacacaggaaggggaacatcacactctggggactgttgtggggtggggggacgggggagggatagcattgggagatatacctaatgctagatgacgagttagtgggtgcagcgcaccagcatggcacatgtatacatatgtaactaacctgcacattgtgcacatgtaccctaaaacttaaagtataataaaaaaaaaaattctgggtccagctgagtaggcttacatgtgtttcctgattctaatgtggtcttaacatcatccagtttcatttgcattcttttttttttttggagacggagtcttgctctgtcgcccaggctggagtgcagtggcgccatcttggctccctgtaatctctgcctcccaggttcaagcaattcccctgcctcagcctcccgagtacctgggactacaggcgcacgccaccacgcccggctaattttttgtatgttggtggagaggaggtttcaacatgttggtcagaatgatctcctgacctcgtgatccgcccacctcggcctcacaaagtgatgggattacaggcatgagccactgcccccaggcccatttgcattcttaaaggaacaagtaccactcgctttattctgcctaggtttatgaagggagcagtactatttttgctgacataaactgatcatgtttatatttcagctcatctatatctctgtttcactattattgttttaagtgtctggctatgtggtttctaaatgttctctttttgcatttaatattcagacaatgatttggaatctttagtgactagagactagtgtttgctcagttataataaaaggttacaataatacgaattatgtccatttgcctttctagattttggtttcagtaacctcttcactcctgggcagctgctgaagacctggtgtggcagccctccctatgctgcacctgaactctttgaaggaaaagaatatgatgggcccaaagtggacatctgggtaagtaactgccttctcttataccccacagcattagctacccttggttgatgacagctattcgcatcctgaaggatacataatgatgcaacatgaattgagatcctggtcacctgttctttcaagtcccaattcctgtgcaaagcctttttttttttttttttttgaaacagagtctcactctgtcgcccaggctggagagcagcaggatgatcttggcacactgcaacctccacctcccaggttcaagtgattctcctgcctcagcctcacaagtagttgggattacaggcacaagccaccacacttggctaattttttgtatttttaatagagacagggtttcaccatgttggccaggctggtctcaaactcctgacctcaggtgatcctcccgccttggcctcccaaaatgctgggattataggcatgagccactgcacccggcctactcgtgcaaaatctttcctccaatacttaccttgtggactgagccacatatttcaaatttcccctttgcatttgcaaaagaagcccaagggccagcttggatgggggccgttgccaagaagagagattatttctactgtggccacttaccttatccccagagaatgagtactgagaaaaattcaggatgttaccctaaattaatgcctagaagcaaagaagattgttaactgttctaagatggaagaaaaagtttgttccataatcgtatgcatgactcaccatcatctgcatacacacactacagtagtcttttttgtttcccctgatgtgattaattgtacatcctctctgtttgggatgcagagccttggagttgtcctctacgtgcttgtgtgcggtgccctgccatttgatggaagcacactgcagaatctgcgggcccgcgtgctgagtggaaagttccgcatcccattttttatgtccacaggtaagggagtcgctagcacacagctatgaatgggttcatgaaagttagacccactcagttatcccaggaatttagtgatggagtataaatggcccacttacaaccttttttaactccagcttgctgacctgatgcctccaggaggcaaggttctgtagaaacagtatataggttttggcatcagagagccctacttgggtttgaatctgggccctaagtctgtctcagctttagtgtcctcatctataaattggctgagagttttgtgagggctgctattactgtaaggattaaatgagataatgtatgtgaagactcagtaggcccatggcatagcagtaatgcaataaatgcttttgtttcacttctgtcttcctaccctttttcaggatatttccacttattgggttctcattgcaatgtggttttaaatgccaaggataaagtaggctttgcatcttagtcttgctactgcttcatttcctatttctgtgctctttgtcctccagaatcaaatttaaaaaattttatttaacgagtgggcagtaaggtaggcaggtcttggaaaaatttaacaccgaaaatagatacaagatactcagaattaacagtattttatcaccatttatttgcacataagaagggaacattttagagaacgcaaaaagtcatatagttttgcttaatcatctgttttcattttaaggaagaacatgtgtccactgggttgacaacaaggtagaagcccatggtaattgcattttagaacaaagaggtgaaccttggagtagatttaacttggctcctttgaactgataacgtcatagtgtagaagatagtgctaaatgctgtgggacaaataaaatagagaaggagttaggatagtggttggtaagttacatgaaaaccccttcatggagaaagggacctttcagcaaagcctgaaagaaggtgagggtgaatgctgtgcagtccggggaagagcaccccctggctgttgaggggtcagcgcagaggccgcggggatggagcatggctgcatgtgaaggaacgggaaggaggcctgcgtgcctggaaggaaggagcggtgagagatgaggaagagagatgaggtcagagaggtaagagggagcttaattttagggcctagttaatgtaaagactttagattttactgtgactgaagtatacaggattggagggttttgacaggagtgatgtaatctgagttttattttttccaaattttatgatgaaaaatttcaaacatacaaaaaaattgaaaaattttgcagtgacttttgtttaaaaaagatcactttggctgctatgttgccggtaggctaaaaggtacaaaggctgaaggagggacaccagttaggaggagacttttacaatagtccagataagagatgttggtggctggttcccagtctggggtgtcgagatggagatggtaagaagtgatcagattcaagagatgctacctaccatgtgtggcaggcactgttcaaagcacttcacaaacattaactcacttcattattttaacaaccctatgagatacacaagattattgtctccattttactggtgataaaactgaagccaggagagattaggcaattttcccaagataacactgctaccaagtggctgaagtagaatttgaacccaggtattttggctccaataacatttagtgttggatttgatatgaaagaaagactccagagtttctatcctgagcaaatggaaggatggttttactgccaactgagatggggatgactggggaagaatacttacattttggagagatgttttagacatgtcatgtttgaggtgcacattagacatcagagttaagatatgaattggcagtcgcatttaggagagaattctgggttggggatgtatgtttggaatccccagtgtatagataatagttaaagccatgaggtgagctcactttttaggcagtggttacagagaagagaagaggtccatgaattaaactctggaacataccgctatttagagaacaagcaggtgaagaggtatcataagagttgctggtgaggtaagccagagggcctgctgtcctaggagacaagtgaagagactgttcccaggaggagggaggagggagtgaggagctgtggggagtgaatgctgctgccaagtcaggtaagaggactgagaactgaatgttgcatttagaaatgtggagatcgttaatgattttgtttcttttttatccccccacaccctcaccttcctagatcattaatgattctgaagtacacttttggcagaggaacaggagcaaaagcttaatcatgtggttgcaacaaaaaaggaatagaaggaaaatagacgacacgctctttccagtttactataaaaggaagcagagaagtggtccagtattgctctggccagggtcaccagtgatctcgttattgatcaactgcatatccttagtctttttcttaatcactgcccagcagtgattaacacttcacccttgccctccctccctctctcctttcctcccttcctccctaactcccttttttgggactgggtcttgctctgttgctcaggttggaatgcagtggtgtgatcgtggctcactgcagctggacctcccaggctcaagtgatcctcccttagcctcccaaatagctggagctgcaggcacacaccactatgcctgactaatttttttttttggtagagatggggttttgccatgttgtccaggctgatctcaaactcttgagttcaggcgatctgcctgccttggcctcccaaagtgctgggactattggtgtgagctactgtgccctgtctctttagagttatatgttagagcagctttagattcacagcagtattgagtggaaggtacacagtttgcatgtaccctctgtgctgtcctgcctccctcccctgctgacccctgtcataatcaatgtgccccaccagagtggtatgtttgttacaatcaatgaacatgcattgacacattatcacccaaagtccatagcttacatttgggttttctctcagtgttacacattctgtgggttttggtaaatgtatagtgacatgtattcaccactataatacatataaaattgtttcactgcccccaaatcctctgtgctctgcctgtttatccatttctccctaaccccctgcaactactgatcctttcactgtctccacaagtttttccttttccagaatgtcatatgggtagaaacatacaggatgcagccttttcagattggtgtttttcaaatagtaatatgcaataaggttcctccatgtctcttcatggcttgagagcccgtttctttttagcactgaataatatttccttgcctggatgtaccaccctttatcctttcacctacggatgacttggttgcttccaaattttgacaattatgaataaagctactgtaacatctttgtgcaggtttttgtgtggacataaatttttaattcatttggttaaacactaaggagcacaattcctggatcatatggtaagagcatggatagttttgtaggaaactgccaaactgtcttccaaagtggctatgctattttgcattcctgccagcaatgagtgagagcttctgctgcgccacatccttgtcagcatttggtggtgtcagcattttggattttggccactctaataggtatatagtgatatttcattgttgttttaatttttaattctctaatgatgtatgaggatgagcatcttttcttatgcttatttgccatctatatatctttgttgaggtgtctcttcaggtctattggtcgtttttaacttcaggttgttttattttcttattgttgagtcactcattacattttaaaacactttttctcattgcttctgagacgccatattctccagttttcctcctgtcctctggaagcaccttctccatcttctctaccagacttatttttctctgctcatcctttagatcttttcatctttacaacatctttctggagccatgttatttactgctgtagcttcactgatcactgtggtgatcagtcctcagttaactttttgtcccagacctctcgatctagggcgacatatccaagtatttgctaaccattatcttcactttcatgtattgaagtcagatcaatggagacatattcagaaatgaacttgacttccccctccctagatttgctctattctgtatttgctgccttagtgaatagcatcaccatctgaccaaggccagcacaagccttgatgtttcctctctcaccagtgccacagctgatcagttaccaaatcctgtcaattcaaccctccattcatgtaggcacttctaagaccatactatcatcttcccttgcctcaattaaacaatagccaattatatggattcctggctccagtcttgtccccctctaatctattgtcaactttgctacatgactaatctttccagaacacaaacatataaataaataaaacataccacacacacacatacacgtacattttctctctctttctctctctcttacttaaacacacaaatctgattatatcattttctagcctgaaacttttcagtggtttaccattgcctctaaggtaaagtttactccataaggtggcaaagcattggcttacaaacatttttggctatgataagaaaaaagtacattttatactgtgacccagaacacgcatatatagatacaaatgaacaaaagctttgtttgcttgatttagagatggggtcttgctattttgtccagactgaactcgaactcctgggttcaagtgaccctcctgcctcagtctcccaagtagctgagactagaggcgtataccaccatgactgaaaacaaaagacttttttttgagacggagtctcgctctgtcacccaggctggagtgcagtgatgtgatcatagcttcctgcaatctccagttcctgggctcaggcagtcctcccacctcagcctcccaagtagctgggactacaggcaagcaccaagcaccatcatgcccgtctaatttttaaacatttttttatagagatggactctctctctgttgaccaagctggtcttgaattcctaaccttaagcgatcctccctccttgacctccatgagccactgcgcccagccagcaaacaatttttttaaaaaagcaaaacttaccttactatgtacagtgcatttcaatatattttattctattccattttaaaaaatgctgatttcgacttactaaattgatctcctatctgctatttcagaaacaatgacatagaaatacctttataacctgactcctgcctagctcttcagccccagctcccactctcccaccagtcaccctaattttcttctcgttccctgaacaagttctgttttctggagcatttcccactgccgagaatacatcttccctatcccaccccactccacccactcctgtattctagaattcagaataaaaaaaattagattggatagaaataagaatctagataatttctattcactcttcatgtctctaaactttctcttatcgtggtgcttaccaagctttatattgtaactacttctttcattgtatgtcttccacaccagactgaacttagtgaaagtacagacgaaacatgtctttttcacaactgtcaataacctaccacaggatctggtgtgtagtaggacttagtaaatatgaaatctgaatcagaaccaccccatccccagtggcatttgtttacattcagaataaaattcaaggagtcattattactatggcctacaaggcacagctgtcattgccccttctttggtctcatttcctgttactgttcacctccggttctgagctccagtcacagggccttccttgctgtttctcagacttgccaaacacatacattcccctcagagaggagtcataggtcccctcagagaggcctgtcctggctacccccatcattctctttctgtaattctgctttttcttcatagcacttactttattgtctcctcacctcctatcaccacttgaccataataagcatttggtttttgtttactgttatgttcccagggctttggacggtgcctgagttctagtaggcactcagtaaatatttgttgaatgaattaatgcatagggttgttcgaacactgactccaaaagcccctctggagagtagtcttatccaaatcataatatcagtagtaatatcaaataattacatttgtttagggcttttgagtttataaaataatttcttttttaataggtttattttttgagacaggatctctgtcgcccaggctggagtgcagtggcgtgatcttggctcactgcagcctccgcctcctgggcccaagccatcctcccacctcagcctcctgagtagcttggtctacaggcgcacgccaccacgcccacctaatttttgtatttttttgtagagatgggatcttattatgttgcccaggctggtcttgaactcctggactcaagcagtccgcccaccacggcctcccaaagttttgggattacaggtgtgagccactgcacccagccaatatattttttaaaaatatttcaatttttcagtttttatatttttggcgacagggtcttgctctgtcacctaagctagagcctagtggtatgaccatagctcactgtagcctcaaactcctgggttcaaacaaccctcctacctcaggctccaaagtagctaggactataggcctgtgccaccattccaagctaattttttaaaagattttttgtagagatgagtctcactacattgcccagtctggtcttgaactcttggcctcaagcaatcctcccaccttggcctcccagagtgctgggattatgggcagaagccagcatacgcaacctaaattattttcttttacttaatctaatttgagctacataactatattttagaataggtaatagcacatattttatcatcttgctgatgaagttttggaagctgaagtttagagaaatgagttaacttgccaaagccacacaggtaataagtaactaggtcagtattcaaatttagtgtttgttttactacaccatactgttgcaaaaagagcaagataaaccacttcctttacttttccaatgtccacagtgtttcctgtgagcaacttggatcttttctatcctccacccccatcacctcacaccatggcaagagattcttactgaacccttcccggagccggcttcagatagggggtcctagaaaacagctaagcatgctgtcagccacactgtctattagtgcttagaaataaactaacagtctaactgcttagaactattatttgtaatatgatgttagttaacctgaaagcttcaagactcagagaaagccaacaggattatcctaaacgtagtcgctctttaatcccagttaaataattccctaagtagcaatacaagtttttgtatgattagtacagagaatgagaaacaaccagggtaggaagtcagtagatacttgctatattaccaatatgatctctctggcccttggtaatatacatgtgcttggcattgctgaatgtcataggcctaaatcccaaggcccattagagaatacttcaaaaggataaggcatagcagaaaatgaattcatcggttatttaggcttttcttagcttagacaaccttcaagtaccagaaagtgtcaggtgaaggaagtttagagtctgtcccagagtcctttttctgcttacgcctcgtgtttctgggcacagttgtatctcagtagacctggagcatagtcttctgatggaggcgagtgctggctgcttttcagcctgtgaggccagctgctattgctgtattacgggagatagcgtgattgagagaattccttatgcacaagatccttccttttctcagctgttgtcataggcttgagctgagtttatctgtttttcttcctgaagggtctagaaactccagcagagctggtatagtgttctaaatgatcacttggaagaccagagggcaaagcctctaccatgtagctgcttctagccaagttgaattccagagtagctacatacagctgtgtgggaggccatgctctgcaaatggatatagttagctcaagaattctaagctgctctctattgtcagtaatgtgtggaatgaagtatcctcacaattcatgtatatttctatgcctggtgttgtttgtttgacacaagtttcctttcataggcatcctgagatgtactaaagacatatattttcaagttggaatgacagtggcatacatttaaaagaggatttatttgaggctaggttgattgtataccacctagtttttataattatgtatgtgtcttcctcctctccccactagaatgtaagcctcttgattatcagagctgtgttttacactcaataccttccataaaacctgacagcccctggtaagacataagcattcagtaagtgtttttgaatgaaaaactgagtcatcactacttaactatggaatcttatatcagactcttgtttttttttttttttgggagacagattttgccgcccaggctggagtgcagtggtgcgacctcagctcacggcaacttccgcctcctgggttcaagtgattctcttgcctcagcctcctgggtggctgggactacaggtgcgtgccaccacacccagctaatttttgtatttttagtggagacggggtctcgtcatgttggccaggctggtcttgaactcctggcctcaagtgatctgcccgcctcggcttcccaaagtgctgggattacagacgtgagccaccgtgccctgccagactcttgtattatattattaacatgatctaaattatttattcatcaaaccacttggttttatatactttttttttttttttttttttagtgtagagacaagattttcatcatgttgcccaggctggtcttgaactcctaggttcaagcaatccgcctggctctgcctcccaaaatgctgggatcataggcgtgagccatcacgcccagccatggttttatgtagttttgttatatgagttattgtgaaggtgaccaagtcaaatgacttttaggtgtaaaagggtgttttgatctactgtagagtttgcttcctattccttaagtaaaataagtttgatccaggccagtgtttttggattaaacttctcagagcatcccaaagagcagtttgataaaaccctgagtctaaattatagaaggattaaaagttgaaacttgctgttttcttgagctgttgtggaaggtgaaacctggcctggcttcatgtgttggcaaatatttcctctgatctgcccttccaccgatggatgcaaataacttaaattttttgagcaccagattcattcaatatatttttttaacaacatacttaaagcctagtttaccctattcccctgttgtaccacctgctagcagacatactaagatcgtttatttaactgaaggaaaattaatttacagtgaaaaaactgcagcgttagtgaaggcatagagatctcttgtggacaatatttttgagtctttattgattagacttcattgtgacttaattaattgtaatactgcatgagcattttattactgggaacgcaaaacccaggcttacataatgcttctgatggagaatgtaacctgcagctactgccaaaaagcttctacttagaggcaaacaactctgccctgataggcttactcatcaagaaccacacagcatcttgcttggctaaaagcactttgtttagaaccaatggggcaagggattaaattggctcacccaccaagtctccatataccgaggggctcagagtcctcaaagcagttttctcataccttttgagacacactgcaccgccagagagaaaaatctatgtagtgctttcatgtcagtgaatgtagaaatcacagctgatgtcagaaaagaggttaagaactacttcagagtgaaacaggccagccgtgttcattcccatgacctaacataactaaaaaccagtagataaatagtggtactgccctatttattattagccttttcaaaccagctgtctcctggcttatggcaaccctaaatagaaaaataaaagaaggacattccaagtggaaggacttcagagatatggataatagtcaacatttattgaccactttctatgtaccaggcactgttgcattaccttatttaatgttcagaacaactgtctgaggtaagctgttttatgaggtaaactgtatgagaggttatttgataaataagaaaactgaggcatgataaggttaagtaacatgcccaagatgcacatctagtaagtggcaaagctgagatttgaacccaggcagtctggcttcagagaccatctaaccatatgtgtttgtattttcattctcaataaatacatagtaagttagtccaagaatcaagagagtcatagaatggatatatttgtctgcatcgggattacttactgaaaaacgagtagcaggaactctgtattggacctggaggcagaattttcttaaactgtaatgactgatactaggagtcaaaagatactagaatgtaaaccacaagatggacagcctcctgtaaaacagtatagcaagccaggatcttttcagggttgggctagagctaaatcttggcatccctaccctttaggccaggatttcctgatttctgaattttaattctggcagcatcatgcccacctagaaaaactgatcgaaagtaaggaagttcaagaaataggtgtcatttttctaataaatggatatacatgggtcaaaaccttttctttgtggtctgtctcgggttgataaacttggtaaaactgaagagaaaagcctctcagtgcatgtttattgattcctaaagaaacttttcttatgggctccatctctttgcgaaagtgttccaggccatctccctatggcctctatgttcagtcactgaaagtgtctcacagaatttagagatataaagaactttatttctattccaggatattctgattacaataatttgcagaaaccactagggttggaatttatagttaaatggataattctccaccttcttttctgatatcttactgttggaatatcatttttgaaattttactgaagtgtgggacttccatttttcttcccccgagcaactgaaaataaatgtttcaaaacatgacagttttttcttagtgccattgtgtcaagagaagctaatctcaatgcttattttttatgagtcggatcttactgcagtcagtgctgtcataggttaagttccaaggttgtgtattttctttgtttgtgtaaaactgtggcattgactacatccttgtcaggcttggtggcatgcacctgtaatcccaacaactcaggaggctgagatgggaagattgtttgaggccgggagatcaaggtggccagcctgggcaacatagcaagaccctgtctctaaaaaataaaaataaaaaaaatagccagatgtcactttgggaggccgagatgggcagatcacgaggtcaggagatcaagaccatcctggctaacacggtgaaaccccacctctactaaaaatacaaaaaattagctgggcgtggtggcatgcacctgtagtcccagcaactcaggaggcatattatcgtttatgaggcaggataatcatttgaacccgggaggcgaggttgcagtgagccgagatcgcactgctacactccagcctgggcgacagagcgagactccatcaaaaaaaaaaaaaaaaagccagatgtggtggtgtgtgcctgtagtctcagctactggagaagctgaggcaggaggatcacttgagcccaggggttcgaggctacagtgagctatgattgcacccagcctggccaacagaatgagactccatttcaaaataaaaataaataactagtcctttaacttggtatttagaaatgtttatttctattatagcagtaatatgtcaaaatttaatgtatagaataaaagcattccaatccttataacaccattgttctagcagtacccaaaataacaaaatttcagtgcaacaacaaaatccctgtattttgtattattatagttaacatttatacaatctctgaatgtatctataggttagcacatttactgtatgttatttatatatacaaatgtcattttttttttttaagacagagtctcactctgtcacccaggctggaatgcagtggcacaatctcggctcactgcaacctctgcctcccgggttcaagtgattctcctgcctcagcctcctgagtagctggaattacaggcacacgccaccatgcctggctaatttttgtatttttagtagagactgtgtttcaccatgttggccaggctggtcttgaactcctggcctcaagtgatctgcctgtctcgggctcccagagtgctgggattataggcgtgagccaccatgccgggcccaaatgtcttattttgaggaccatttgtctatttgtttacatttttaaatagtgactatgttaaataaataggtttgatcttagctggcagttgacattgacagtgtttcttgagcgtattaataaaacatcatttttagggcttagtccacaagcagagtgaagattcctaactctggctggcttcttagcaaaagaaggtatcttggcagaaaacacccctggtttcttattgatttactttttaattatttctgcagggatcatagcactgcaagatagtcacactgttctgtccatgttataacaagatcaggacattataacagactttattttcttttcatgaggaaaaacagcatgttttgtgtgcagtttgtcttttaggaaaaggcaggcagcattaaagaggtgctctgagacaaacattttttaaatccagaacatctaaaatacagggatagactcttatcaaagccatgtggctccatcctgagattgctgttgcaggccatccattggtcttgttctgtttgctataatagcatcacttctcccccagggctggtacccgagctggacaaagtgagtggataacagcatcaagcagtgtattgcatagcatccttgttctgaaaactttaagactttaatgtcatttaacttttaaaaggtttttgtcaagtaattcattttccatagaaacatgtttcagagatttaatcgccaatttatttttgtttcctttttagattttgaaatttagaaaaaatagaaccctctttgaagtgagaattgtgccagaagcaattcattactaagaagtaaacatttttaagaagtttgtttaaattattgaaaatatagaactcttgggctgggtgctttagaattacctttgaacacacctaccattgactggaccaagtacataagaaactagatcatccccttcttctgagcacctgtaagcagcatgcactttcttgcctgcaagaaagcctttctgtgccttctggtacacagatgtcttctgtttccaccagctcaaagcagctttatgtggtcagaaagaatccatgactcagtttcttctatgccattgctcaccacagagctggaaaggattgttttgccatgttctgttctttggtgtcacatgcagggtttcagggacaaatggctttccctccttcataggatcagcctgaagagtctgatgatctggttccttaaatttttacctatctcctcttatctttgatccttgattcgggaagccttctgtttcaagccttccatcatagtcttcatcaccttgcaacaactagagtatataaataagtttgctctaccacagtgtatttaatcctcaccagcaaaattatgaataagacaacgctccccatttagtgttctcatgtccctgcctcattaatccatccaacttgccgtctccccttaaagctagttcttggtctttgcaccatctatttgcctggcccattttgtactaacctagcttgtgggtgattctgtcatgatggaacctgtgaagatgacatggcatctgatctgccagaggagagaattgttttggtttgttttcataacccagaataccaataatgtgtttattttaggtaccatgtaggttaagagctccctggagtaagactgaccagaatttgtattctgctttggcctcttattatctgatcaagtttctcaacttctctgattttaaattctctttgtctataaaattgagataatagtattgggttggtttgtgaagtagatgcttaaattaacttaaagggtttagcactttgcctatcatgtaaatggtcaataaatgttagtaatgattaaataatattgttgaatgaattgctctattagtctttcattctcttcttccctattttttttactcttttctatgtatctttctctcatttttgctctcttggtatgccaaagggacattactattttcagtcaaatccacacggcttatggagaagacttatctcccaagaattgttttggtttgttgtaaccacttagagaaatttgttttattatcaaggacaaaaaaaaagaaaaaaaatgttgctttcacagatacggactcacactggctatgtcaacttaattctcattttaggaccctgcccatacagcagctctctccccacaaagtcatccaaatgcctggcagcgcagcagggcaaggcctgtgctgaacatcctctagttaacgttctgttggcagatcaggtttcctgggcccacagtgactctcactgcggagaccgcttggcgtcttgcatggagcagatgaaagcagctctgaagggaagctgcttctctggcacacacaagcagaggagcatattcttgcattgcccaaagtggttcagtttcatttagcatcagaggccctgccttttgggtgggagcaaataatggggcccttttattttttatttatttatttattttatttatttatttttttagagacggagtctcgctctgtcgcccaggctggagtgcagtggtgcgatctcggctcactgcaagctccgcctcccaggttcacgccattctcctacctcagcctcccgggtagctgggattacaggtgtgtaccaccacacccagctaatttttgtatttttagtagaaacagggttttaccatgttggccaggctggtctcgaactcctagcctcaagcaatctgcccacctcagcttcccaaagtgctgggattacagacgtgagccaccatgcctggccaacagggaccttttagacaataaaatagagtagttcttggtatctggaaaagttgatgttttgtttaatgtgagggctccatctttccatgcttgtaaattgaatgtcctgtgggtgattgtgttcttaggtttgagagcatctattcccctcgttttcaccctgtttccatgttttatgtagaatggtgtcttcaaatctcatctgaatttaatttcatgaactacatgacacttaggaaatatgaattgatgatgatactctagctttctgcattttgtcatattttccatctgcaccacatatgaaaaatgttaaatttctgttccttggcacgttcgatattatgtaggatagtcaagattaaaaagctcttgcccttgacactgtaaccaagaattgttttggttcttaatctggggcctgtagacaccagggtctgggggatctatgcaggcttcataggacatcgttgagtagtctaaagttacatgcaaggtcttgtgtataaattcttgtgcagatttttttttttttttggagaattttcaaggcatctgaggccaaataatggttaaggatgactgaatagaggtttcaagatcctgaaattgaactagatatatcttctaattaggaattattatggtactgtttttggtttggttgtgtgtgtggtggtgttgttgttattgttgtttgcttttaaggaaattgccttggaaaaaatctgttttaaagcaagcctgtaactgaacaccattcagctttggtcatcttatgcactaaattgtgtgtggagaccaaaggaaaacaggagagtgccatctagaggccttaacaacagtttggtcctagccttctccctacacaggagtctttaacaacttcctaaattaagaacacttttgtcctcttaagtaactgcaaacgataaacatatgtgtcaatgacatttataatctatacaggtgctgctacagttgtggctctagccttactactctggaaatgtaattttaataaagcgtactgttgtagatggcatttactttattctataggaatgtagaagtctttgagatgtacactgcatttgaatatagttttaattgtaaagcaacaacaaattgatgcctgatgtaagaaatcattttgatataggaactttgttgtattatcttttgaagttagagtaaattaaaataagagtaatttatcttagttacttgtagtattcttttcacaacagtaatatagaatggtgtttgccaaatggtatagaaattgaagagttgaattcaccctagaaaagtagatcaatttatatccatgtggagatgtataatagggtagtcaagagcacagcttagaagtcccaactttaccatttctttgccatgttgaatatgttaactttcaaaatcttgtttcttcttcatttataagtggagctaattatagtctctaagttaaggttgttgtgaaggttaaatgtaataaagttggtaagcacagtgcttggtatatcaaaagtagttttttgtaataatgtcttactgttgttgttattttcactggccagttttgttttcaggacggttgtgattaaatagaagcagaaaatttaaaaacctatagaaaattttattttaaaaaaattttcacaattacaatctcatttgattaaatactcaacaaatatttatttacatattcagtagatatttatgcagctcctaagtgtctagatataataaccattttaggtactggagagttgatactgggtacaacagaaagaaagacatgggccttgcattgcagtggaggagtcagacaataagtaaatacataaacaagatggtttcccaaagaaatcatttgcgtgaagacaatgaatgtgatgtaatagagagtgactggaggcccatcttagagtagatggttaaagaagagctttctgaggaagtgacgtttaaactcttacctgaatgacaaggagccaatcatatgaagatctgaggaatggccatttccactaaaggaaaaaacaaacaaaaaaacacatgtaaaggccattggatgagagtgtgttaaacatgtgcaaaaactagaaatgtgcatagtggcaggaaaccaggtcagagagggaagtagggggccaagcgcggtggctcacgcctgtaatcccagcactttgggaggctgaggcaggcggatcacttgaggtcagttgttcgagaccagcctggccaacatggtgaaacctcgcctctattaaagatgcaaaaattagctgggcgtggtggcacaggcctgtaatcccagctgctggagaagctgaggcaggagaatcacgtgaacccaggaggcggaggttgcagtgagccgagatcgcacactgcactccacagcctgggtgacagagcgagactctatgtaaaaaaaaaaaaaaaagggagagagagaagtaggagccttggaggcccaggactttagatttcattctgagggttatgggaagagattggagagttacaggcaaagtggtgatatgcccaaatttatgctttggaaaaattccttttgcctctctatagaaaacagattgtaatggagaaagaatggaagcagaaagaccgggtaggagacttttgcagcgtgtaagtcagaaatggtggcttggataaagatgttgaattaatggttcagtgctgaattagtgttgggggatttggatcccccaacaactctgcaccacaggggcagggtagcattgtggttaagagaaccaggtgaagagtcaggctatctggtttgacttaatagccatgtgaccttgacaagtttctttacctccctgtgcctggtttttgctattcctaaaatgggaacaatgatagtacattcctcctaggattgctgtgtagattaaatgaggaaataataattgtaaaatgctcagaagatgcatcaatagtgctgttttggtatcatcatcactgccttcatcacaactattactctcatcaccctcagtagccacattttatagatgagaaaacttagagggtggttttgaaatcagaatatacgtttcttgattttgaatccattgttctttctgcaatgtaatctgtaatacgagctcccagagaaaaatttctatagatctgaatatctgtagctcacagcccagttttaaatacctatgactatttaaataacattgagaagaaaatgataaataaggctagctgaatcccagggcataggagagaagtagcctgtggctctctccccacacaccttgtgccatcagaaattcaagttccctgagttttgaagaagggtattgcacacctaagccaaaagcattagtatgcgcgtggtggtacatttaggaggatagaactgaatattttgagaaccttgtaagatactgaatctctttagaggccattctactcttcattacttgtgttaaatagggccatatacataatataaataaatgaaatccatggattatccccagaccttttctggtcagccttttggtgaaggcaacaaccagactaccacacttgagtttctttttctccacctctctctgcctttgcttagccccttctggtggcataagcaacagaataggtaaggatcaaagagcaagagagacaaaattagaagcagggagttggatagcctccctgctggctttgcccctggttcctctactcccctggtgcctcccctcaccagagactgaaggcaggctgtttgtccattgcagaatgtgagcatttgatccgccatatgttggtgttagatcccaataagcgcctctccatggagcagatctgcaagcacaagtggatgaagctaggggacgccgatcccaactttgacagggtgagctgggaaccgctgctgcaggggactcctctgaaagctgctgcagcctcctttgcatgtgattgtaatcaggccataacctgaaaggcggacactgggaacaaactattatgtaacactaaagcagcacgtgaagcaagcaagaaggaatgtaaaaccagttaaactgctggagaatagtgatcatggttccctaccatgtgtccccaaattatcgtctgtttttggcttttgagatagcacagcctgcagttctgcagcttacctaccatggggatgtcgccttcctcttgtcttagtgtgctcaattcagtggcttctgtagcatgcttttatttaaaccactatggccatgccaggtatgccagggagctcaggaaacagtgagttgttgtctgtttacagctgatcactcagggctctcttccttagactttgtctgaggccaaaaatatcccaagccagagggcatggaacaggttggtcattatatatgctgtgccacatttgatgtggttaattggggggttgacagcttcctcctttttatgttacagttaatagctgaatgccaacaactaaaggaagaaagacaggtggaccccctgaatgaggatgtcctcttggccatggaggacatgggactggacaaagaacagacactgcaggtatctccgaaggagtggagaacaaagtgggatgtagcagttcctctaacctgctttttccatttttcgccttctcgggaacttgggccttttttttcctcctgtttttcttcctctgccccttcctgggccttggaaagaaggaaagaaggtgctttggctaatgttattactgaaagggttctggtcatcaacatgccatttcaccagggttttgtactcttttcccttctctcttggtagtcattaagatcagatgcctatgatcactatagtgcaatctacagcctgctgtgtgatcgacataagagacataaaaccctgcgtctcggagcacttcctagcatgccccgagccctggcctttcaagcaccagtcaatatccaggtgggcaataactccagtgacctagttcaggacaagtaacaccaggggggtaaaggttagctgttgctcactaaccctaagtcgagagtttcttgctcttccttacctctgtctcctcccatttgtcatctcttcctttgtcagaggccaatcaaagatctgaaccttttttgatggagaggagggatgagcaacaatagttgtgccttttgtttttttgaagaaatagcaaatcatgaggcgatgctatcctcttcacaggatgcttccttgttgtgacttctaagggccgatgaaccaaaaactttagtaatcagggaaacatagactttagcaatcaagactacttggaaagactcattatttctctctagtgttaaaggtatgcgtgtatatgtatgtactgctttccaggcggagcaggcaggtactgctatgaacatcagcgttccccaggtgcagctgatcaacccagagaaccaaattgtggaggcaagtagcaacctgtgggagctgtcagctgaaaccactttctttgccatatccttgcttcccttccttctgatttctaactcgatggtgtttccctccacctcagccggatgggacactgaatttggacagtgatgagggtgaagagccttcccctgaagcattggtgcgctatttgtcaatgaggaggcacacagtgggtgtggctgacccacggtgagtatccggccaacagccctcactaacactggggcaaagaattgtcacctgactttcagtgtctaccatggcacatttcctactacattgtatccccagaggagatctaatccagtggccaagtggacaaatgatatgatgtaacttatgtatgtagacaattaaaatttaaatgaataaggatccaaaatccaataacaacagtttcccaaagtgttttcccaaaatagtctttcatgatgttccctgctgcctgcacactggaaaaaatggactgaaggccagctcgccccatttttgttccacggttgaagactctcaacattaaaatagccttacctcttttctggattttttctttgctgagtaggaagagaaggttgtgggaagaattctcctgagaggtcaaatcagggcaaagctggttttcttataaatatctcttttcttccagtgaatttccaaaaaagactcccatgcctgctgatgtgcttgctttatgtctcttgttctcagcctatgatcaaataggcaataggggaacattctggctccacagactgagatagctttaaaggggtggagccctgagtcgctctgttagtggaaagatgtcttactttaaagtatgctgtaaaacctatcattgtagcaagatagccctgtacatctagtacttatctgtcctatcagcactgacaagagtaattgcattctttccctggtgaatcagttgctacttcaggcagccattatcttagtggatggcccatgttctccagaaacttggtgttcacctccaggatttgaaaacctgaactggactggtgccactatttcctcttggctcagagctgttggttttacatgaatggccaataaagaatagcaatccttcgtcccaaatagtaaaggagcagagagttaaattccacactttaggcttttgctttgctttaggatcttaaagagaaacataaattcaggaagaaaataaaataagttgtactgaacatagcaatgccatcagttttgggatataagcacttttgagtaagaatgttaactaaacttctctgtcattctgttttgtatcagcacggaagttatggaagatctgcagaagctcctacctggctttcctggagtcaacccccaggctccattcctgcaggtggcccctaatgtgaacttcatgcacaacctgttgcctatgcaaaacttgcaaccaaccgggcaacttgagtacaaggtacctagacatggaagagggctggctccagaagaaacaaacttgagcttcctttgagaggctatgaggcaccttccctaggacttaagggtttacttatagagaaagatgatttatcttgcaaagtagctcgggtgagcgggaagcgtcctctagtctctgtcatgacccatggctcccttaatttccatagatgagtggcttgcccctttctccccgccttcccctcatctcatggtccgtcctccccactctgttcctggcaggagcagtctctcctacagccgcccacgctacagctgttgaatggaatgggcccccttggccggagggcatcagatggaggagccaacatccaactgcatgcccagcagctgctgaagcgcccacggggaccctctccgcttgtcaccatgacaccagtgagtagcagcacagagcccaattcactgtctcagaggcttttgataaaaaggttgtgagcctggggttgggaacccagggccaacctacatgtctgaatttcctttttctccaaacttaggatgctccagcccattttcttcaggccagtagagttttccacactttatttttggcgaacttacttacttagccaagttatttctacattgaactccactcctggagagctttttcctcaatgggcgctcacaggtaccctggttaagtccagctgcactcctgccagcttggggcaggtagcagcctaactcagagccttctcccaggcaacctttccctgccagaaggccaaagtgcccttaaattaattggtttctagactggcttccaaaattgccttttcactaatgctttctccattgataaacacacctcacatgtttggcataacctggatcacttgatgatttgctcccacagctttagccgagtcagttatcttagtcacatgtccttcatatgatagtcacattcagagattttttttctcccttgggttctgtttattttcctgtcataggtcattcattcattcatttattcattcaatctcatagtaccataagattgggtagtaaatatatccatcacccttggagatgttgtaagggcagtgctgctttgaggacccttttccctcctttaatccatcatgggttaatcccttgtaaaatatagtaaaagtgaaacattagaacagtgaaaatttaaacacatataaaatacaaggcattttttattgagttcaacagacaaaattactctgttaaattgctaaaagtgtctctttatttatttttttaaattgctaaaagtttctgaaagccttttgttgatttctgtacttaccttatcatgaattggtaacaaaacagtttgtgggcatgggtccatgggccacactttcagtaatgaaagaattatatatcatagcccttgccatcactgacaagatcaacatatgtgaagtatttgactaatagtacaagatcatatgtgattaagtaccacagtaataacatggaaaattaggtggcagaggcattcagagatgggcaagacaggtttggaaggatcatggtcagctttatgggacgtggggtgacttactgtgtctactgtaactgtttttgccaaggtcgctaacaagttcttgttgataaattcagtggacatttttaaccttttatctttttggacgtcccaactgtattaatcactgttgacttcttttttccttgaaatattttctgttcttggtgtctgtggcaccacattccctgtgttttcccccacctctccttttcacatttcctttctgcttgttccttgaggttggcaaaacccagagttttatcctaggccctattcccatgtcctttgatgtactctctctggatgagtttgtccactcctgtaatttcagttactctctgattctccagcccagaatgctcctctgagttctacacatacgtgtacatgactgcctatgggatagatttagttggttattccacaagtattcacaactttaattcagcatgtcccaaatgaacttaccatgactctgtaaaacctgctcctcctcttgggtgacagtgaatggcactgtcattctccgggttacacaagctagggatgtgaattttatctttaactcttgtctttcttatttgccatatcaagtcagttgtccagtgcctgtgaatgaaacatcctctccactttcctttccttaactcaggtcactgtcatccattgtgtagatgaacaccacggcatcctaactgacttctttgcttccagtcatgtcccctgatccctgccaccagcccttttcacactgcagctagagtaagctggcttttgcaaatataaatctttataacatcatgcccctgcttaaaatcctttagtgattcaccactgttcttcctcaaacttcttagtgtgttattcaagaccatttgtcactggccacagcgttcctctcctgcctcatctacagccacttcctgcctcaccctgttcactccacccttgtagaactgtgggaagggatccaggaaccctgggagctttccgacaaaattattccaggagtgttttgttttgttttgttttgtaattagccattttgtaaaatactcttttataataattgaagtgtgatttttgttctagtgactggggcatggtgatgatgtgggcacccaggctatgggtagctagcaaggatgcagatgggaaagtcacagtgatacaagcattgtggtggttctcatttcactcacatgttttggcgagtaacaactattttaaagcagtgaattgatactacacaattgtatcttatgtaccaaaatgtaatttcagtaattcactatgctttcctggagttaagacatttaaactccggaaatcacattaatatgaaacaacaggtcaagtcctagacatttcaggtaaacaatcttctactgtattttcgggtcctcaaacacctacaggccttctcttttcttctgcctggaaacctgtaactcctgtccctctttgcctgaccagctcctgtgcatccttcaggttcctgctaggtgctacctcctccaggatgccttccttaattcccaaacacccccattagaagacttgatcatgctattttgtaattgtttacttgtctctatcctctactagactgtaaaatgagggcaaggtctatgtctgtaaattcacattttatcctgtaacagtaagcatttggctatttgttagattaataaatgaatgaatgaagataaataagaggaagaaattctaattagtattacctaagcaaggtaaaaatggaaaaataggtatatgaaaatcctgtataacccaggagtctagaaaagttctgtaaataagaaagttaacagaaagtcctgccccaagcccagttactagagtaagaggcatgacagaataagctgccaccttgagcttttccttcctgtctctcttcaggcagtgccagcagttacccctgtggacgaggagagctcagacggggagccagaccaggaagctgtgcagaggtaatgtgacatctggcagtgcttgcagaagcccctgggcaggctcccctgcaaccagcgaaaggtcacctctgcccaaggaggtggtagagtgcagcttcaacatttgtgtggtctctttgctcaagccagatggcatgttccaccccacatggaagtaacagaagactacccagaaaatgtcatttctgtaagcaccattggaagtcccctaagtgacagcaataaccataagaactttttctttcctccctccttcttccttgtcccctgccttcatattgcaactctgatagtattcacaaggcacaaagcctgctcgtacctgccaagaactgtttactgaaaaggaattggagatgtgggatgacagtgatcctagctagtctggccatggacctctggcatggacttttcctttccaggagaatgaatacctcttgtactgtttgctgtgtgcttcttccacccccttgtaccaacaaagagatattgaaaaagagaatatgggattcgggccagggacagatgcaaatatccattgtttacagaaccttgttgagagatgcctaactcacagagaacggcagtgaccatcaggcatgctgtactgttcatttggcctcagttccgttagccctggtccttagctccatgcatgcccccttgtgggagttgattttcttattatccggggagggggtttcaccagaatccagcatgtattttcccagaaatacaggtgttcttcaagattatatgttttttcctttgagggaagttgaaataaaatggttttcatgggcttttggggaactttgggtgtctttatccaatggttattaaaacattaatggcttactctttggcaagttcacataacactgattactctacagtctgttaactgattttagctgaaaggggcaagatagttaagaatgaaatgagaccattttttaagaacctgccagttgctggctaggactctcatcctatccccagtagctctgtgtgagagctgctattcagaaagcagctggtcctatgtggaaagaaaaccatggcaaacaggggtgttggcaggtgggccagctccttctacagcttggccaatagaaggaaaattctggtaacttttttttttccttgatgctgttgtttctatagtttgctgataagagggtatataaggttacaaatgggccctactgggtcatgaagaaatgagaaatcaggaaatttactgcctttctaccttaaaagagacagcaatattttatcttctttgtcttagactttccttcctccaggtctaccttctttcttctttagaccaacatttcaagggtataatgcccatcagttttgatgtaataaaaaaggtgtagtgcctcttttattcatgcctccagaagagcagcagcggtggaggaagtcatccaccagacaaagagggacaatatcttattgatggtattaactaagtgctgggtctgaaagatcttccgaataaaagccatcagtttgggaactcttcgtcttgtgagactcttctgtttttattttttgccttgctttttccctccctaactaaacatttcatgtggttttatttcttcatcctccacagaatgttggttccccaaggacaacatcagtttttcttctctgatgattgagttatagtcaccaagcgagagggaaagggtggttttggaattcatttatcctcaaatggaaggatcagttttctgtgacctgtagtgaagaaagtctcaaacctggggcctgtgagatcgagagacatgcacagagtccttctgaatatctccccaggttcatctctaggaatagtccttagggctcatttcctctgacttgtattttggaaatttggagggaaaagatgaataaattaacatggagaaaataaattcttctaccgagtagaatgaagcaaggaaaagtgatctcatctttgtgagctagatctactttctctcttctcttcaatggctattcttaggttcaaaattcagccacttcattgtcaagccaacttctgttggccagttagacgtgtctcacttccatccaggcagggatctgtttgccatcaagccttcgtgagctctggcactatttcattgagtgctttggattaacttctaatgcttcttgtggaggaatattcctgtctgtcttttttactatgaaatgtgctcctgcttgttgcaggtacttggcaaataggtccaaaagacatacactggccatgaccaaccctacagctgagatcccaccggacctacaacggcagctaggacagcagcctttccgttcccgggtctggcctcctcacctggtacctgatcagcatcggtgagtagccacatgagctgtgcgagctccttgaggctcatcggacaggcacccttctgattagtctcacagcgacggtgactagcatcgtggctttaaatagaagccagctgtcatcctgaactcacatcttctcagctccttgcagtaagcaatgcacagggcaaaggttttttactgcgccctggagcaatgcgagattcctctctcccattaccttgcagacctgtttattgtctgcatttgattcccatgattctagatgttgattcatagataaaattgaacttgagacctgcaagaaagtgaaactctcagaaggccacctggaaacaggaagatttttagccatatcgatagacttgacctttaataatccatcaccttcaaaagaatgagcatttcatatcgtgttaccattgaaccgccagcctggaaatgaagacaaagccccttctgaatagtagagcagagatcctcttgagcgatgtatttaagaggtcattctttcaatattctgatggcaaaaatcttttgctaggttcggttatggttataatccattctcttgaagaaataaaagcaagtttaaccttcctgaccaagaaaacttcattgactccaagtaagcctggaagcagctgcggaatgacactttgctagttgaagaagatgattatcttctgtgactatcttgatgactaaaaatctcagtcttggccactccgaagctatccccaagctcatggcccacacgttcaaagccaccaccagttactagagcgtattttatttctgtcttttggggaggacactgaaaagcagccttgggaaggttgaaaagcaatcagattccaaggaaactaggtttatatatgtggtgttatgaaatcttgcagccagcttgcactggcaagcttgacacattttttttactgaggctggttacccatttggcatcaacataatcagcagaggcaagtgaactctgagcagagtgggacataattagtgccacgttggaaccctaaaagaaggaagataagctttcataaatgactatgagtaacttggtaaaaatggtctgtcaggagtagcaagaatgacaattctcaaataaaactctgatggcacagaaagacaggctttttctaatgaaagtctctcaggacttacagtgttcgtacacactaaagagcactttgaggccaggcacggtggttcacgcctgcaatcccagcactttgggaggccgaggcgggtggatcacaaggtcaggagttcgagaccagcctggccaatatggtgaaaccccatctctactaaaaatacaaaaattagccgggtgtggcggtgggcgtctgtagtcccagctactcgggaagctaaggcaggagaattgcttgaacccgggaggcagacgttgcagtgagccgagatcatgccactgcactccagcctgggcaacagagtgagactccgtctcaataaataaataaataaagagcactttgagtgattactggagacctgccttctcctcccctatacgtttcctgtgatttctcataacttcaagctctacactggtatctaatacaccctttattccttcttttctccttgtctccttcttcccttcctccacagcctgacacttaatgtttcagcccttgtctgagtctgttgtttagctgaagtcctttaggtatccttgttgaatgctaggtgttcctcaggaggtcttcttatgaggggaacatgaagatcgtcacatttccagagtcaggctttatcacagaccctatattctgttgacatttgttactcaaggaggtccacactggaccacagctctgtctgtgtgatatccaccctgcctagagtcattgtcaaggccttgcctgctggaaatctatctgctgtctgttttcatgtgaacctttttggtgttttgagggttgcctgtggccaagcctatttgaattggaagaaaatgatgttttatgagtggcaaattgcataagatggggcatttgtgcaaacccagcatgtcttgatgggatcactatacaaatatgcagcaaaagagattaaagccagtcttcaggggaaatgagaaactttccaaggctataaaacatggaatacgggtggcctgcatgggttcttgaattcctttcattttctggaggaaatgattaaagaacagtatatatagctatccttctggggtagaagagatgaagttcaacatggaaacagaagagtggtctaatcaaccttttcatttctggaaatgtgtaatttaaggttaaaaatgttttaaaaagtgtaactaaaaaatttttttaaactaacacaagatagattttatccaggtgggaaaccaagtccctccttgaagagtatagtgtgggagtatcagcctaatgcgaggccatcctgaatttgagtgtgattgcaaataaaaataaaatcaagcacaattgatacttatcagtgcttctcaaatgagcaactgcatcagaaccgttcctctgaggttactgtgctggactgacctgggtatcagtctcttcacaacctgagcttctgaaaaagtcatgaaatacctggacctgggattttctgtgatgggagagaattatttttgtgcagaaagactgtattgctacttgaagaacatggctttctgaggggatcagaaacatgtccatttcagaaaacattgaaagcataggaatcaaattttaggagaaaatagtacttacttgcttctacttcaacctgaagtagaaacagaaatgacaagttataaggaaatgcttctcaacacagccttcatgatccctgttcctggattgtggcccgccaaattcatttgttttttgtgttgctgaaccaaatacatgttcgtgctcatttcattagctcactgctgggtcaagcctcaggtagagtctgaaacaaaagccatcattagcaaagacagggtaaaaggctttcacctgctgccagaactctctggatacctctgcacggtcattagattcctcctggtcccgcgctgtctgcattgtatttgaactcgcttgttaacctgcttcctgagctgtggttctgcttcagtcccaaatgaatcactggcaaggtagcacatcatttcatccaaagttcagtgtaatggcatctctgccctggacatgaaaccctgatcctttccatctgctactggaatgctgctgccttggcagtcttttatctgcttacctcagcccataaacatctctttctgatcatcaggtcacaagagtaggtgttagcttctaaccccgatgctgtcttaggcattccttatcaatagcttgttctttctttctgtaagattctggctgtgttccagttgagcagtggggtctttgaaggtaatccatatgattcctctttcattaggaggttgggtgagtgctgctgctctgagaagttgattttcacagtaggtgaccttatttgttgaccaggtacgtgcaggatctcaaggcccacattccttaagaatttgttgtctccatcccaggatcagaagtcttcattttcccccaccccaatcgccaccttctattttctgtcacagaacctatgagttctaggccagacctttgaccacaaaactgactgttgtttccctctggccatacggagatcattgctcagggaaaactttggctcaaatggtgaatttaaggtttctaaaggcactagatagacatatgattataaaagcaagagcttctgtacagtctggcctggaggatattgagaagcttttctctctggcctagtgtatttataagaactggatgtacttgatctcgggacctcaccaggcttggaaagtaagccaaccgaaggtaagtagaaatggaagatgtacacctggagccctctaaagggaagcaggctagggaaacgactgatgtctggaaatggcatgaaagtggcataatatgcagggctacctgggcagccagccgtctttatgttcatctggaacagcagtccctgtgtgatttggtcaaagcccctgagtcctagcctctaaccttctcttcccatatattcagctctacctacaaggactccaacactctgcacctccctacggagcgtttctcccctgtgcgccggttctcagatggggctgcgagcatccaggccttcaaagctcacctggaaaaaatgggcaacaacagcagcatcaaacagctgcagcaggtaatggaagaggtggcaggcatccctggaggagcatgggtgacagaggccaggattgcaggaggactggggtggtaaacgtaccccttttatgtcagcaacattgcagttttataggttaaaaaagtatagctttctgggccgggcgcagtggatcccgcctataatcccagcactttgggaggccaacgtgggaggattgcttgagccctgaagttctagaccagcctaggcaacgtggcaaaccctttctcccccaaaagattaaaaattagcatagtcccagctactcctgaggctgagatgggaggatcacttgaacctgggaggtagaggttgtagtaagctaagatcacacccctgcactccatcctggcaacagaacgagactctgtcttaaaagaaaaagaaagtatagctttctaatgcactttctttactttgtgttatgtacagccctccccaggatcaaacttccttcccctgtgaagggactaaatttttctcctgtctctagttcattggaaaggaatttctgggcttgggtttctgtgggaaccaccagagaaggtgctactttttttttttttttttgagaccaagtcttgctctgtcacccaggctggagtgcagtggcacaatctcagctcactgcatcgtccgcctcctgggttctagagattctcctgcctcagcatcctgggtagctgggactacaggcgtgcaccaccatgccagctaatttttgtatttttagtagagacagggtttcaccatgttgaccaggctatgtctcgaacttctgacctcaggtgatccgcccgtctcggcctcccaaagtgctaggattacaggcgtgagccaccttgcgcgcctggcactctgcgcatgatttaggatgctgggtcttgattaaacctgctgtacattgttaccacctggcattctctccaggtggtatggaacggcactctcagaggaaggaaatgtacctctatatgtttctgtactataaagattctataaagagccaatttcctttctgccttcctgatgaccaagcttccaatggcgtgtgctttgtacacagatttcacattggacacttgtactcatacaaaggccatccttgatgttttccattcattcatacagaacaggatgtgaatctatttagtgcaccagatacttaggtaaatgagttaattgctcatcaaggacactgttctcttgcggctctttctgcccatgagagcttggaggcagatctgcatctgctgaaatcactgcatgaggcgggtctggctgcatcccatctgtattaactactttcccttcaggagtgtgagcagctgcagaagatgtacggggggcagattgatgaaagaaccctggagaagacccagcagcagcatatgttataccagcaggagcagcaccatcaaattctccagcaacaaattcaagtaggccctcactctttgctttctccaacttgtttggagtttgctttcaggctgatttgcctgtgcattttggaggagaccactcagtgcaaagtggatttgaggtctgtttatggttgacatgtttgagtaaaggtaatcagaccttctggtgaacaacaaaagcataaatctgagacacagatagttctttctgtttcttcccttcctgagaatagctctgagtaatcttcaagctcacaataatttttttcctttccccatatatgttttaggactctatctgtcctcctcagccatctccacctcttcaggctgcatgtgaaaatcagccagccctccttacccatcagctccagaggtatgagtcattttgtgttgtgcctaagccattgtctcgatagcctggtacccttggcttgactcactgggagatatggactgacttgagcattcatcttgcaagaatctatttgaaaaggagagaaaccactgtaaatttcaggagccttcttgaaatcccaacttcctgtgccacttcatttccttagccccatgagcaaagtaatctgatatctaatacaggagccagacataggcccacaatgaactctgccattttggctgagttcttttcaaacaagatgtagataggttttaaatacactgtggtggatggcttatgtatatttttctaacatgaggcttatcaaagtaaaaaaaaatagtttccactgatatatgttgtatggctgaaacttaagattgtactgtcaccttaggaagcttctttgtgtatctcttttgttatttttaaggttaaggattcagccttcaagcccaccccccaaccaccccaacaaccatctcttcaggcagcccagtaatagtcctccccccatgagcagtgccatgatccagcctcacggtgagtggagaggttcagaccaaacagttcattttatgccacatgggaaaaaatgatggtctcagttttgagcaccataaaccatttgaaaggcagaataacatagtattcaggggtatggactctagagccaagctgctttggtttgcatcctggttccatcagtttcttagctgtaaacccttgggtaagttaacttgacttcttgaattagtccatttcacactgctctaaagaactgactgagactgggtaattgataaaggaaagaggtttaattgactcacagttccacatggctggggaggcctcagaaaacttacaaccatggcagaaggagaagcaaggctcatcttccatggtggcaggagagagattgcacaggggaaagcgccagaaacttatcagacaaccagatctcaagaattccctcattatcatgagaacagcatggaggaaactgccccgtgatccagtcgcctcccaccaggtccctcccttgacacatggggactacacttcaagatgtgggtacacacagagccaaaccatattacttctcaaatgtcaactgaggataattatggtacagtatgtagatatacgtaaaacacttggaacagtctctggcacaaaatagttctcaataaaggtttactattattaatatttttaacaaaacctccagccctaccaaataaaaagcagctaccagaaccttccttatagacatgcctccgtttggctgtctactatacacgtgggcccctctcttgtgggtgtacagatgggagtgaagataagtataatgtgactgtgagtcttcagaggtcagccgtcttaggatctcttgagtaacactccacgagctacgtccctagtcagtctccctaggatccttgagaagagtctgaattggcctctaggctcttcctacttaaagtggggtcccccagccaccaatattgggagaaaaagtaagatctcaggtcgtattccagacctgttagagtctgttttttttttttttgagatggagtctccccctgtcacccaggctggagtgcagtggtatgatctcggctcactgcaacctccacctccgggttcaaatgattctcctgcctcagcctcccaagtagctgggattacaggcgcccgccaccacacccagctaatttttgtatttttagtagagacagggtttcgccatggtggccaggctggtctcgaactcctgacctcatgatccgcccacctcggcctcccaagtgctgggattacaggtgtgagccaccacgcccggcctagagtctgcatttttaaccagatgccaggccatttgtgtgcatgtgaaagttcaagaagcactgcctagatccgagttaccccatgtaatccatggaccagcttttaagggaacttgttggaaacacaaattcttaggggcccatcctgacctactgaatcagagtttgaaacagaattatatagataggacccaggaatcttctgtttaacaagttctccagacttgtcctatgctcagtgcagtttgagaagcactgttctagctggtatgtcgtctgagtattctcattagctctcattacttctggctggctggtggcctgggcacttggtcactctgaggttcctttctctccaggggctgcatcttcttcccagtttcaaggcttaccttcccgcagtgcaatctttcagcagcaacctgagaactgttcctctcctcccaacgtggcactaacctgcttgggtatgcagcagcctgctcagtcacagcaggtcaccatccaagtccaagagcctgttgacatgctcagcaacatgccaggcacagctgcaggctccagtgggcgcggcatctccatcagccccagtgctggtcagatgcagatgcagcaccgtaccaacctgatggccaccctcagctatgggcaccgtcccttgtccaagcagctgagtgctgacagtgcagaggctcacaggtaagaccgcctaacgtcacccagccatctatgcatgggatccaggtgggaggaagccccttagcagagtgagagaaaaggagggaaggagaatgggtctgactaggctgtgctcttgtttcacgctttctaaaatcaggatgctgggtttggaatgaacttgtcagctttttattgacccagggttaaaattctaatgagactgaggtggaaaatgggaaagctaccttattatttgctaccttattatttgcttgcaaagaagaaaatggcctgttagaggaatgtataaaaattccagttccccttttcttgaagggagcatcttgaagttgcttccttcaaaatgagctagatctattacccacgcagtgccctcagtcccttggaggttactggacaagccagtaatggaataaatagggacaatgcatacatctgccacttctctgtcacaccacagttctctgtaccagtgggttctccctactgaggaggaggagctgttcccaggaagtctagtacttgttacatggatgtctggtactcccttttgtgtctgcagcttgaacgtgaatcggttctcccctgctaactacgaccaggcgcatttacacccccatctgttttcggaccagtcccggggttcccccagcagctacagcccttcaacaggagtggggttctctccaacccaagccctgaaagtccctccacttgaccaattccccaccttccctcccagtgcacatcagcagccgccacactataccacgtcggcactacagcaggccctgctgtctcccacgccgccagactatacaagacaccagcaggtaccccacatccttcaaggactgctttctccccggcattcgctcaccggccactcggacatccggctgcccccaacagagtttgcacagctcattaaaaggcagcagcaacaacggcagcagcagcagcaacagcagcaacagcaagaataccaggaactgttcaggcacatgaaccaaggggatgcggggagtctggctcccagccttgggggacagagcatgacagagcgccaggctttatcttatcaaaatgctgactcttatcaccatcacaccagcccccagcatctgctacaaatcagggcacaagaatgtgtctcacaggcttcctcacccaccccgccccacgggtatgctcaccagccggcactgatgcattcagagagcatggaggaggactgctcgtgtgagggggccaaggatggcttccaagacagtaagagttcaagtacattgaccaaaggttgccatgacagccctctgctcttgagtaccggtggacctggggaccctgaatctttgctaggaactgtgagtcatgcccaagaattggggatacatccctatggtcatcagccaactgctgcattcagtaaaaataaggtgcccagcagaggtaagtgtctcctcacagtggaagtcctgggccagtctgccctaatcaactgactcagtaatgttatcttttttcagctagtattctgtgttcctaagaaaaaaagaatttctgagcttcacgaccttcttggggagaagcatgtaggaagtgggtattggtgggcaaggggtccattttcaaaatcaaaggaccatgatacaaaattaacacttagtcaataagatagatgatccatttcccttattcataccacagtttcttggaatccagaaattcctgactgccatccaaacagctaactttaaacttgtgcaatagaaaaaaagtcagcccaacataatttagtgtaaatagtgtgggaacaagagtcagagcaccttaattctgctcttgcagctatcataaatacgataactttgtcatttaatccctctgattctgattttcctcatctgtgaagaaggtgttggaggaacaatggagtatcttacggtgtatctgtggagatgaaaacatgtatatatgtgtttgtttctacataatgtttgcatgagagagagaggcacattcagatcatctgaaatgtttgagttcagtgcataaatgtgaggtattattactctggtcgttttattagtgagctaaatgcagaatattacagcatcataagggcccccattatcatttcattttgtaccactttataattaatgagtatattcattatcattctgaaggagatcaggattgcaattagtaagttatacttagaaaatatagttccattagcatcacggcattcatcctagacaaaatcaggaatcttgcaatttaccactcctcaccattgccatccaagggaataaaaagcaatttatctgtaaactgtacaaccctgagactgagcagtttcttccatccttccctccccggaactacctgcatctcctgccctgtcatttaaagtcagtgctgaaaactcagccccagggggaattcggtcctgcagcacagagcagtagagaaggccttgctgtaaagcggtgtctgtgaaaacgccttggtggtgccaggttgtactcattatgcgctcttaggggggaattgttgcctgaaatgccaattcaatcctgaccttttgaacagatgggtgtcatccagctgagagattggctccagtgagatgtactgtgttcacctgtggctgctgtattcttagtagacataggagggtgggagctttcagaaccagatcataggtggaatggttaacagacctgagggtgtttaggattgggaggaaaaactaagagaaacatcacgcttgttagatggaagaagggattagatttttctgggttcatattatggggcagaaccaagatcaagatagaagttgcagcaaatttcaacaccctgtggaagacctttataagaactctccagaacaggctgccttagcagcctgggagctttctaacagaggtgggataatggtatggggatgttgtggaaaagattcccctgcaaatggaagcttccagcagattagcacactatagttggcatgaaaaggagatgagctcacgtttctttttttttttttttttgagacggagtcttgctctgtcacccaggctggagtgcagtggtgcgatctcagctcactgcaagctctgcctacaatgctcacgccattctcctgcctcagcctcccgagtagctgggactacatgtgcccgccaccacgcccggctaattttttgtatttttagtagagacagggtttcaccgtgttagccaggatggtctcgatctcctgacctcgtgatccgcacgccttggcctcccaaagtgctgggattacaggcatgagccaccgcgcccggctgagctcacatgtgccaggcaccaaatgctgttcacatacggattcatttaatccttacaacaaccctacaaccctagaataaccaactcttattcccatttaccagtgaaacagcggaggcacagagattaagtaacttgtccccaaagtcaagaggtagtcaggggcagctgaacataagagtactcacactagctgtcactgacacgagagatgctcaccgagcaagtcccgggtgtgcagggcactgaggaaggagcatagctgcagcaaacagtgctgctgccctccacccctgccccaggctgagttaccgtgtactttcaatacttcctgaaatgtttttcttcaaaaattattttctctagtttctctttaccttccttcctgtgtgacttgtgtgtgtagaaagtctggagagcataattccccattgtcccctgattgtcagaggaccccttcttcggcaggcacgctagtctgttgagtacccactgttggtgcaagtgctgtgggcgcaccagaggagggagagattacttcaatccaaggaacaacgtaggtttccagcaataagtagcctgtgggttgggtcctggtggatgaagaaggtttgccatttggatctagaggagaagcaagagaaaagaacaatgggtgagactgtctcaaggaattttccaaggacagcagcaggcttggctggtttgaagtacagtgtacatgaaggcattagtagaagctaaggacagaggttttctaaaatgcatcgtctagattcagctgtactgtgaaaaaaactcaagttttttttttttttttttttttttttggcagagtctcacactgtcacccatgctggagtgcagtggcacgatctcggctcactgcaacctacccctcctgggttcaagcgattctcctgcctcagcctcctaagtagctaggattacaggtgtgcactaccgcacccggctaatttttttttgtagagacggggtttcaccatgttggccaggctggtcttgaactcctgacttcaagtgatccaaccacctcggcctcacaaagtgctgggattacaggcatgagccaccatgcctggctttcaggtttcttttaaaaactccagagcttacatttttactttactgaaaaaatcatcagataatttgctgttcacttctgtcacgaaaggcttataatgctgtgcccccaccactctgcaggcaagtgggggagctcactcttctcaacctttttgccaggaaggaatgcctgctgtttcttttaatggtccctccatctcaactgtgttgcacaagactctactgtaggtgctgtgagaatgcagagatgaaaggataacctgtcctcagggagcttctactctactaggggatgtaaaacaagctcataaacagctttgctatgaagtgctaggtactgagtgctgcaagaagtatcactgagaagagcagagctagtgtgatcttcttagcatttcttaagggtagatgaacagggattgttggtgttatttagttactttttgagtcagggtcttgctctgtcacctaggctagagtgcagtggtgcaaccacggttcactgcagcctcgacctcctgggctcaagcagtcctcccacctcaacctcctgagcagctgggactacaggcgcgtgccactacacccagctaattttttttttcctttggtatagatggggtcttgctatgtcgccggggctgatcttgaactcctgggctcaaacaatcctcccttcttggcctcccaaaatgctggtattacaggcatgagccaccacacccagccatattggtattagtaaaggaaaattagatgccatcatatcagtgtccatggttacctatttccttgatggcgatttgccaccagccagtatgaggccaggcactgtgagagcactaagcaggcagcatgccaaaggtttcttcccaatttgtagaagtgtcaggatttcacatgccccatgctgtccgtaatctccctgcctgccaccctagaaggaaaaacaaggtttgtctttcttctatagtggtacacacacttgatctttttgactttgcaaataaacacagcagcataaccaatctacaccatgagattaccaactggaactcacaaagaaaaccacatcctcttctctgagctcagtcagcctcagctttattactcaggcctcatagagcagtaaaatgctgacagagtgggaggggttaccccagaacctttaaggggagtatgcagtcacgttattgctcccattttctctcaaaacccagtaagtgagtcaggacgagtcaacattgacagattcaatagagaattgtgcaggttgccccaaagttccccgggaaggtgggtggcgtgcattgtgtccatttgtgcacttttccccttgtgtgatcggacgatcatcccacctctgcactctcttagctttagtttgataaatattcgagcatgtagctcttgggaaccatctttcctccatgactttggtagctgctgaattggcataaagggttgccaaagatttgatcctgaatgtcatgttccttgggcagtgggttagtctgtttgtaccccccaaaatggtcgatagggtcttatttatagagtgtcacaaaggacttctagactcagggtcagcattcttaccaaaaatcagacttgacttatttggtcttttacagttgattaaagactctttcacatgtgttgtcttttcgagcccccaaacaaccgtcatttttcagatcaggaaccttgaggagaagctgaaagatttgccaacactttgctggtgagggagctgggtcctgacttcaagttttctgatcccctggtcatgtattttttcctttacgcctccttgcccactctgcaccctccaagcacagctgccaagtgaaagatgctagcccttccaggtctttgacctactgatgatactgaaacttgagcagacagagccctggggtatcccctgactcctattaatactctttttcatctggcttttaactgacatttgtctgtcctgaatcagaggcttctcctggaaattaaagtttccctgagtcatttgttcatttacatatgggtatattgtccctcataattctgcaagcagggttctgtgattaaatcaatttccttgtttgtttttgtcagctgactcagcacgtccttatgcactcagaaataacatctctaaactgaatataaatcatgctagactttattgagcctttacagtgtagtaacctctatgaagcactccacacccatggagtcagtccagttgtacagataactaagacccagcaaagcaagataacttgcccgagctcctgctcctcaggaagcagctaagccaggattcacggccaactcttcctgaccccagaacttgtgctcatgacccttgtgctcaactccagcttggctgagggatgagctctgggctgggagtcaggaaggccccctacatgatttgtcaggtggttgcttgctctgtcttggtgcctacaggcatcagacctgaaggcggggaagacagcagacaaggcagagcccaaaggagggtgggtgttttggtttgcagaggccccattctcagggataaaaacaagtctgagagagggaaggaaaagagccttaaaagacacagcaaacaaaccaaaacactgaggcctccagaagaggcaggaaggctccaaccaggactatatacattttgttagctttgctgtttcctcatggttagtaatgatgttttaaaaatctttaaacaggagagcgctcatgtttgtccttgcggagagcaaagagatgcaactgatgagatttgcatccaactatataatcaggcttaaaggaaaaaagcaccccgaggaattgagtggatgatgttagttatcaaagaagacaatataggtttttgaaaaagtaagaagcggctgctcgcattgcttcttggcaaagcagacagaatcaccatttcctcactcccacacaaccatgttgccccacttcctgccagtggtttttggttggccctggcgccaacatgcgagcagtgcccactgagaggaattgggcagagtgggtaggacgggcgggctaatcccacagagcaagtcctggtgtaggttttcttttatcttctctctgctggcttttagctttctgtagcaaaatagttggcttctggctgttccttttacctctttgctcagagaactttcaaaagatttctcacttgccatcatctttggtagctgggaagctccctcctctaatttttctccagaatgtcttgcattactagcaatgggcatgtcagttagctcccctccctttccatcctgcctctgcccctaagtcccagcctaaccttaatcattatagaaaaccattgaaatacagagacctgaaatcctttacccaacattcaagaagtatgctttactttcattatttaaatagatcattggaatggcacagttagcattacagctgtgtttgctattaagagcttttgttttaaacttagtcccaccaagagtcagttcatccaagataagctcagtagtttccaagaagctttaactcagaaaaccaaccaagcaaacacaacttattttcaagtcccaggcttttaaagactgaagtcaaaagtgctaccaggaggatcctgtcaacataggtgtggctttgatagtcttcttgactatccttgatcaagaagaagtactcattcctttttctctccaattctagtccatagaatggtatgctctgacaggatagtaacccatattaagagagtatttatttttattattcttttttgagatagagtctcactctgttgcccaggctggagtgcagtggcatggtcttggctcactgcaatctctgccttctgagttcaagcaattcccctgcctcagcctcctgagtagctgggactacaggtgcacaccaccacacccagctaatttttgtaattttagtagaggtggggtttcaccatgttggccaggctggtctcaaactcctgacctcaggtgatccacccgccccggcctcccaaaatgctgggattacacgcacccggcctaaagagcatttactgacatcagtgaaagagatcataatactgggtataggacaatgttctagaacactgaagattcacagacatacatgagatatagttcttgcctgcaaagaatttatagtctaatgtgaatgattaagtacataattgaacatggtaccaaggataatgttagagcaatcagagacaaagtcttttgaagtttaaaggaagagatgatctatttctgtttgaaaggaaaagtttaataaaaacaatagcatatgataatggatgtagaatgatgagttgctttggattggcaggagtgaaggcagaagaatcagttatttgcagatagaaggaacagtgagggcaaatgcatagaattgtgcatagatggggaacagttaagtggtcccatttgactagagcttagaatgtatggagaggggaatatgagacactgattggaagatagcccagggcagtgttgtaaaatgaaagtgaatggactacagaacggttggtctttgtagggtagtagtaggggattggttatgaggctagcataataatccaggcaagaggtaatcaggtttccatgagattggcaacaaagggactgaagtgaccagcattgcagagttagattcagcaccaggagtaaggaatcaatagtggccccaagagcttatgcctggaagatttggaaaatgaggcatcaaaacgacaatgtctgaaggagtagcaggttatgggggaagtggatgggtttggaattggacatggtaagtgttacatgctggttagatatccagggaaagatacctagtaagtagctggaagtatggatctggggcttaaaggagcacttcagtaattctttacataaaggcagtacagccatgaaaatagatgatgttgccagagtaagtgtggggagagagaaggtcaaggacaaaaatgtggagagtacttgcttagaaagggtggaggggccatcaaaggagtcagaagcagcagttagagaagtagaaagaggagagtagcagcgtggtacactgaggtcaccgggggaggagagaggacgcagccagccacagaacagatgcatcctctagggctagagggtcctgaaagctccgagagtaattctcatgtgcatttaggtttgggaatagatcactgttaattcaacagagaaatgaaagaagagaaggttcggtggggtccagccatgccctgttacgtggaattttttccctaagggtgtggtcccctcccctacagctcgtcttttggagggctggtccaggctcctctaagccatgacgccggctgaggatcagcggttggtgtacatgatctcctcagccttgcccattgtcccttgcaagacatttcttggatgggagtttccagtgctgggagaagttccgccccactgactctattctgctgtgtctcctcagagcctgtcatagggaactgcatggatagaagttctccaggacaagcagtggagctgccggatcacaatgggctcgggtacccagcacgcccctccgtccatgagcaccacaggccccgggccctccagagacaccacacgatccagaacagcgacgatgcttatgtatgttggtcccacctgctgcacagaggtggatcctcccagtcccagccttgaaacagagtatagtgatgtggggtagcctctcttggccgctctcctcagtcagcattcagcctttctggaaacggtggggagcatttctttttttttcttttttgagatggagtctcactctgtcgcccaggcgggaggacagtggcgcgatatcagctcactgcaacttctacctccccagttcaagtgacttttgtgcctcagcttcctgagtagctgggactacaggtgcctgccaccacacctggctaatttttgtatttttagtaggcatggggttttaccatgttggctaggctggtctcgaattcctgagctcaggcaattcgcctaccttaagagcattttctttgagtcaccctaacagaccaaaccttaattcaagtagaatctatgctccaaattttagaccaaagaatcagaaatagttgccatctgttccctgtagttttggttattaaacctcttctcagtctaaactcaggccccagcaaatgagcccataggcttctggttatttttcagcagctacattgagcttactcagatcaggggagctggtgggcctcagcaaagttttgttttcctagggtggtgctagtctagtagctagccacatgtggctattcaaatctaaaccaattaaaattaaaaacaatttaaaattcagttcctcagtcacaccagttacactttattttttattattattattttttgagacagagtcttgctctgtcacccaggttggagtgcagtggcgcaatctcggctcactgcaagctccgcctcccgggttcacgccattctcctgcctcaacctcccgagtagctgggactacaggcgcccgccacccttttttgtatttttagtagagctaaatttttttagcccagctaatttttcgtatttttagtagagacggggtttcaccgtgttagccaggatggtctcgatctcctgacctcatgatccaccagcctcagcctcccaaagtgctgggattacaggcatgagccaccgtgcccagcccagtcacactttaagtgctcagtagccacttgtggctactggttaccatattggacaggacagagaacatttccatcactgcagagtgtgactggacggtgctgtcctaagacaaagtcccagtggagatggggataggtcagaaacctggttttagaaggccatgtaggtatcaagatgtcaccaccagctgagatttgccacatccgccccaccctcagcccccccactgggcagagccaagcagcttcccacactgtcgctgtggagcaccccctttgggtggtgctttagaggaaggagtctggagtggggccccgggctgtcttttgcctgggctccttcagaaggaccagctgtctctaggggttgcctgagagtggtgtcttgtgtgcttatttcttctcttaactgttttctgcaggtacagctggataacttgccaggaatgagtctcgtggctgggaaagcacttagctctgcccggatgtcggatgcagttctcagtcagtcttcgctcatgggcagccagcagtttcaggatggggaaaatgagggtgaggagccttatgcatggggcactccagagaagttcctggaggggcctccctccatcttccgtaactgctcctctcttcgtaggaagagctcatggggaggtagagccacagcatcccacaggttctggacacagcccctttccccactggtcttccctgagtgtgggtgtgtaaaggaggtgtggcttctggccagatggcacagggctctcccattcctgtctctcatctctgtgatgatatgccttcaatcactttttccagttctgcttagagggcatcaggtcctaatggcacatttctacctcttcttggagccagtcaagggagggtgtcataacaaataataggcgtaggccttgggcggggcaggtctgccaccagtcccaaggctgtccttttcaggctctgcaggtgaggcacttggctttctggaccccgagatcctcatctgtaaagtggcaaaaacgatagagcctttatcctacattgtgccctgagggctggctggcttagtgagtatcaagtgcttagcacagtgtctggaagacagacagtgcccaggaatgggtgcctgcaggcagtaaaattattctccctttcactctttaagaggtgatcctttctgaaggagtcctctatcttctctcacactacagtagttgatcttacctaaggatgggaaagggtaaaggaaaagggaaaaaagcagaacaggtagaggagaatataggaagaatcttggcccccgcccatcgtcactcaacaccttgagggcctgctgtgagctagaattcagggctgggagtcaggctgtgggatgctcgacaggttgccttcaattcctcctctctctcccccttgctctcctagtcccccagttccctgccaacctcatacgttctttttggtcttgcagaatgtggggcaagcctgggaggtcatgagcacccagacctgagtgatggcagccagcatttaaactcctcttgctatccatctacgtgtattacagacattctgctcagctacaagcaccccgaagtctccttcagcatggagcaggcaggcgtgtaacaagaaacagagagtgagtgtcaccctggccagagccaaaccagccctgtggcccagtgcctgctcccaatcccatcaggagcttcagcccatgtgttgtggtggccagtgcagtcgacagtaccacgcctcccctcgtggccttcacagtttcttgcttttcattaacgacgctgctagttttagggcgcgaggtaggggtgggggtgtgcagaagaaatgctaaacacagtctcttggttcggttatgggaataagacacaagactcgccgtgtgttacaggtgctctagccttcatagcgacagaagtgagctacggctccagaggatgcaggtgacctccggtcagcataatgaggaaaggaggaagtccttaaactcagtcctaaaagacaaaacctggcaggaaaatatgtccagccatattttttaaggccatacagaagcaagtggcaggatattccagattagggaaatgtgtgatgagaggcccatggtagaaagaatggggaaattggcttgtttggctggagtaatgcaaagagtacacagcaggcaccattggttgtatctggaaaatccttgacagaagaggcctgatgaaagggaagccacttggcaaatccacatcagagcctcagtatggcaagctacctgaacacctgagggaaagtaaacccgttgcattttttaaaaggttttaaatggaatatttgagcctttctcttttcaaactaattctcctctgtgtctgctttattccaggttttgtgtacagcttgggaatgaaaaggttgattgt

SEQ ID NO: 15807 - DNA, 193560 bp, Homo sapiens
ccccgctgccgtgtcccctgcggccggccagccgcgtcccccagccccggcctcccgcggacccatgcccgcccgtatcggctactacgagatcgaccgcaccatcggcaagggcaacttcgcggtggtcaagcgggccacgcacctcgtcaccaaggccaaggtaccggcgcaggggccaggcggcagtcggagcgtggcggggccgggagaggtccgcgccccccagccggggggtcggggcggcgagcgcggcgcgtggtgggagcgttgggggccgggaggcgggagggagccagccgcggcggggcgggcgcggagctagggacacctgggactcgagacggcggaactccaagcagggggccgagggcacagagcaccggcgcccaggagccgggcgcggggaggggtcctcggggctgagggcaggcgggtaaaggggatgattggaaagaaggggtcggaactccccgagggccgggagactgtaagcccagaagactctggaaccagcagctagggaatcataagggaatgagggcaggggcatatgaaatgtggacccggaggatggggaaaaacaagggtgaagtggcagacccgggcttgtaaggggacccaggacggctggggcacggactgggaatgtgcacgtctgcagggcgctgggaggtcccaggatcctggtgccttaagacagagacaggaatccgcatttgatcatctaagactgatagatggtgcgaaggggatcccgaggagacacgattagtggaggaggcaatgaggaaaatggggaaataagggggaaattgctttgcttgtccacaggaaggggcccagggaatgggggagtgaggtgggggtgggggctgtcccaggtttatgatggcactaggtagtcaggggttaaacaatttgggagagctgattgctggttatttttagttgttggagggtcgggaattgtgggctttgtagaacccagggtgggcttttactggttggggggaagcttgtgattgaagaacccagacaccgggagattacactcatcgagcccttagttctcaaagggatttgaggcgctataggagtgaaattggccaaggtcaattaggaagctatatatgtatgcatgtaaaattctttgaggaaatatggtagcactttcatgtagccttcgttgggaggactggaatctaagacatcaggaggaatcttttggttttggtggaacccgcaaagcccatttttactctaaaattttctttgctcaatatcttacttgaatgaatacttttaatgtagtcattcattatgtttagaactgcagcttgtgttttccctcagcctgaggaatgaagaacccttacagctgctgccgcctcctaccaaagccacatcaattcccctcacctcctcagcctagcctctggttgtcatgacctaccttgtttttgcttttttggcagtggcttgttttctgaagccagtgacttatctaggccttctctcctgatcacttgcaacctgaagttccttccccaccatctttctgcctgaggctacaaggggcccttcttaccagggtgtcagggtgggtggctgtggcgaattgattggtcagtttcacttcctctggagggccctcttcagcctttttgtccgtttttatcacagggcctccagtctgcaggtcagagctgaatgagataccaaagtccagggctccctcagaccctgaggggaagtcaggggaagtcgattgagccaagactttggtgtgctcctcacttgccaccccagcccctcaccgtgtttccagtctagttgactattagccaaggcaaacttacatttacaaacaatatgccttgttccttgttttgctatttctttcctttttttctgcctattttctgtgtaatcactttgtgctcctgtggttattttgctctgacctctgggggatagtctccatgaacttaattggttgcctggtttatggtttcatgatttaaagaattttgaatcttccagcccttggatacaccaaaatattgataaaatctgttacagacagggttgaatgttttcgtaaatgtaattgcaaacagttgattcttggctttaatataaaagagacatttctatcttcagtagtcagcaaagccagtgcctaattatggctggtctgcccgctttctaattttcatgtgtgtgtatatgtgcgtgcgtgtgtttttcatagtttttctctgagaccttggtatcctttaggactgcagcattttaaacactggcttgtttacaaacgggtgtcactgtttatgttggtttttatctttgatcatttgtggtatgcagttgtgcaattcctatgtatggaaatattcaaagtcttgaatgagactgaaatggcttggacaatgagttgcatgtgtgaaggagccacaccagcattcatttgtgtttctgtagcagtgtgcaatttcctagttacagttacaagtgctatatcttttgctgcttaaattactctgactacatgagtgaagcttaattcacaaggagttgtcacgtgctctgggtgaactaggagcatattttggcctgctccatgcttctctgaatccactttggaaggggttctcaaatgcggacagcttagatgtgcctaacagctgtcgacatacagtacgatggcctattaaggttatggtttggttatataacaatggtgaaggtgcataggtactagaagttgccgaagctgctgcttcagttaactcaggttgattttttttctccccatgcactgcagcctttatcttacttctgcagaggggtcatttggaaacagagagttatttttttcccccatctgtctccagaatgtgtcatttgttgttttgtcttttagaggtgtgtgatttttttttccccttgtaggaaatggtctgggttttcttataaccatatataacagtcagacagaggtaattcagatgatacttgtgttggctgaaggaggttaggtaataggtattttctgaacattagaaataattatgatccccctcctttttttttttttttttttttttaaacacacatgacccattccaagaactaagagactaaagtaaacctcatttattgagtaggatactgcactccatccaatactgcgtggttaagctggccctttcccaaattctgttaactctcaaaccgtctagagtgggatcctgggatgaataaaatcagtagagaaaagtgaagcttttcctatttggttgttggttacttttgcagcacggcattcatgagctcagacttcatattggcagcactgcagtgcttagagcggcactgcagaacagttaccaggagagaatgttcagctgtgacatactttggttagtagctcaccctggctgtctttgtcctacctgctttgatttccttttctttggaagagccttacttagcctgaggttctctggctctgtttttttttttggtaggaaactataaagtattacagatatttttaaaaaagaatgttttctgctctcaaattgcaggtagtctgttgcctgtgcctaattataccttcactagttggatgattgggaacaaagagtagatagattttgtatgcattttttttccttttttaaaatattggggcagggtcttactctgtcacccaggctagagtgcagtgacactgccagagttcactgtaacctccaactcccaggctcaagagatcctcctgcctcagcttcctaagtagctgggactacaggcttataccaccacaccaggttaatttttaaattttttttgtagagatgggggtctcattatgttgcccaggctggtcttgaacttctggactcaagtgatcctcctgcttcagcctcccaaagtgctgggattacaggcatgagtctgtaacccaaatgcttggcccatatgcattttttaaagtatgcatgactataaaagcctttggccaaatacgtttaaactatatttcaacaaatatatatcacttgcctgttattggtttgtggtaagagttccagctttggataaagcaacctgagtttgaatcttttgctgcttaatagttggatatttttaggctgtgagaagttatttaacttctgtgtgcttgggtttcctcatctgtaaagtgggatgacagtagtacttacctcacaagtttaggtgttatgaagattaaagaagatagtgtatgtaaagctcttagagcagcatggtgccctaatagcatgacgtaaatattaccatcatcatcatcgttatcagatgttttagtaacataataatattatggacataataatagtcctcctttttttgcttctcaccccttgggcacgattcatgaatgtatatgccattagttttgtgtaggtagatgccatcctgacgatagactttcctggtaaaaaaaaagtttgctactattgcaggtgccactttgagatagttggatttaatttgtatagggtacaggctggctaatctcatgaaatcagcattttaaaacataaattttcattagttaaacttttttttttttttttaaatagcaatgtgacttatctaatgaaaactgtgaccaacactggcttttgctttgggctgccttgaattttcagtgtgttttgtgtaactaatttttgttatgttgatgatggaacagagttgagtgcagtcttttctccagaggtccacttaaattaggtttaagtgaaatatttaagaaatgtttctgcaagcttaaggacacatttgcccttgcgtgcacaagcaaaggccttagacggccaaggtcagaattcttaactttaaatattacacagagaagacattttgccctatgacccctttccaaatattgactagccagacacatcggtgtggtttagtgcaaactcatttccatgaggagaacaagtcaaagtgggctaaaagcattattttcacctctaaagaagagtttaacgaagcacatgagatgatgctttcacccattagaaaactgaaaacaagattcatttggtaagtaggagagaattatgtcaaaaagaaattgaaagcagaatttacattagatacatttgaggaagatagccccatccctagacaatctagaagtgactattgaaagatgattatgttcagtttgatacagtggtgatggggttgctaaacgtttttgaaattttgtaaagagctaagactgattgagactagtctctccagagtcaaaataccagtattccattttctacatcaaagatgtttattttaacattttgactttggtgccagctccctagaaagtcatagatctcgctcaagccagaggtgcccagactagttatttctgtgccagaagtgctgttttcatttttcaggcttcagtctggctaatgttttctagttcatcgcgtaaaagagaacaaaatggatgctttgaaaagaaaaagaaatgctttctactcaccagagccactgtaactgtaaaacaacacctaagacatctgcatagagatggaacctttcccttaatcatttattcattcaacacatttattgaatgaaaattttttgtcaggttccattctagggtctggagtgcaccaatgaacaagggagacaaaaagcatctgcctttctggagctttctagtagaaggagacagacaagggacatgtaaaaaaattaaaaatttcatataggaatgaataccaggaagaaaataaacggactagagaatccctggggggggctgctgcctcagatagagtggtcagggaagacctttctttccaagatgatgatatttgagctgagacctgagtgatgagaaaaagccaacctgggaagatttggaagacagaagattccttacagaaggaatggcatgtgcaaaggccatggggcagaagtgagtttggtttggtcaaagattagacacaaggtcatgatgccatggtaccttagcaaacaagtggaaggatgggaaaagatgaggccagacatgtaggaggggccagatcatctgggtcttatggccattttatggaattgggtgtgacacgggggtgacatcagagagtatcaagcagaacactaatatcacctaatttatgtttttaaaacgtggctggatgtggtggctcatgcctgtaattccagtgctttgggggggcatgaggcaggaggatcacttgaggccaggagttcaagaccagcctgggcaacatagtgagatcccatctctacaaacaatttaaaaattagctgggtgtggtggtgcgcacctgtagcctcagctacttgggaggtggaggcgggaggatcacttgatcctgggagtctgaggctgtggtgaactatggacacaccattgtatcccagcctgggtgacagagtgaaaccctgtctcaggaaaacaaaccaaaagaaaaacagcaactcatgctggttattttatggttaagagcaagaatccttttctgatgcatttcttggcacaagggaggagttcagttttaacaacttatattctttctcactgtagaggaatattgacataaattgcacataaattaagcatgatcaactaacaagtatttgttgatttattgggcatgaaaaagaccttagagaggttctattctagttctgtcttctccacagtctggaaagacagacttaacagaatttataatctcaggttttgcctggcatggtggctcacgcctgtaattccagcactttgggaggctgaggcaggtggatcacctgaggtcaggagttcgagaccagcctggctaacatggcgaaaccctgtttttactaaaaatacaaaaaattagccaggcgtggtggtacatgcctgtaatcccagctacttgggaggctgaggcaggagaattgcttgaacccaggaggcagaggttgcagtgagccgagatcgtgccgtcgcactccagcctgggcaacaagagtgaaactccgtctcaaaaaaaaaaaaaaaaaaaaagaaaaaaaaaacctcaggattttacggacttttaaagtcatttagaccaattatccattagattcatggctcatctctctcctcactcccattttcccggagtcttataggtagttagtgggggagctggagttagaatccagttatcactactcctacttaattctaccctgacttctctaatcacagaaaacagtgcccttgccttctgagcacttgcttttttactggggaagcgagatacacctataccaattaaagtctaagatatttatcctttctataagacaaaccaaaagcgagatgtcatgatgagaggaaacatttccgagtagagaggaagagtaaatattccaaccctgtatttcacctgtcctttggcattataccactctgtcacctttgccactaacttttagtaccctatgggtccactgctttgcctttaaatctgctagtcagatgccccttggcatgactgagatatgaagaaaatgaaaagggaaagaagtaaacacagcatgcaatgaccgtaaaagtagtctgccttacgtagttttctcatgtcattatatctagctaactcctagggaatattggtaattatacatttgttctgctgggctggtctgatctacctttgagggtatgtttcttagatgggctcctcacttactaaatgactaacactttccagggatggtgacatcttataactcattaagagaactggtcatctagatatataccttgatgacacaggtgagggtcaagagaaccatttatatcaagggttcctcttttttttttttttcattatcctaagtaaacacaagaaggaattcttcttaatatagttctagtttctggtctgtgggctatggctgttctccagatgaatgatctcacctatcaggtaggtgagtccctggttcctcctaatagcgagtagcttggtccctttctgggataataatgtagtcatacagtcccgtggatgactgataacatcaagagggtgaaaattatatacattcaaatgggcttttatcctaatctaataaaatattgctaaataaatggcgtaggcaatgtccttgagaagtctcaacagtcttgaatgaattagcttgaaagacttcttttggatctgttcagaatagaattgcggaagcgagtacggaactgttggatgagccatcagtaagttatgttaggaacatatttgtgtttagcaggtgtgtgatccgtggtagacaaggagcctctggacactgatggtattttatctcagacttaggcttttcaaagaggtaggaatcagattgtgaatacttagccacatttcccagaagttgaaacggaaagagaagcagactcattgcctgttgaagcttgtctgtgtgggctgagctcactcagttggatactttcggccagttattttaaactaaatttaggttttgatgaagttctgaaaaattatcaaatttctgtctagtttcagctccagcgcatgtttaccagcagtatactttacttttcatagctccccccagaattgaatgtgaaaatgtaggttagttgcccacatttcttgagacggaattttttggagaagaaattttttattccatccatccatccaataaacgtgcaaaattatcagaaatagaaatggatgatatatggcccaaaattcaaaaggtacaaaggagcattcagtgaaatgaagtcttcttgccaccccaatacctgagtcacacagtttcttagtcttttttttttttttttgagacggagtctcactctgttgcccaggctggagtgcagtggcgcgatcttggctcactgcaagctccacctctcgggttcacgccgttctcctgtctcagcctccagagtagttgggactacaggcgcctgccgccacgcccagctaattttttgtatttttagtagagacggcgtttcaccatgtgttagccaggctggtctcgatttcctgacctcgtgatctgcccgcctcagcctcccaaagtgctgggattacaggcgtgagccaccgcgcccggccagcttcttactcttataaacatttattaagggcatctctggattagtccaagtgctagatgccgtttattttctgacagtgctttgacatacttgaaatttccaagcataattttacttaaaagtaaaaaaagaaaatacctggccagatgcagtggttcacgcctgtaatcccagcactttgggaggctgaggcaggaggatcacttgagccccagagttggagaccagcctgggcaacatagtgagaccttatctctgcaaataataataataaaaataaccaggggtgtggtggtgcatgcctgtggtcccagctactcaggaggctgaggtgggaggatcgcttgagcccaggaggtcaaggtttctgtgagctatgatcgcaccactgaactccagcctgggcaacagagccagagcacttctcaaataaaaaaggaccaaagaaaaatacctaacctaacttatactgctcattaggatggcacagtgtgataatctaatgtaagccctgtgggggccggaattttaatctgttattcactgctgtattccttatgtttcgtgcaatgtctgcagatattcattgagtacatgaatataaggattaaaaataagagctgagtttgtttttatacccttaatacatcttttgacttttactattggaatttcctatctatagttaagatgttaaagaaaagtaattttctacctttttctcacaaatctccgagtaaggagatttcacagcttttctgggctagtaattgatttttggcatatctcaaacttttactattaggaagatcagtgtatctaaagtaagtcttgcaatttgaattcaaatcccttagttttttgttttttgtttttatatttttgagatagggtttcgctttgtcacctaaggctggagtgcagtgatgtgatcatggctctctgcagcctccacctcctaggttcaagtcatccttctacttcagcctcctgagtacctgggactacaggtgcatgccaccatgcccagctaattttaaaaaattttatttttagtagagatgggggtcttgctatgttgctaggctggtcttgaactcctgggctcaaatgatcctccctctttggcttcccgaagtgttgggattacgggtgtgagccatcacgcctggccaacatcagttttactttaccataacattgctgttattttttgaatcttttttataattttatttctagtttttcactttacaaattttctgtgataaccattgttgtgcacaagtctttgatgtacttctgattttttgctccggatatattgttgaaagggaaattaccgtgccaaagggaacacatgcttgtacggcacctaatatgtatattgccacattgctttccagaaaggctgcactagaattaacctcctgagcagtgtatgagcaggcttggctcactgcaagccacactggctctctttatcttatctgtctccccatctgcctttgttggcttgggggtgtagggcttttaagtctctactacacctctaaacctagtcccatagatatagtacaagtcaggagaaggttatagcagctgtgtaatccatctttccctgtaccaaacctggaagaggaatgacaagaattcaagtgtaaatctaacctttttttgaggcagagtcttgctctgtcacccaggctggagtgcaatggtgcgatctcggctcactgcaacctccgcctcctgggttcaagcgattctcttgcctcagcttccctagtagctgggattacaggtgcccatagccacgcctggctaatttttgtatttttagtagagatgggtttcaccatgttggccaggctggtcttgaactcctgacctcaagtaatccaccccccgcccccagcctctcagagtggtggtattacaggcatgagccaccgcacccggccaagtctcaccttttacttgctttttataaatcatcattctctcctgatctttgataaagggacaaaaacccaaactggagaaattgctgaagggaagaagaaaggttaatgagaaacagactcttgatcacccaaaccattgattttttttttttttttttttgagatggagtctcgctctgttgtccaggctggagtacaatggcgtgatcttggctcactgcaacctctgcctctccggttcaagtgattcccctgcctcagcctcctcagtagctaggattacaggcacgtgccaccacacctggctaatttttgtatttttagtagagacggggtttcaccgtgttagtcaggctgctctccaactcctgactttgtgatccacctgcctcgacctcccaaagtgctgggattacaggagtgagccattgcaccttgcctctccactgactttttttttttttgagacggagtctcactctgtcacccaggctggagtgcagtggcgcagtctctgctcactgcaacctctgcctcctgggttcaagagattctcctgcctcagcctcccaggtagctgggactacgggcgcccaccaccacacccggctaatttttttgtatttttagtagagacggggtttcaccatgctggccagggtggtcttgaactcctacctcgtgatccactcgcctcggcctcccagagtgctgggattataggcgtgagccactgcacccagcctaccattgatttttaaataactattttttggtaaaccagcgtgagaatttcagagattaataaaagttgtaaattgctcctccctcgttttaatggtgaaaagatagtcaaggagattgtgaaggagaaagttatatgaataaatatggtaatgcagcagtcctatcatgtttaaatttgctgtgtgcattgtactttatgggttaagagattttcaagggtaattgggccatataggatattgtgcttagtatgttgtggggttatgactgtggaattatctgtgttttggacatttggtggtaactgcttttcttttatctccaatagaagccctcctatacagtaagttttggttatgatgtgcttagttaattgaggggaaaaactgataaagcaggaaaatcagaaatatatattcatgcattaatctttttttggtttttcttttttatgtagacggagtcttgctctgtcgcccaggctggaagtgcagtggcatgatctcggctcactgcaacctctgcctcctgagtagctgggactataggcacatgccaccatgcccggccaatttttgtattttttgtagagatggggtttcgccatgttggccaggatggtctcgaattcctgagctcaggcagttcgcctgcttcggtctcctaaagtgctaggcttacaggcatgagccaccatgcctggctcatgcattactcttttaaaaagtatgtattgtggaaaatttcaaacataaatgaaagtagagggaataatataatgaacccctatgtgcctgtcgcctagtttaaacagttgtcatcttgtgaccaatcttgcatttatacctttcccacttccccgcttttttcctggattttgaagcatatcccagaatcctttcatttcatcggtagatattttggcatgtatctctaaatagatgaagattctttaaacaaacaaacaaaaccaaaccccagggctgggtatggtggttcatgcctgccatcccagcactttgggaggtctaggtaggtggatcgcttgaggctagctagttcaaaaccagcctgagcagcacggtagtagtgaggccccatctctaccaaaaaataaaaataagtgagcggtggatggtggtaagtggctgtagttctagctacttgggaggttgagctgggaggattgcttgagcccaggagttccagattacagtgcagtaaactatggttgcgccactgcattccagcctgtgtgacagagaccctgtctctaaaaaggaaagaaagaaaagagagagaaaagaaagaaagaaagattgattagcacataggttaatatcaaaatatcttaacctatgttaacaaacattaatgttttttgttaatattaaatattaatgtttgttaacataggttaatattttgttaacctgttgatgcagggccaaggctttttctttgtgtgccctagttggagttccttaattttgtttccattaaatacacccataattcattatctataatttccagttttgtttgctttttaaagcagaacatgaatttaatggcatttgtgaagcaatattagtacagcatccctcttgatttttatgactccttcccagtcttttatactcatctcattcacgtctaatttactatgtctttttaagcatttgatgaagttttcatagaaacgtatctccttaatttttcatcagtttacattctatttaattaaattacataactgtaataatgagcaactggtataaataggtttgggaaaaaaacagttaattattggtaagaatataacttaataacgggaggctgggcccggcgcggtggctcatgcctgtaattgcagcactttgggaggcccaggcaggcggatcacctgaggtcaggagttccagaccagcctggccaacctggtgaaaccctgtctctactaaaaatacaaaaattagctgggtgtgttggtgcatgcctgtaatcctagctactcgagaggtctgaggcaggagaattgcttgaacctgggaggcagaggttgcagtgagccaagatcctgccactgtactgcagcctgggccacagagcgagactccatctcaaacaaaccaaccacaaaaaaaccaaaaaacttaataatgggagcagcagaagcttataagagtaagagacagctgttattagttggggccagtttgcatgttgggggcattggttgctttactgagacaaggagaagcattgattattttggcaggttggttgagtgaaggtgggctaagagagcttctgcgttaatttaaaatgataaagaagtcaaagctgttagaaatttgaggacaagttattttatagaatcttttattatttatagtgtgtacttcgaggtggtatttttgtccacttatgttagaatttgtgtgaactgagctgaatttggtaatgagtcagtggtattaaaaacttggtgaagaaactggccaaactctttagtttaagaggtttatatctgttcactgctagtgtagtgttctgtggaacaagttgacattttcttgtagtaagttgttttctgtttctggcggaagcaatcttggttcatatgctgcaagaaacagaactgtttttattgtggaagacaggagcagagctgtgtgtttcttattaggatgagttggacacctgcaggatttcttctctctttctgcttcttgcctcctgttgtcttttccttctgttagaatgttctaatattgcataagcagcattccgacaatagttgaatttttttggtacttcatttttttaaactctcaaaataatgtttttagtgattgtatgttcttggcttactttccatttctacatcaacagggatattgttattctagtcaaatggggtagttgtattctggcaatgatctttgggtccaagtcagctgcagaaacaacactttcatatattatacctaaatatcttacatgtgtatggtaattctgggaggtaattaaatgttgggatggtactttaggatctctttaaaggatttcacagttctcaggaataaaataacttgtttgaagcatgttactcattggcctttgaccatgcaaaagggtagccagtgattttagcctactgcctcttccgatctcattttcctcctttcttttgaggcagcagctgcatccagtgccctgctctaattgagctcttagtaaaaggggtattgttataccaagtcacaacctcgtatagcagtgaggttacatcaatggttgttagatttttaggccacgcatccattttggagtcacattaaattttgaaaaccaaaatttagttgcattacctaaatttctcttccttttcttatcctgataccaggataagaataggttttctgtttttccagctctttgtggaacctttttggcccatcagagttgcttgcgacaatctgtagttaaagaactgagactggtgcgggaatcgggatgtttctggttccagtttttactagccagcagtttgactttgggcaaattacttaacctcagggggcttccagtttctctttaatttataattttttcaactgctttattgaggtacatttcacagaccatacagttcacccaattttttttaagtgtattcatggagctgtgcgaccatcactataatacattttagaacattttcattatccttaaaagaagcatggtacccattagcagtcactgcttatttcttcaacctctcttctcagccctaagcaaccacaaattaatttttatcgatttacgtcatctggacacttcatataaatagaattatgcagtgggtgtcctgttgtattttacttctttcacttggtgtaatgccttcaaggttcatgcatgttcttacatatgttggaatctcattatttttttatggctgaataatattatgttgtatggatacgccacatttttaaaatcaattcatgaattggtgggcattgtttctacttattggcgattatgaataatatggtcttgaacatttgtgtacaaatttctgtgtgatcatgttttcatttttttcttgggcatatacctaggagtggaatcgcttggtcatgtggtgactccttgtttaaggttttgagcaacttccaaactgttttccacagtagctgccccattttatattcttacctgcaatgtatgagggtttctgttctgtctacatccaaaacttattttcttttttttgattttagccatcctagtggatgtgaagaagtattgcattgtggttttgatctacatttccctaatgaacaatggtagtgagcatcatttcatgtgccagttgatcatttgtatatttcctttggagaaatgtctattaacatcctttgcccatttttgaattggattatttgtctttttattgctgagttgtaagagttctttatgtttgggatacaagtcccttatcggatacatgatttacaaatattttctgccattctgtgggttgtcttttcagtttcttggtagtgttgtttgcagcacaagtgtctttaattttgattctctagtttcttaatttatatagttgtttaaactctgaaactatatgttttattgagattattttcctctgtgctcattctgtactttctcccatgttcatatagctctctctttcccgggacgttttctagcctcaaagactttatttttttgattaatttatttattttgagacggagtctcgctctgtcgcccacgctggagtgcagtggcgccatctcggctcactgcaagctccgcctcccaggttcatgccattctcctgcctcagcctcctgagtagctgggactacaggtacctgccatcacgcccggctaatcttttgtaatttttagtagagacggggtttcaccgtgttagccaggatggtcttgatctcctgaccttgtgatccgcctgcctcggccttccaaagtgctgtgattacaggtgtgagccactgcgcccggcctctagcctcaaagactttaaaaacatctgtctatgtatttgcctctctaatacatgtgtcttacaaaataatcaaaccttacaaaatgtataacaaagaaagtgaaagttcctcatctctccagagaaaacattaactatttataaccagattttttccccattcacatggtaaaaattttttttaattaaaaaagggaacataccacaatctagtttgccacttgttttttcatttaatagtatatctccaacattattccatgtcagtacactttgtccttgtctcaatcattttaatggctgcagagtattctattttatggatatactatactttacatagtagcctattgatagattttagggttgtttctagatattgttttatttttttgagacagagtttctctgtcacccatgctggagtgcaatggcatgatcttggctcactgcaacttctgcctcccagattcgagtgattctcccacctcagcctcccaagtagctgggattacaggtgcgcgccaccacacccagctaatttttgtatttttagtagagacggggtttcaccatgttggcttggctggtcacgaactcctggccttgagtgatccccctgcctcagcctcccaaagtgctgggattacaggtgtgagtcagcgtgcccagcccagattttattgttttaattacaaattttacgtaagttgtttctgcacatttatatttgcacacttgtgctagtggtttttttttctattccatttatttgctattgcagtatttactattcaaaacacgtagacttattttaaaaaataaaagaattttatttagtgtgacctagagtcaacgtctcaaaagttatgtattcttttccatcatgatatatacaatgttctgatcttcttttaaagccagagtcttcattttcttggtaattgtatagaataatttactagaagtggaatgcttggatcaaagtatgagtgcttaaaatcatgtaagatgttgccacatcaccctccaagtaaggccatgccaattcactcagcttgagagtgtatgacagtgatttttctgttctttttaaccctggcaaatagcctttttagggaattaatctgacaggtgaaaaaatgtcattttattatttgtagttacttattagtacattcgagcatcatttaatttgtctgttggttgtctttctgctttgtctacttttctgttgggcttttggctttttcttattcatcagttgtcatagctttattattattattaatgttttaaaaaaattgagttggagtctcactctgtcacccaggctggagtacagtggtgcaatcttggctctctgaaacctctgcctcccaaattcaaatggttctcatgtctcagcctcccaaaatgctgggattacaggcatgagctgctgtgcctggcctgtaatagctttttaatattagggaaattagttaccttataaaatatattactgatatttttctttgtcttttgactttgtgtgtgtgtctaatataaaatgaaaatgcttttatttttatagtcagatttttctgtttttttttctctttatggcttgctttttaaaattctaattatataaaaatatttacccatttttttcaactacttttatggttttgtttttaaatgtaaatctttgcttcatgtgaaatgcattttgatataaaccaaatgagataggggatgagttgtagaatttattagagttgtaaatttacatttatttttgtgattattaatggcttattcctacttgactgtaagtctcatgagggcaatgtattgtgttgttttgtttttcccttgctcttattttcagtgtctagcacaatgcttgccttgtaatacaccctccatttattgaataaatgagtctaggtttttctccaggtctctagcttctcctgacacaattaattgcataattgctcttttccttcttgatttaaaaagcaacactatcatttacaaaactccaatagatacttaggtacatttctgaattctaatccattgagtgtgctgtcttttcttgctttgatactgtacagctttaattatgatagctttatacaacttaaagtatatttgggaggccagctttaagcactcttaaatatattataccacagtttgggaagctctataatctcctttattaaactttttgctatacctttggaaacattcatttaacttaacaattaaacacttaatccattctgaaagtcagcctgcaaagcagaaatgatttttggggtgttatttggtgtaaagagtttttttttttttaggatatcatacttaattctggcatgacctctttagtgtcttttaaaaaactctcattttataactttgggcatttctagaaaagcaacatttttctcacagttttctaatgcaaaatacacagaggggtaggtggcagaaaaggtatcgagatgattgtgttggcaccccactgatgtcgaagcagatagtggaaaagacattacttaaaagtgttttgcagatttcgggttaaattaaaaatatgacaattttaatttaatttaattaaaaatatgacaattctcaggccgggtgtggtggctcacgcctataatcccagcactttgggaggccaaggcgggcggattgcctgaggtcaggagtttgagaccagtctggccaacatggtgaaaccccatctctactaaaaatacaaaaaaattagctgggcctgtaatcccagctacttgggaggctgaggcaggagacttgcttaaccagggaggtggaggttgcagtgagccaagatcatgccactgcactacagctgggtgacaaagcaagactccgtctcaaaaaaaaaaaaaaaaaaaaggtgttatgcagatttcagtttagccaccttgatcctcccaccttgtgcatgacacgttaccttcctgtggcatgcagtatttgactgattcattggatgtgacttgcattaagttcagataacattgctgaataatcactttcttattctttagtgtagcctcctttctctgtagaacatcagaaattcttaaactctgaaatacagcattctcttgggattttctgtaatgtctttctcatgtaggaaccaacttcagggtcttgtgagcatcagagaagtttaaggtctagggaactgagctaatggaacaaggcatgcctaatgtgataaaatccttgctttctttgcaattgaaattgtttattctaaataactgctaatttacaaatgtattttcacatgattacccattctgttctcaaagagcataataggggttttgtgactttcagactttcctgaaaaagcctaaccgtggattttagaattattaagctagaaaaatacacacatacacacacaggtttgtttgggacccttagtctccaccctggaattaagtgacactgaaaataactctggaataaaaggtttttatgtagcagaatagttgacttacaggggttcttccctttgcacattttctctgggtagaaaatgagcttgtttttcttttagttgtattacaattttttttttcctcaatgctagtcttaactgagagatttttaggcagttaactctcccagcacagcaataagcagcttattagtagatattatctcttgttgatttgttacccttgagatttactgtgcttgcaaaacacctgtctgtatttgagctttgctaggtagttggcttttgtgtttgactgaagattttttccaaagaaagcaaatagctattaggaaaagaaagagtcagcaaatttctgtatgctttcatggaagagatttcccaattagaaagcttttgtaggcttaaccttttgccctaaagtaacccaacatttcattatgtattccattgaggttttggagctcggcaccagaaagcgaggaccaaggttgaatgtgaaaggaatattcagaggatgaagctcatagtcaacaaagtgctgcttcataggctaggtccaaaaataacctgcttgccatagggagcaagaatggaggtagcattagctgctgttttgagcagtgtttcatgtcctgtcatgtcattccagaatggttttttggttttgtttagagacagggtcttgctctgttgaccaggccagagtgcagtgtggtgtgattgtagctcacagtcacctcaaactcctgggctcaagtgatcctcccatctcagtttcctgaatagctaggactacagacacacaccattgcacttggctagtggttttatttttagtatagacagtgtctcggtttgttgcctaggctggtctcaaactcctggcctgaagcagttatcctaccttggccttccaaagcactggaattataggcatgagcagccacacctggtctcattccagaataattaaaattatgtttaaggcagccgggtgcagtggctcatgcctgtaatctcagtactttgggaggccgaggcgggtggatcatgaggtcaggagttcaagaccagcctggccaatatggtgaaaccccgtctctactaaaaatacaaaataaaaatacaaaaattagccgggtatggtaattagcgggtgcctgtaatcccagctacttgggagtctgaggcagagaattgcttgaacccgggaggtggaggttgcagtgagccaagatcgcgccactgcactgcagcctgggtgacagagtgagactccatctcgaaaaaaaaaaaattgtgtttaaggcaatatcatttaaaattttattttgggagaatgttgccttggtaaattggtaaataacagttgttctgaaaggtttcggaagaatgcctttctgctaaattgaagaaattaacataatttactcttctgtaaatagggggatggtctgcattgtgctcatttaatcattggagttcaaattaatgatttgctggggtcctgtggtgaatcttgagtgattaagagggagaactcagtccttggttcagaaaagttagcattggaatggatcctcaacaggccctgaaggtaggaagtgttctgatttagagagctcttccaaggcttgtgatggaaccctgcaacggtaagttttacgagtatcagtaactggccgggtgcagtggctcacacctgtaatcccagcactttgggaggctgtggtgggtggatcacctaagatcaggagttggagaccagcctggccaacatggtgaaaccccgtctctactaaatatgcaaaaattagccagccatggtggcaggcgcctgtaatcccagctactagagaggctgaggcaggagaattgcttgaacccaggaggtggaggttgcagtgagccgagatcgtgcattgcactccagcctgggcaacaagagcaaaaaactgtctcaaaaaaaaaaaaaaaaaaaaaaaaaagccaggcttggtggctcacgcctataatcccagcactttgggagccaatgtgggcagatcataaggtcaggagatcgagaccatcttggctaacactgtgaaaccccatctctactaaaaataaaaaaaaaattagccaggtgtggtggcgggcacctgtagtcccagctccttgggaggctgaagcaggagaatggcgtgaacctgggaggcggagcttgcagtgagccgagatcgtgccactgcactccagcctgggcagcagagctgagattcctcaaaaaaaaaaaaaaagaaaaaaaaataatcaataacatagaatgtggatatacatagcacatagatacgtatagcaagtcaggaagtttgcctagaaggaataaattaactcttgttacttggtgagatcatggaagggaatgtaatttgttttaggtggtggtaattgtgagtttgaggctggcccaggaaatgagttgtcagatatgctgtcatcctcattaatggttcagcttatttctcaggtttatagttgtatgaggagatgctatgcctaccccatttagggaactattaggttcaaaatcataaaagctaaagaagagtgaaatacagtgaaaagtatcctgttcacacataccccatgatcatccagatttcccttcccaggggcagttgatattatctgtgtcttatatgtcttgagatagtttatgtgtatagaagtaaatgtaaatatctactacttatttcctcttttaacacaaattatagtaaataatatacaatagtctgcatcttacttttttcactctcgtatctaatgttaaaaaagctacgtggtattccaatgaaaggatgtattatatatattttttagatatttcatttgagttgttttttttttttgttttgagacggagtctctctctgtcacccaggctggagtgcaatggcgcgatcttgactcactgcaacctccacctccctggttcaagcaatttccctgcctcagtcccctcagtagctgggattacaggctcatgccaccacacctggctaatttttttttgtatttttagtagagacagggtttcaccatgttggctagactggtcccaaactcctgacctcagggaatcctcctgcctgggcctcccaaagtgctgggattacaggcgtgagccaccacgcctggccttgagttgtttctaagctgttgctaataaaacaatgctagaggatttaaaaaaatatgttagggttttatattgacaagtaaatattgtcataatagaaacttgctatacttataataataatacatctatagaacatgttcataaatgtctatttgagccttcctgtaaggtaagtacaacattttatcacttcataactagtaaagtggcagaagtagaggtagaaccaaggtcttctgactcctatttgagtatctgtctactttacccaaaatacatatactgttgtggggctgtagggaagtgggggtgggaaaataagaggaagtagacctaggtggggcaagcttgagatagggatgtatctgtcattctagaaattgggatcctgtttgctaggagtaagtggaactggacatcagcctgttacagggacataaaggcacttaggcactggcagagcactatggtttgattgccatcttggagtacagtagtatggtaagccaaagagtggtagttctggagaagctggggactgtcagagctccctagaatagactgagagtgaaacagcattcacgatttgctaaggaggctgggctactaggaaggataaggtaggagcccaggagttcagggctgcagtgaattatgattgtgccactgcattctagccttggcaacagagcaagaccctgtctcttaaaaatattggtcaagaccataaaacaagaacataggccatagtgaaaacataaaattttcttagcagctgtggtagcaaacatgttaatggtaaggagataactgtaatgttagtcaattttggcttaagactgaggactgagaaacagccttcttcctccggaggagcagttaagtcatcttacaactgggagtagagagacaaggacgtgtgaagctgattcatgctttcattatatagttaatactatttggaaacctgtgtgtaggtctggtcaatagacttccatcttaattgctgtatgctaagtgcctcctatgttctgtatacttcatataattcttgctagccttcaacagctttttacaaagtaactattgttttacctaatttctattgagaaaaatgagcttcacttaggtaacttgtccaaagttctttaccttgtaagtggtagagctgagatttataagtaggtctatatgactccagggctcttgttctttccacgataccaggtattaggcatcaaaattggacagtagaattctaatcacagctgtacataaccagaaagtatgagtatggatgagtgttagcatgtaaccagacaacttgtctgttatggatgatttgggctgaaagagtagaaggaatgctaaggaaaatgagcattggagatgttgagagctcgcaaactcatgatgaatgtgtatataatttaagtaatgcacttgctgtgcatatgtagagccttaagataaaatttccaatgctcccttccctcattaggtttttctttctaaagtccttctatattgagattatatagctgccactaaagactgtagctggtagtagccaggacctggaactttttggcaagagggtgttatctggaggatccaagtatactgagatcaacataatcatgaattcttctcccactgtaaagtttgaggaggtaagaatctccttgacttagcaaatttgggcttataaatgctaggtccaactagactttactggcctcaatcccttagcattatcctgcaaaatactgatgtatactttttggataatacctttgatctactttcagccaccattgtagggaattgttagtatgagaggttgacattttggttaaataatcacttggaaactgtgactcagcattagtcactggctttctgctgggttacattctcttgtctcttgccttaattgtggtaagcctcagccatttgattacacaactaccaaagaggatgaccttagtgataacccattcacattttcagatagtaaaaatattagggacaaaatctttcatatgtattagcgagtggtatgggttcgcctctggagaaatgttagcacattttccaggtttgcccgatgatattaaaagatgaatagctatcttagtgaaaatagctgtttacacttttagttagtagtttttaaaagtggaaatgtaacaatatgctttttggacacagtcatgttattttatttttatttttatttttattttttttgagacggagttttgctcttgtgcaggctggagtgccgtggcatgatctgggctcactgcaatttctgcctccctggttcaagcgattctcctacctcagcctcgctggtagctgggattacaggcacatgccaccaggcctggctaatttttgtattttttgtggagatggggttttgccatgttggccaggctggtctcgaactcctgacctctggtgatctgcccaccttggcctcccaaagtgctgggattacaggtgtgagccaccacgcctggctgtggatatagtcattttagtatttgagattaaatattaaacctcatttggcgaactttaaaaccatcagtgatttgagttaattctacctgttttaccttatttttcaccagtgtgtgtttcctcactgcctcattatattgccacatttaatctttcattaaaacaaacaaacaaacacaactcttggctgggtgtggtggctcacacctgtaatcccggtactttggaaggctgaggtgggaggattccttgagttctagaccagcctggtcaacatagggagattctctctctcctgaaaaaaaaaaaaaaaaaaaaaaattaaccaagcatggtggcacacatctgtagtcccagctactcaataggcaaagtgagaggattgcttgagcctgggaggttgaggctgcagtgaacatgatcaaaccactgcattccagcctggaggacagagcgagaccctgtcttacaaaacaaaacaacaactcttggaatttctcttttcccctcccttcttcttccccttcttccttctatttatccttctgtttcatctacaaatatttgagtgtcactgtgttctaggcactgtgccagacattgggattcgttggtaagcaagagagagaggcatggcctctgtccttatgagcttgcagtttatcctagtgttacttatctagtctgccctgccttcaaggttcagtggaagcccgatcttcatgtagtcctttgacttctttggcccttgcaaacctatccctttgacctatgctactttaaatctgattcatacaatttagcatttattgatataatttcttatactgtgggctaattgtttaaatatcttgttttactggctagagtatagttccttaaggacagagactgtcatgttattttttttttttttgcaatactgagcccaaaggttttgatttcagtctgccctgctgaatgttgaagttactagtagctcttgggacttagaagtagtgatgagataatgccttgctttttagtttattttctattttgttttattttatgtttcttttttgaaatggtattgggctggccgcagtggctcacgcttgtaatctcagcactttgggaggccgacgtgggtggatcacctggccaacatggtgaaaccccgtctctactaaaaagacaaaaagttagccaggtgtggtggcgggggcctgtaatcccagctactagggaggctgagacaggagaattgctcgaacccgggaggcggaggttgtggtgagctgagatcgcaccattgtactccagtgtgggcaacacgagtgaaacttcgtcacaaaaaaaaaaaaaaaaagaaaaagggccgggcgcagtggctcacacctgtaaccccagcactttggaaggcagaggcgggtggatcacctgaggtcaggagttcgagaccagcctggccaacatggcgaaaccctgtctctactaaaaatacaaaaattagctcgtgtgatggcgggcgcctgtcatcccaactactgaggaggctgaggcaggagaatctcttgaacccaggagatggaggttgcagtgagccgagatcgtgccattgcactccagcctgggcgacaagagtgaaactctgtctcaaaaaagaaaaaaaaaaaaaggtattgttcagtcatccaggctggagtaaagtggcacaatcatggctcactgcagccttgaattactgggctcaagtgatcttcttatcttagcttcctgagtagctgggattacaggcagtagcgaccatgcctggtagattatccctttaaaaaaattccttctagttgtttgcctaatatttgttatctgcttctgttaatctgtgctaaaaatgagtggaaatgaccttactgattcactatttgcatttatattgttttctagtgaaggggttgtatttgaggttaccattgcatagcttctcatctagttctccttgtgacattataatgagggatgcatttcatgactaaggaatagagctaagctaatgttgatctcttagtagcatgttgtaatcttttgggcttaaatgccctatcactatgccttagttcatgaagtgttaaaagtaactcacctaaaatgggaagcggagaatgtaataacttaaagatcaaaatcgaatttctcataaagatttttagaaatagaaaataatcttttaatgggccaacattatttacattttatgatgttagagatcaaaactcttcctgagtagtaaatgaatgtggcgacttaaatgtgaaggagggaggctgtgtgattgacttaaatgtttttctgaatgtgctaaaagctctgaggtaatggcaaacttcaatattggaaatagaagggatatattctttattaagaaggagaatagagggtactgggggaaggaaatgctcttttgcctacacttaaaaattaagaaggtaagtatatgaaattgaaggggtaaaagaccacagagcaggagacaaggaaaccgttatttccctctgaaataattctagatggtgatttgaacaaaccagttgctaaaaaacttatatgataattggggcagtttgaacattgactgggtatctgatgttaaggaattattctcttcagatggggcagtagtatggtggtcatattgcagacaaaaagtacttaccttttagaaatatatactgaaatacatatggatgacggaatgtgtctgagatttgctgggggaaaggaagaagtggtcagcagtatagataaaatggccatgtatttatttataactgtctaagctggctgatgggtacaagaggcacattgtattatttctttctacttatatatatgtttgaaaatttccataaaataacaacaacaaacccccccccccccaaaaaaaaatcttaacaactaccagaactggcagaattgtcaagcctacccctttatcttctttctctctaattttagatgggcaagtaaagccatagattcatgctgatgtttccaaatgggaatgcagtttagatttccatccccttaagtttcaatctatctgtagtgcagcatcactgagagaacaagccctgctattttcccagcagtgtggtaagttacaacagggtaggagtcatactacccatctttaaggctcttcctccttataggtgaagaaataagatttaaaaagcaaaacataattagagaataggaaaatgtggtttaaaattatatgtcatattttatagttctggccaaacataagaaattctagagaaaggaaagaacattttgggttaggaataaccaaaggcttttcttttgaaacagggtctcactctgtcacccagtttggagtgcagtggtgcatttatggctcactgtggcctcaaccgcttgggctcgctgcagcctcagcctcctgggctcagctgcctgagtagctgggactacaggcatgcgccacctgtccagctaatttttgtattactttagagatagggtctcgctatattgcccaggctggtttcaaactcctgggctcaagtgaccctcctactttggcctcgcaaagtgctaggtttacaggcatgagccatcatgccagaccacaaagacattttttattaggccagtggatgttcggatcatctttaaacaacattgaaagttgaattgctgacagtaatatggggatagcattccagggagagaaaatactatgtttggtggagaatagatgaatttggattggggaacagaagatatttttgatgggtaggatggggtcatttcataaaggacatgaatttttagttgagacatttgggcttgatcttatagaccttaaggagccatttttggggtgtggggaaccatttttgacccttaagctacctaagtatttattaatttggtttgatgataatattgtgtattcttagttgcaggcttttgcatagagagtataacttgactttgtagcctttacattctttttaacataaatttgttatttccacagtgttccaaaagttattcagggaccagaattaatatttattttttacaaattatttatttatttatttttgagacagggtcttgttctgttgcccaggctggagtgcagtggcgcgatctcggctcactgcagcctccgcctcccgggttgaagcgattctgcctcaacctccccagtagcttggactacaggtgcctgtcaccatgcccagctaatttttgtatttttagtagagatggggtttcaccatgttggcctggctggtttcgaactcctgacctcaagtgatcctcccgccttggcctctcaaagtgctgggattacaggcatgagccaccgtgcctggccacattttgatatttttaatcaactttattgaggcataatttacattcaataagattgaaccattttaagtttacaatttgaattttgacaaatatacacacccatttaataaccatacaatcaagatacagaacaattcagtctcgcagaaagttacagtagcactgtttgcattcattctcatcctcctccacttccagaaaaccactgatttgctgtcaccataggttagttttgctttttctggaatttcatataaatggcctcatctaggatgtactcttctttcatcagcattctttaagattcatttattgttgtttgtatcagagtttgttgttttttattgctgagtggtaatctgagtagtgttacattgtatggatgtaacaagatttgtttattcattcacctattgatgaacatttggattgtgtctggttttcttgcttttatgaataaggctgttatgaacttcatgtacagctttgcgtagatgtatgttttcatttctcttaggtaaataccttacagtggaatggctgggtcatatggttggtaggtttatgtttaacttttaaagaaactgccaaattgtcttccaaagttgccgtaccattttatattctctttagcaatatatgagataggagagttctagttgctttaaatccttaccattgctaaaatgatatatcttaaattttagttgttccaatagttgtgtcatggtatcttgtggttttaatttacatttccctaatgactaatgatattgagtatctttttatgtacttattttcatgctgtgtatcttctttggtgaagcatttgttcagatcttttgctcattaaaagaaatgggctgaccgggcacagtggctcatgcatgcctgtaatcccagcactttgggaggccaaagtgggaggaccacttgaagccaggagttcgagaccaccctgggcaacaagcgacactctgtctctacaaaaaacttaagaattagctgggtgcttggcatgtgcctttagtcccagctattcaggagtttaaggtggggggatcacttgagcctagctgtttaaggctgcagtgagctgtgatggtgccattgcactccaacttgagtgacagagcaagaccctgtctttccaaaaaaaaaaaaaaaaggattgtttctttatagttgaatattgagaattctttatatatcctggatacaagtcctgtgttatataaatgctttacgctttgcaaagattttttttttttccgattccatggcttattttttcattctttcagcagtgtcttttgaagagcaagagtttttagaggccaggtgcggtggctcacgcctgtaatcccagtactttgggaggccgagttgggtggatcacttaaggtcaggagtttgagaccagcctgaccaacatggtgaaacctcatctctatgaaaatacaaaaattagccagacatggtggcgtgtgcctgtaatcccagctactcaggaggctgaggcaggagaatcacttgaatccggaggcggaggttgcagtgagctgaggtcacaccactgcactccagcctgggtgacagagcaaaactccatctcaaaaaaaaaaaaaagaagaaaagaaaagaaaaataaagtattctagtgaagaccggattccttggcataagacaccaggaattttagattgataggagtaaaaataaataaagaaatattggctcagggaataaacttcattaaaatcaatttatgggccaggtttggcggctcacacctgtaattgtgcagcactttgggagactgaggtgggcagatcacttggggccaggagttcgagaccagcctggccaacagagtgaagccctgtctctactgaaaatacaaaaattagccaggtgtggtggtgcatgcctgtaataccagctactagggtggctgaggcagatgaattgcttgaatcctggaggtagtggttgcagtgagctgagatcgtgccactacactccaacagtgtgagactctgtgtcaaaaaaaaaaaaaaatcaatttatgaaagttatttttaaatttgaagatattgaagatactaaatttgtgtttaaaaagcatttattttgatcaactccgctgtatagaatattttgtcttaagtcactgtaaagtttccatgccctcaaatgaaatacagtgccaggtttaacattcgttttcatggattgttttcaaaagttattgagttgtctgatttgctgtaaaaaaaatgaaaaattcatttcttttattaacatgatgtatttactgtgattattctaatagactaatggacttttaattttactgtttaaaatagtttataattaaaatttaatatccagtcttcacttgttctttcattttttaaaataataaagtagtttggggtttatcagaacaagggaagaaaccaagctacgtctcattttatgttgggtaagaatcactagagacgaaattattattattattattgttattattattattattattatttttgagatggagtctccctgtgtcacccaggctggagtgcagtggtgcaatctcagctcgctgcaacctctgcctgctgggttcaagcagttcttctgcctcagcctcccgagtagctgggactacaggcgtgtgccaccttgcccagctaattttttgtatttttagtggagatggggtttcaccatgctgaccgggctggttttgaactcctgacctcgtgatctgcccacctcggcttcccaaagtgctgggattacaggcgtgagccaccgcctggccgacaaagttactttctatgggatcaattcctgagttttatctaacacgagaattttagcaattaaaagtcaagtgcagttcagatatattagtttaggtaatatttttagtgtttgaagagagctcaatttgtaagccatttagctactaattaccctgcctttgctgtagaaagaacttaaatgaaagacctgttttaagatgcctttttaaaaagcagccgttgtaggtataagagttgaaaaatcaagatctaggcagcagtggagaattatgaagtctgataagataatatgctaaaattgtattgttaattctgatttgtgacagtgcttatcagtagaaaagaaatgtgatctgtggttaaagactgaactgccactaaatgtaaaatgttttttagatgagttggaagaatgctgaaccagtctttattgcccaagatggctttgagtcagcaatctcaaagaataaagaaaaaggagttaagagtgagaggcaataagtaatatgctgttttcatttaagatgtcttgaagagataattaaaaagttgtaggggtataggaattgtgatgtttctctggtgttaatgaagtctactataaattagataatacaggcactctaaattattgtttttccttttttaaattcttggcagttactgacaaattatactcaggatcaagtttaagtctcagtacatgaatgaccctgacattgaaaaccctgaaggatgttgaccttagttttgacctggctttatcctgagcagcctctgtgaattcttaatgctgtgctctttaacaggggtactttttccagatgtttttgatactgtattcattaacatataataaagttatcagtgtccctgaaggctaattttttttttctgactgaatatgagatatggagcgtgcaatttgtacttattggtattaacattaccaacaaggtttgtctttttcttataagatggggaatcttaagaaacttcaggccaggcgtggtggctcatgcctgtaatcctagctttgggaagctgaagtggggcgaatcacttgagatcaggagttcgagaacagcctggccaaggtgaaaccccgtctctactaaaaatacaaaaaattagccaggcgtagtggtggatgcctgtaattccagctacttgggaggctgaggcccgggagacagaggttgcagtgagccgagatcatgccattacactccagcctgggcaacagggtgagattccatctaaaaaaaaaaaaaaaaaagaaacttcattaagaagttaaagcctgggtatgctctccttgataatttctttttactcacatctttattggtaaatcaggccagaaggattatttaccttttcagaaagggaaactaggttctacggtttggttacagatagcctggcagctgactttacattgggcagaggagactgccgtacttagtggttctgagaaaccaagagagtattgcctgctacagctatgagaaaaggtattgaatcttccccctcctttgtgggggaattccaatctcactaatttatggtttcagtgtagttatggtcatagcttctgagacgtgggtactcattgaagctaacagttttagagaaaggggagggtgtttaattccaataactggtagtttatatcactttaataatttagacccaatgatatgaagattagttagtataaggcagatatacatgtaatacattcttttaaatattgtacaaggagtaagaaacccctttaagtagtcatgtaattcattatagcagctgaacatttctaagtgcaacattataggaaaccagtaaagctgatttctgatttatctgcagcaaaagaatttaatattccaacttcagcaaaaggcaattaaaaacaaacttaaatcacattgtgtgcttttaatacgtatgtttttttccatgctgtctgatgtattttagttcttagtcatttacttccattagtttccaaattggttgagggaattaaattggtagccaagttacctatacaagattttcctactgtgtatgtgaaccactctttctgggaaaatcctcccgttggcacttttcttgaaggcatgcactttttccacacttagtgatttggggactgaagcctgcatttagcctgtatttagtcagaggtgacaaatggctaaattttttttttccagtttagagattgagaaatgattcagaattgaaactaaagtgaatttggacttactgtatttctttgcaattacttttaaacaattgctgtctgttactattaggcatattttggacctatgggttccattttgggccgatatttggtgttatgttgttaaatttcttgcctggcttagatggttcattgttgaaactaaactggaactaggtttgatcagagggccaatggaaatgcacgttgtggcccatttggggaggacaaaatttgacatatttttactttaagaattcttaggaaaatttggataacgtgagaatatatttccaaagggttaagtaattttcgagggaaaatcagaaagcttgtaattcctactgaaaatattagcctgctgaaatattagcctatttcctactgaaaatataacattagcaggccgggcacagtggagttcacgcctggctaatttttgtatttttagtagagatggggtttcaccatgttggccaggctggtcttgaactcctgacctcaaatgatctgcctacctacgcctcccaaagtgctgggattacaggcgtgaaccactgtgcctggcttgacttttttatttaaaaaaaaaaaatctatacccaattgccctatcagtttatcatttactcacttatttgaaacggtcatattaacatacactctttatttatttatgtgcctatactttgttttaattactgtatctttagaatatgtttcaaaatttcattaactattataattgattctctttttttgtaacgtatcatcagcaaataataatttggactcttctaatatttctgcttatttattgacattttcaaagaatagcttatgattgataataatcataccagcgaatacagtgcttttcaacttaaatatgcacagcaattacctgaggatcttattaaaatgaagactcagtagggctggagtggcctgagagtctgcattttgacaagctcccaggtaatgttgacttatgggttcatagaccttatgttgagttacagggaactaagatttattgagtacttaatttgttctggtcagtgcttttacatctgtgaactcgtttaatctttaaaactccatgatgattattatccccaatttgccagtgaagaaactgacacttagagaagtttataacttacccaaagtgacgcaaccattaagtggaagagccagactgagcccaagcagagtttgcactctgaacctctcgaatatattgctttaccacatgcgtgttcgctcacacacacacacaacagacattatcttctcttgtgtgactcaaatggtaataccttaaaattttttttttaatgaataggctttattttatctattttttgagatggggtcttgctctgttgcccaggagtgcagtggtatgatcgcagcttaccacagccctgaacttctgggctcaagccatcttcctgcctcagcctcctgagtagctgggactaccggtgtgtgccaccatgcccaactaatttttaatttttgatagagacgaggtcttactgtgttagccctgcctggtctcaaactcctggcctcaagcgatcccttcacctcagcctccaaaagttctgatattacaggtgtgagccacagcatctggccaggctttatgttgagaagtttagagtttacagaaaagttgagcagaaagtacggagaaatcccacatatcccattatctctgcctgtcctcacgattttccctgatattaacatcttgcattagtgtggtacatttgctacaattgatgagcaatattggtacattaactaaaattcatagtttacattagaatccatagtttgtgttgcacatttgtaagagttttcacaaatttgtaatgttgcatatccattattacagtatcatacagaataatttcactaccctaagaattccctgtgctgtacctattcatcccttcctctcctcagtccctggcaatcactgatttttttttttttttttgagatggagttttgctcttgtcatccaggctggagtgcaatggcatgctctcggctcactgcaaactctgcctctcgggttcaagcgattctcctccctcagcctcccgagtagctgggattacaggcatgcgccaccacgcctggctaatttttatatttttagtagagatggggtttcaccatgttggccaggttggtctcgaactcctgatctcaggtgatccgcctgcctcggcctctcaaagtgctgggattacaggcatgagccacctcgcctggccaatcactgatctttttactgtctccatagttttgatgttaccagaatggcattattgcatgtagccttttcagattgactttttttcacttagtaaagtgcatttaggtttcctccaagttttttcatggtttgatagctcattgtttttagcactaatattccattgtctggatttccactgtttatttacccattcacctattaaggaacttgttggttgctttcaacttttttcaactatgaataaagctgctataaacatctgtctgcaggttttgtgtggatatatgttttcagctcatttggctaaataccaaagacagaactgcgtgatcatatagtaagagaatgtttagttttctagaaactgccaaactgtcttacaaagtggctgtactattttgctttcccaccagcagtaaatgagagttcctgttgttctatatccttaccagcatttgatgttgtcactgctttgaattttagccattctaataggtatgtggtgtctcgttgttgttttaatttgcagtagcctagtaacatatgatgtttagcatcttttcatacactatttgccatctgtatatatcggtgaggtatctgatcatatcttttgcccattttaaaattgggatgtttgttttcttattgttgagttttaagagttctttgtatattttggataccagtgcttcaccagataggtattttgcaaagattttcttctagcctgtggcttgtttatgcctttagttttttaccattaaatatgttgcttgctgtctggttgtgacaaataatcatcaagttaagaaagcttctttctttgtctctctaagagcttttgtcaggaatggctattcagggaagtccttgaaaattatttggctaaacaaatagattaagctttgtttttagcaagacatcctgttttattccatataattaaaaacacattctttatagtgtgatattaagactgtaactgagactttaattcctattccttctaaatcattttctcttactctgtgattttgtatgcctttaatgtccatgttgattacttgtccagcatcttaatctcatctgacttggtctttcttctcccagctatctgttcttccacttctctgtagcaatttatttctgtggccaaacgtccacttctggaattacaaatctgtaaatttttctctttgaacacaatttcctgtcttttcagttcttccatttgctgagtttattttctcatttcactgaggccgccagccccttaaatctccattgtctcccaatttgtgacattcttcctggcatcactttatcccatatggatgccataattggtcactttcaatgagtcatcagtatccgcagttctcctgcatctttgttcttctttcccacatgccatgcagatctccagctgtggattaacagtactgccctttttctgtgttcccgctctagggcctgaagaaatgatttcatcatattaatttgttcttttgctaatccatgggttttagcctcatctgtgcttattattctctttagtagttttctcacttgtttggagttgatttcatttctccttcaccagaatgacagttctttctaaatctttccacattttcctttggttcgtgtcaccttcctccattgcagctgattctacacttcagcagagtgacctttaaaaagagagaaaacaacaaatctattatgttatttcctgtacaatactgttcattataaagatggaggtaatttttttttttttttttgagatggagtctcgctctgttgcccgggctggagtgcagtggtgtgatctcggctcactgcagcttccgcctcctgggttcaagcgattctcctgcctcagcctcctgagtagctgggattacaggtgcatgccaccatgcctcgctactttctgtatttttagcagagatggggtttcaccatgttggtcaggctggtcttgaactcctgacctcatgatctgcctgcctcagcctgccaaagtgctgggattacaggtgtgagccactgcacctggccagaggtaaaattcttaagtttaacaggatctttctggttttctagcctcatctctgtcctcttagcgccttagcttcactggccctttttcagatccttcacatgccaagctcattcttagcacagggctttgtatatgctcttttctctgctggacaccttttttcttggcatgtttaatttgtatttatcttaaggacttagcttatgtgttcctttctcaagaaagttttccctgaccttccatttgcctaaaggtagattagattccctctgaaattattaatagtaatgatggtaacaacaataatagcagcaacctttgagtgtttatgagttgcagagactgttcttagcacttacacataggaagttttttggttttcatagcaaccctatgagttgtataggtgggtaaataagtaggacctagaattatctgcatcttatagatgaggaaactgaagtgaggaatgttaagtcacttgtccaaagtcacacagccatttggtagcagagttggaatttgaacccgggcagaccccagtgcccacgttctaaactgctgtgctctactgtaatggtgagtataactgtgtaatgttttttgttaatgcctacctttgttggtaggctctaagctcctcgaggtcagaaatcatacctgtctggttaatttccatggcctaggacggagcctggcatggagtagtctgtgaccgagtacttgttcctattgaatgaatcacagcttgccagtctactaaattgaggaaatagagggtttcagtgtgatccttttcacttttcctccccactgcttccaaatattaaactcccttggttaaaagaataggtgcctgtacttatttcaaaatctaacccctctacctgtttgccttgtatattctaggagtaatttatgtacttcgtaagaaaaattagtgcagatgtacataaagtaaaggtatacgtcttccattttttcctcctttaacgttttatacttccaggtgtcaactgctagtagttaaatcttcttctgtacatgtacacattttgtggacacttaaaatacacaagggtaatgtatgtagtattatctaagttttttaaaaatttaattttgatattgaacgatagtttcacaagatgtctccattgagggaaacaaggtaaagggtacaggagatctctgttgtttcttacaactgcctgtgactctacaattatctctaaagaaatggttaattaaaaaataaactatagaaatattttcatgtcagcgtattgacctgtttcttttaaatggctatgtaaaatgttattatatagatgtgtattactttatttcacgtttcccctattgatggacttttaagttccttccatttttcattttcaccaatattgccaaaggtggaccatccttgaatttgtaggtatatccttggttggtatatatgcacagccaagttttagaagaggagatcaaaagatgggcatatttgaaatgttggtaagagttggccagaccatcctccagacaagtttatactttcgttagcaggtgagatagaagctctgtgtgttcacctgcactgtcctgatcccattctgccacttcttcttggggactttatatctatatctatatctatatctatatctatatctatatctatatctatatctatatctatctatatatttttattatactttaagttctagggcacatgtgcacaatgtgcaggtttgttacatatgtatacatgtgccatgttggtgtgctgcactcattaactcatcatttacataaggtatatctcctaatgctatccctccccactccctccacctcacaacaggccccagtgtgtgatgttccccttcctgtgtccgagtgttctcattgttcagttcccacctatgagtgagaacatgcggtgtttgattttttgtccctgcgatagtttgctgagaatgatggtttccagtttcatccatgtccctacaaaggacatgaactcatccttttttatggctaaatagtattccatggtgtatatgtgccacattttcttaatccagggactttgttttattaactaatccttttccatttaatatatctacttccctgttggttctcttctgtctcctcatcctgtagcacatcctccaaactgatagagctttggttgctgtcagttcttttgtgctgctataggagaatacctgacactgggtaatttataaataacagaattttattttctcatagttctggaggctgggagggcactggcaggttcattgatggggatttggtctctgcttcttagacgatgccttgaatgctgtgtcctcacatggcagaaggcagaagggcaaaaagggagtaactccctccatcaagcccatttttaagggcacctaattgcattcatgaacggaggaaccctcatgacttaatgatgtcttaaaggcccgacttcttaataccatcacgttggcaacatctgacttttagaggcggagacattcaaactgtggccctagccaagtcctttgtgtgcttttacttatctttacaaccatcctatgagatagtgcctgtttctctgcctacttgttaagcgattatattcttctggattttgtccttggctcctctatccaacccacctgtagccccaccttctcttctgttccctcatccaaaccagagagaccaggatttgaatctggctccattattttctccctaagagacacggaatgatttactttgtctctatgtttctgtttctttctctgtaagtaagagtggggagactagagctacctatctcaggattgtgtggagtaaatgaataatgtgtgtaaaacatttaaaatagtgtctcatgtacactaagtgcttaataaatgctaataataggaatagtaacaacagtatagttacattgttattataaatctgtatctgtggtactcttagcttaagttcgtacaaaaatattgagctgcctgttagaaatctacatttggatgcctccccagatatcttaaactcagtttatctaaagtcagagtctttctgtggcttcagtgcttagtgactgtgtccgtgaataaactacttattttctttaagcctccatttctccatttatgaaagggtgataatgaacttattttatcaatattaaatgagataattcttgtaaaagtatttagcatagtgctggtatatactaatatcttaataaatattagttgctattattattattccttttaaatgctgatcccctttttgtcctgttctgcccagaaaaagagcctcaggatagctttgcctgtctgcctgtcttccttatccttcatatgcaaccagtcagcaagtactgttattttgtattttcattttaaacatcttaatttttatttattttaaaattatttatagagatggggtctcactatgttgtctaagctggtcttgaattcttgggctccagtgatcctcccacctctgccaaagtgctgggattacaggtgtgaaccaccacacctggcctatcaagtactgttgattgtgcttccgaaacatgtgcttgcatccaaccactccttatcatttcttgacacaattattgtggtaatctcctaattgctctcctggcctcttggccatcttgtacctttcatcctgagttatctttatagtaggtagatctgctcatatcactcagcagaaaggcctctgatgggtctctcttacctgaaatataaagcctccaaggcccactacaccacagtcatctttagagcctcccctcttgttctgggacccatgggtcctacagtatatgcagactactgactgttctgtgactgcaccctgtactctaaatctcatacctttgtccctgacctgctgttgctgtacctgccttctttttgcttagagggttgtcccctcaagcactccctgctaataagcactcagccttccaccccaaacatctagtctgtctggtgaattcctggtgattcttcagtggtctgtctcaaatatatcttctacgctcttttctctttagtcttaactgccatccaaggcaacattagttagtccctcattataagaggcaatataagctggtgagaggtatatacccacagtcctagctacttgggagtctgaagcaggaggattgcttgaggccagcctgggcagcatagcaagaccttgtctctttgaaaaaaatagaaagaaaatgctgggtgtggtggctcacatctgtaatcccagcactttggaaggccaagtagggaggattgcttgagctcaggagttcgagaccagcctgggcaatacagcaagaccccatctctacaaaaactaaaaaaattagctgggcatggtggcacatgcctgtggtttcagctactctggatgctgagggagaaggatcacttgagcccaggagtttgaggctgcagtgagccatgattgtgctccagcctgggtgacagagtaagaccttgtctcagtggagggggtagggtgggaggggggaaagaggcaatatagtggtaagttaaaatccctgagtttggagccagactgcctttgttattaaggtagttgtatataactgggatgaaactgtttaacttttttgtgtctcagttttctcatttataacaaatgagtaatattagtcttgctgtgagggttaagtgaattaatgtagggaaaatgcattgaaagggcttgcatattactaagtacttcataaatatagctattattattattctcaaagcatttcttacatacttacctataatagcatttgccactttactttttttttttttttccaagacagagtcttgctctgttgcccaggctggagtgtagtggcatgatctaggctcactgtgacctccgcctcctgggttcaagcaattctcctgcttcagcctcctgagtagctgggattataggtgtatgccactatgcccagctaatttttgtatttttagtagagacagggttttaccgtgttggccaggctggtcttgaactcctgaccttgtgatccacccacctcggcctcccaaagtgctggggttacaggcatgagccaccgcgcccggcctgcagttacttttttgtgtatatttcccaatagactgtggcttttttgaaggtgggctattttaatcatctttgtgtcatcagtatgtagtacacagtgggacccagtaaacaatcagatgtgctgtttgtgtagcccagaataaagtgccaggtcctcctgcattgcagcagtcagcagcatgcatctggaaagtattgctttctgaaactacggcattagagccacaaagctgtttgggattggaccttagcaagctcttcaaccagaaatttgctattacaatgaagcttcctatctgcaataggtagattgtaactgacagcatgtagtcattggaaggaggttaatcccagagcataagaggacttctgatttatttttgcttaaagggatacaatccaaggccacaaaggctgctataagacttttgttttgttggggataataaagagagctgtttctgccttttccactttcttcttataaacctgctgaagattgaaatgttaaaatgtgattcagagaagagatttctttattgtaaacatgatagagagctcagaatgaatgccggagatagactctttatagaggatttcagggtattaaactcttaagccccttatggtcaggttttactgccaacccttaacaccccaccatgcctgggctactgcaatagtaactggtctttctacctttaggttcgctgcagtctctcctgcctactgctatgatattaatatttataaagccttactttgacttttctcatgcattataaaaaatcctcgcaaaataccccatcatatacaaggaaagttccaagttttagcttgtcattctggacttgtattaggattctccagagagagagagagagatttctttcctttctttttttctctttttttttcccagggtttcactcttgttgcccagtcgagtccagtggcactatcttgcaaactgcaacttccgccttccggtttcaagcaattctcctgcctcagcctcctgagtagctgggattacaggcgcctgccaccacgaccggctaatttttgcatttttattagagacgggatttcaccatgttggccaggctgatctcaaactcctgacctcgtgatccacctgcctcagccttccaaagtgctgggattacaggcatgagccaccacgcccggcctggatagatggatttctgtaataaacctctataggccaggcgttgtagctcatgcctgtaatcccagcgttttgggaggctgaggcgggcagatcacctgaggtcaggagtttgagaccaggtcggccaacatgttgaaaccccatctctattaaaaatacaaaaattagccgggcatggtggtgtgcacttgtaaatcccagctatttggaaggctgaggcagacaatcacttgaacccaggaggtggaggttgcagtgagctgagattgcgccattgcactccagcctgggtgactgagggagactcggtctcaaaaaacaaaaaacaaggaaaaaaaccccaaaaccttcataataagtttccatatctatatctatagatatagaagaggtttattttatatatataatagatacatagataggtataagaggaggtttattatggaagttggctcatgtgattcatgtgatcatggaggccgagaaatcctatgataggccatgtgcaacctggagaaccaggaaagctggtggtgtaattaagttggagtctgaggtcctgagaaccaggggaatcaaggctgaaggcctgggaattgggaaggggtggtgtgctggtgtaagtcctggagtccaaagacccaagaaccaggagctttgatgtccaagagtgggagaagatggatatcccagctcaagaagaaagagtgaatttgctcttcctctgccgtttgctctctctgggtggaaaagggtaaacagattatgacgcccaccctcattggtgagtgtgggtcttctttatttagtttactgattcaaatgctaatctcttgcagaaataccctcagagacccacctagaaatgttttatcagctgtctgggccattccttagcttagtcaacttggcacataaaattaaccatcacaggactcttctgcagtctgactctggttaccttttctaccttatcttccactatatcctagaatgagctgtgtagcttacctggcctagttgtgagtcctataatgtgaattgcattttatgtttgtatctacccagaacattttaccttttgaaattttgcctctcctttaagatccattaaaaaaaaactatttatttatttatctgtttatttatttatttaatttattttttttgagatgaagtctcactcttgttgcccaggctggagtgcagtggtgtgatctcggctcactgcaacctctgcctcccaggttcaagcgattctcctgcctcaagcctcctgagtagctgggattacaggcgtgtgccaccacgcctggctaatttttgtatttttagtggaaatggggtttcaccctgttggccaggctggtctcgaactcctgacctcaagtgatctgcccgcctctgcctcccaaagtactgggattacaggcatgagccaccacacccagcttattttgaaataattatagaatcataggaaattacaaaattagtacatcgagtcctgtatacccttcccccaactttcaccaatggtgatatctttttgtgtgtgtgtgtgtgtgtgatggagtcttgatcttgtcgcccaggctgttgtgcaatggcgcgatctcagctcactgcaacttccgtctcccaggttcaagcgattctcctgcctcagcctcttaagtagctgggattataggtgcctgctaccatgcccggcttatttttgtacttttgaagagacaaggttttgccatgttggccaggctggtctcaaaccctgacctcaggtgatccgcctgccttggcctcccagagcattgggattacaggcgtgagccactgtgcccggctgctatcttatataattatactataatataagatcctattttttttttaagagacaggttttcgctcagacgcccaggctggagtgcagtgctgtgatgctagctcactataaacttgaactctgggctcaagtgatcctcaggaggaggatcctagctcctgggtagctaggactacagtcacgtgccactatgcctggctaattttaaaatttgtatagagatgatatctcggtttgttgcccaggctggtctcaaactcctggcttcaagtgattcctccacttcagcttccaaaaatgttgggactaggtgtgagccattgcacctagactgatccattttaaaactctattttgaataaaattttcaggggtaaaaaaggtttttttcttttccttttcttccttgcttctttctttctttttttttgagatggagccttgctgtgtcacctaggctggtatgcagtggcgcgatctcggcttactgcaatctctgccttccaggttcaagccattctcatgcctcagcctcccaagtagctgggattataggcatgcaccatgatgcttgggtaatttttgtatttttagtagagatggtgtttcactgtgttggccaggctggtctcgaactcctgaccttaagtgatctcccggccttggcctcctaaagtgctgggattacagtcatgagccactgcgtccagatggaaagtatctttttaaactttatatccctccctagaatttatcccctaatatatggtgtttatggaggtggttggaatcaactactttttataaatatattattaaagagttgacaacccctaaaaatcttttagatgctagacaaaaaaactgagagaaatcatgaagtatttttttaaaaaattttttgagatggagtctcactccagtgacaacccaggttggagtgcagtggcacgatctcagctcactgcaacctctgcctcccaggttcaagcaattctcctgcctcagcctcctgagtagccgggattacaagcgtgcgccaccacgcccagctaatttttgtatttttagcagagacggggtttcaccatgttggtcagggtggtctcgaactcctgacctcatgatccacatgcctcagcttccctaagtgctgggattacaggtgtgagccaccatgcctggctagtcatgaagtattttaaaggacgtgggttctgacactcttaaattcaataggccaaagttcctggcatttttttcttggatatgtaccgcatagacctttcttagtagatactgggagaaagaagttggtttaataatgaattaatgggaaagttttttttttgagacggagtttcgctcttattgcccaggctggagtgcaatggcccgatctctgcttactgcaacctccgcctctagggttcaggtgattctcctgcctcggcctcccgagtagctgggattacaggcatgcaccgccaagcccggctaattttgtatttttagcagagatggggtttctccatgttggtcaggctggtctcgaactcccaaccgcaggtgatcggcccacctcggcttcccaaagtgctgggattacaggcgtgagccaccgcgtccagcctggaaagttttaattgaccttatgtctgtataattaaatgtatttcattaactttttaaaggtaaataaatctggggtttcatctaagtgtcaaaaatatgattttcaccaatggcctacttatttttgccattatttgcataaatagctttctggtttttctcaagttaacctgtatgcttgtgatgtgaaagtcatagtatgtataaaaaatagtaccaagatgaagtatagatggtcattctgaaccattattccttagcagagtgaactatatttaaggttttagaaataaatcgtatttccatgtctgaataagaccttagtcttatttaaataaatgtaggggagatggagagaaagaataagatttgcctaagaatactaatattaagatgaatggcaggtaggacacactgaggctgtcaggcattgttctcagtgttttacattcaccatcttgcttcatcctcacaacagactttatcatttgattagaaaaaaatcagtacgatctagatgttctcattgaataacattttttcataaacaatttaatttcatttaatttatattgttactattttttatataagtaaatatgaggtctcactatgttgcccaggctggtctcaaactcctgggctcaagcagtcctctcacctcggcctccgaagtgctgggattacaggcatgagccaccacatctggccctgaactattttaatgcaacaagtatttactgagttccgataaatgaaccaagtctggtgctttagaaccatgatctcaaactggaggacatgtctaagaatatctaggcttggactgttttaagagaataaatttccagattctctatattttatttatactctttcctgaaattgacttgtttgaaggcaacactgatataatgctagtccaccttccctaccctccctttagccctgtgccttcttatgattaacagaagacagccatacctttcacccatcttgaatctcaccattgtacctttctatgaggtataaaatcctccaggattctaacaaagggatagtcaaaacactagtgtcacgtgtgaaacttccttttatcaaggtatcttcctccatacatcttattaagagatgcatctccaaaaaaggaaattactttttatgtttagttctcaaaatttgtaacatttgcattgtcttcatcgattgtgttttactataatagtaaccataccacaatccaacataaataaacaataatatacatgttttcattaaggaaagtatgataaaagttatattaaatactgtggaagaagcagaatagaaatacagtttcagggagaccgataaatggcatagcattttatataggaaaaaaagattctgttacagttttaaaatataggatgggggatatcagattgcccaggtgtttagattttattggaattagtgatacagtagggttttttgtttgtttgtttgtttttaagacagggtcttgctctgttgcccaggctggagtgcagtggtgcgattttggctcactgcagcctctgcctcccaggctaaagcaatcctcccacctcagcctcctgagcagctgggactacaggcgagtaccaccgtgtgtgactaatttttgtatttttttgtagagacggggttttgccatgtggctcaggctggtcttgaactccttggcccaagtgatccacctccttccacctcccaaagtgctgggattatgggcgtgagccactttgcctcaccaatatagtaggtttaatagctttaaaattagcaatataatagtgtttttaggtgtcagttctaaatagacatagattgatatataaatgaaaatataacctttgcagtgattaaaacttgtaatgaaaattttagatgtcaacctaagaatattcaaggagacacctttttccccccattaaatttgttttagcaggtatgtgagcaaaacttttgaatagtgccgcaaaggatatagagatcaagaagaaataatttttgccctcaagatgcttgttagttaaatggtgaagcaggggcatagatacatggtttggcttaaataaagccttaattgtgtcatggtattttgctgtttgcttaacatgggcattgtgcctcagtgttgtgtcatgcttgttaaaatgacccttgagtggtagtttagctcatatgtgctgtgttaccacataggctattgtgcagaacagtgaggaattgtatattgtgaaagacagatggataggaacagtgcccactgcacttaccaccaatgaatggtagggctttctctcattgtctagttgatgtgatcataaaaaacattagactggaagtcaggacaccctaattctcatcctgagtctgccacagaacgtatgaccttggctaaatcatttaacgcatttgaactctagtttcctcatataaaaaaagtttaaactggatgattttctacctgtgaagtttagagttcatacatttttacacagtatatgcgttttagaagggataggtgcagcagattttaagaaacagatgccaaaataatggagtagattacttactgtaatatgcggagaagagtagcttactaattatttatctaagtgtgattaggacagtctgttatatggcttgtcgtaagtgttgtgggtctcaccactgccctttttatttaaaaagagaatttcctctacttttgagaattagaacaaatactacacaggattagtaagcgagaataccaatttcagcttcatgccagtgcctctagtgaaaaccacatttttgcagtgttctagcagaatattaaaatggcttatggattacagacagctcaggctttggtctttataggtcagaggtggaaaccaacggagcaattaccgttcactcttatgggcggggcttcttaggttccttatggagctaaagtgaaactctggaacagttccactagaatggctttcctgggagcttatgaggcttacattctgaaactgatactcttgtagtacaagaataactacaaactgatgtggaattaggaggccagagaggggagaagccacatgtagctctcattctcacaagtcctttggctggcgaacagaggtttttcccgtcactaagcagatatttggttatatattgacaaatcctctctaaacaattcttagaatagaagactgattctgtcttgtgctttggaggtgaaggggaagagcaatgttgaaatgagtgaaattagcttgtgatggtttaacatctgcaaatatcatctatctaaccagtctttatctcctatgtgtgttcttaaatatggtccccattgtttgaagccaagaaagataactgaggaaattctatggctgatttgccgatgttattaccaattatttattagccttagtatcggatagtttgactgatttgccatgttgttttttagaaatgggggtcttgctctgttgcccaggctggagtgcagtgacgcaatcctagctcactgcagcctcgaactcctgtgctcaagtgatcctcctgcctcacctgtgagtagctgggacaacaagcgtataccaccacttctggctaatttctttttttactttttataaagacggggtctccctatgttgcccaaaggctgatgatttgccttttttaggtagaaaacctggactgggccctcaagtttttaactttttttttttttcttggtgatacaaaatgtggggtgaagaggtctgttaaagtgaccaggcttggtgctatttaaagccgaggagggaaatactgtttcctggcaggctttattgtgtttttgtattattaaatctcttaagtcagcagtttactttttgtctagttgtatgtcttggcttgtctaaatgaatcataattaaaatttagtcactgggactcttaatcttgtctaagcaggaattatagtttagagatactataccttgctgtgtatagaataagaaaagtataagtctgctatgatcactgagatgggtttttataagtactaaacttttttagaagcatagttttctttatcacctgtcccccagaaagtttagaaagtgaaaattaaaaagtaagtaaaaataatggtattggagttataatttggaaatttgtttcattcacttgcattttaatatttattatgtaaacatgaaatgataaatttgtttcctttgaaaagattcaagaaatagaatagttttaaaagtagtcttttacattcctttgcttattgacaaaatcatcatcaggaacatcgattcagggaatgaggcttctgatccatctcaaaacgaacattactaatatttgctatggtcatttgacataagtttttattgagtcagaactatactggggcagtagccttcaagccagttaaacatgaattaagaacttgtgtgccaggtactgcactaaatgttaatggcataaaggtgaataaaacatcgtttatactgtgttttgtttcacacaggatttgagatggctgacagaaagtaactaaagtgagattgtaaaatgtaactgaggttcagaaccagggaaaagataaattagatttggaggcctagatatggttaaataattaattagacatgaaaccctatggctgaacagttcagttgaatgttgattttagtagtgatatgatacagaagctaagctttgttatagtcacgcaatgttgaggcatggttaatatatttagcaggattatgaagagttcaggcattttttggaaactcctatgaatatgtcatctagaattggttttgtaaaatggtagtgcttgtactgtttagttacatgtgttgaatatcagatggatttcagtatttttttaaaactttgcttaagcctcttaagcctcattgagtggggagactgcagtgtaagtatccaggctgaagactgaacttccaccttatttttatgtggtaatgagtttttgtttagatgatatatatgttttaatgttgagatggaaaaagtagaagtgaattgcagtgtagaaactactctgtttccttttttatctatttttatttcagtcattaagctttccccatctttagtctattgagttgtttcatggcacgttcggagggatggtgggaatgccctttgctgaatcaaaaactactgtttctccaacttcacaggttagagaagctcatcaagtcaataatttataattttaatatggaagctgttttgggaactcttgtgggcatatcttggttttaaaagaagaaaaaagatttactgatttaagaggtatataaacgcagcttgctgacagtagcttttgattttattggttcaacagatatcattgttgcacaatacataatctttcactgtggcagctaatgagatacaaaactgcataattgcaccaacagttattttccttatagaatttggcggctactaagtaaacaacttttaaaatttatcttaattggtttagttatgtgccatcattgaatgagtcttaacattttccttcacgctgttgcactccacattcttagttgaacagagaaagatattattttaagggagggcttgatcttttagcattttagccagttggcttttcttaattaggatgattactcatatttagatgaaatctaactgagaaaccacagcaaaatgcttactgaaaacattcgggtagtcagtgtggaggaaagactcctggaaaataaaatgtctcaaggttgttttgaagtttatcctcattgtttttatttatccttatgtgtgttaagtatacgaggattcctggttgtactggtattttggcaaagtcctgtactgttcctcaaatgcttctaatgcagacactgacttttaagaaccagacacatgtagatgtgcagcgagacaacactctggcctttaaccattgtgcctcctttcttacctgcgaattgcgtttactagcgtatttcacatttcagccaatagatctaaagaatacaaatgagaacatataggacctgtctgcaaataggttttaacttccagagattagaagtagctgttgagagcactgtgggtttagtgagaaagagtgctttggcagaatgggcagtgtctactgtaggctaaaaatgggggaactatagcatatcatgagccttctgtaaccctcgaagtcagttattagcagttgaacatgctctttggtcataatggcagtccccaggctccagataataatttgagcagggagctgggagaaataaggaggacatgagtacatgggacaaaagtgggccagtaaagggaaaattacatatgaatggaagaatagagaatggaaaatggtaaactggagagaaaaagatgaaaaagacatgaaaaaaaagagtagggataaacgggctctacctgtttccttttctgatcagtaaaggaaaatacttcttgaaatccttagggcatctttggacaaggaaatcagaagtaattcaaattgtattgttgtcagagtttagtcttaaaagttgtgttgccaggtagaaaacaaagcatgataatcatttatagaactcctttagttggtttacttgcctcttagggtaaaaacaaaattagacttccagagtagtctgtgatcttggaaaagtctttctgaaaaatgattatagaactgttaagacatctcccatctcatctcatatggcatcatacttttcccaattattttcagatattttagcatcaaagttttctagaatgagttttgtagaacactagtatccctcattgcttaaatatattaggaggaaaaggattttttttattaaataagtttgggaatatatagagtggacaaaattagttttaaaattacaggtcatttgagaggtcttgaagtaccagtgtcttgtggatccctgaagggctagatgagggtggggcatgtagcctttctcaaatttatgtgactaccatacagtttgaggaaagctggtctatataaatgcattacctgtgaaacctggctttcttccacatctcctctgacttgctttgctatttttttccccatctcttacagtacttcctgctatcccccaaattgggggaattctttcttttttcattttaaaatatgatattctggagatctgaattctctctttttacatttttatatgtgtattccactttgagcaatattaatactagcttacattttaaaatacgatattctggagatccaatgtataacatgagggctatagttaataatattgtattgcactgggattttttttgagagtagattttagttgcccttgctaaaaaaaaaaaaaaaaaaaggaggcaggtaactgtgaggtgatggataaattaatttgcttgactatagtaaccatttcactatatataagtatataaaaacattgtgttgtataccttaaatatatacaatgaaaaagaaaagaaaagaaaatatgatgatagtatttatatgtgaactctttatttggatctttaagtttctggataatctggtccctaatcttatctacattcccaggtttattcatcaccagtcttccatggtaagtcttcacttgagctcaatttactattccatgattatattctgtatgtggaatgttctcctctactttttgtattatggtctggctcaagtgcaccttttccatgagaccttccctgatatctttagctagaagtaatctcttccttggcacatctgtagcatttatgtactaatacctatagtgttatttacagatttatttgtggttatttatgcacatgtcttagatttcgagcttcagaagagagggaatagcatgccatatcacccagaagcttgtagcttagctattgcctagtaacattattaacagagtaataatgtcagctaacatttgttgtttactataataaatgacgagcacagttctaaatgctttagataattaatgtagtgaagaagtagagtaacttactcagtcacatgctcagttagtgatggcgccaggatttgaacctaagcattcttctgctctttatcactatacagtactgcttgctatgataggtgctcagtgagatttgaatgaacaaatgagcagacaaggctttgaaaaagagggcccatcatctgtggctcaagctcataaggcactttcttttccccttttcaaagctgacatttatcatttatctagccatgtaatgttttcagtgactaagaacaattagctagagttcaggtgggctgtgggagtggtagagatgagtgtgtggggaaatgtgtttagtcactgtgtttattttatttatacactagaacctgctgctatccttgttgaagaaatagtggtgagtccaggctttggagtcaggaaaacctggatgggagtttcagcttcttcatttattagcagtttgggcaagtttcttaacagttgtaaaccgtagttttcttctttgtaaaataatagtaactacttctttagtgtctatgtgaggattaaatcagatgatcatgtaaagcacttagctatagtacctactacatattaagtgcccaacaaatgttacttatgatacaataggttttacttaacataaaattaactcctaatttcttaaaaaaatatgtcttttgaatgtggacctttcgattttagtcagctaaagcattaagtctgttttcttccactccctcaacttcatagtaacatgtctgtttataatatgcagtgagaattgtagtgtacattgcaccatttatacactgcaaacatcatacattagtaacaagtctgtcatgaactgagttaattgtagggtttgttctgaacattttcttgccaggcatggtggcttacgcctgtgatcccagcactatgggaggctgaagtgggaggatcacttaagtgagttcaagaccagggcaacatagcgagacctcacctctacaaacaaacacaattaaaaaaatatattttttcattgttgagctttattttcggtgtttgtaatatgaagacaataggtatctttttatttatcaaataaggtttattaattatgctttttcttttaaatgacagccttgagtcaactttttctgtctttgtgctaagaattacagtagtctcaacgtagagccgaggtgattctgatctaaagatgctccgtgaatgtgcgatatttctttttcttttttttttgagatggagtctcactccgtcgcccaggctggaatgcagtggcacaatctcagctccctgcagcctccgcctcccaggttcaaacaattctcctgcctcagcctcccgagtagctgggattagaggcacacaccaccatgcctggctaatttttgtatttttagtagagatggggtttcaccattttggccaggatggtcttgatctcctgacctcagatgatatgcccgcctccgcctcccaaagtgctgggattacaggcatgagccactgcgcctggccgcatgtgggatatttcgaagaatcttagctttgatgcatctgtggggaagaaatgagtgattattaacaaaggtaaaaggagaggagagtcattgcaaataaagaatcttgtagcggccaggtgcggtggctcacacttgtaatcccaacactttgagaggccgaggaggatcacctgaggtcaggagttcgataccagcctggccaacatggtgaaacctcgtctctactgaaaatacaaaaattagccaggcgtggtggcgggtgcctgtaatcccagctactctggaggctgaggcaggagaatcgcttgaacctgggaggcagaggctgtggtgagccgagattgcaccactgcactccagcctgggagacagagcgagactctgtctcaaaaaaaaaaaaaaagtatcttgtagcagtttattctaggccagagccacagtttgtgttgatttggctagaaattattaaagttggtattctgtgaaattttgtttgagtggttctttgtttggttgagcgggttcagatgaggctgagaaaacaggaagattgtgcttggaagagggggagaaggcttccttaggccaaggcaggtcagtcattctataaggagagtctctatacaggatgtttctgcttttaaaaatatggtctgatatgcaaattcacttatctagtgcaaatgattctggcaaaggtttctactttcttgattcaggaataagacaaaagagttttccaccccatagtacacaacaaaaaagaggcattataaaacttttcagaactactaaagtggtatgattttatgatttcttgttgaattcagcatttgaaaacagaagaaatgtgaaaacagaggaaaggtgcttagcataggaattaacttgtttcttggcaaggaaaccagggtcaggtgtttgaatcacttggctttgtggtggttctgttggtttttgtgtgtgtgtttttcttcttctgctggattatcatctctttttttctgccttggaaactgttgctttatctagggcaatcaccccacttacacaggaggcaaattcaaagctggttgccttatgttgttaaaagctgtcagattcacatcctttgccatatccttcttcaggagtcaggacaatgaagacaggagtctaaacatggggccagagtgagctgccccgtcctcagtactaacacctattcctgacagcttaagttgcttctcagccttagtgaagctttctcagctattctggctcatgatgatcattccctcctttgaactgaaatagcctaattgtctctgagtcatgtggcaattagtcttgttttgctttctgatatctcttgtagttgacttttattgttaatgtatgctgcttgaaggcaagggctgttgtgaatttattatattgctatatattttacagagactcttgatttttccctggtttaccttgggaagttttcctgcctcttaaatggcgagaggatcctttagaagatttcctaactctcagaatcttttagatttttcatgtcatgctgtgtttgctatggccttgaaaaagcagtttttcccttttttgcagcagacacaaccaagattctggataaagaccaggcaacacaattttcctagagtaatacttaccttgagtagtttcttatggggaaaaaagcccccaatattcttaggcttaatttctatgatcaaatattttaaagatagaaacaaatgatatatagtagttaggtatgggggcaggcaaacaagcaaaatgttaagatcttgcatgactaattagtactgtataaaacacatttaaattttgttgtacccattcttacattagaaatgaattgattgattcatatggtattggttttcctttaagggatttatttcttaatgaatcagaggtttcacattgaaaaagaatctgcgtatttttatatactatcccaactttcatctgagttatttcatgtttttcattgccccattggaaaccgtattttgccgaagagtcatttaatatatttttcacactggctttgatttggtgacatgtagcagttctggaagaattaacgatatgttaacacaagttgactgtgatagaataattacaataaatatgcctattttcctttggggagaaaagtctaaaattctgctttatagaagctattctcagctctaaaagagcatatatgtagatcttcatttcttttcttctaacaattttaggggaaaatacaaaccttaagttatttcctgaaatatttcccaggatgattactaccttggattttaaggcttctttcttcacaagttctgactcttctataagcacaatcagaatggtcagaatgctgactctcctttaggtagtcagaatgggtcttccaaacctttgtatgagcccattagctgcctcagctttccctcaactttcaggaaaacacaggttacatattctttacgttactatgagaaactacctacattatttttttttaaattttatttttggctgggcacattggctcacacctgcaatcccaacattttgggaggctgagatgaaaggattgcttgaagccaggagttgcaagacaagcctaggtgacaaagtgagaccttgactataaaaaaaaaaaattaacctttccggcggtgatgacctacccacacgagaacatgcctcttgcaaagggtctccttcatccctctccagaaaaggagaagaggaaacacaagaagaaacgcctggtgcagagccccaattcctgcttcatggatgtgaaatgcccaggatgctataaaatcatcacggtctttagccatgcacaaacggtagttttgtgtgttggctgctccactgtcctctgccagcctacaggaggaaaagcaaggcttacagaaggatgttccttcaggaggaagcagcactaaaagcactctgaatcaagatgagtgggaaaccatctcaataaacacattttggattaaaaaaaaaaattaaaacaattagccgggcatggtggcatgcacctgtagtcccagctactctggaggctaaggtgggaggatcgcttgagcctaggagctcaaggttacagtgagctatgatcacatcactgcattccagcctgggtgacaatagccctataatgtaggtagttacttttatctgcattttacaaatgaaaagaactgacagacattgagttaaaataaccagtacaaaaatcacagatgggggatagccaaagctttaaaatggaatagcaggaagttttaatttgcaaatagaatcattaatgtttaatagaatcattaatagatttaatagaattaatgaattgatagaatcattaattcatacttagtttggagtgattgttgaacacatttctcagctaatttaggtcttcattatattttagaacatattatctgcatcattaaaaaattcctcatttcctcattgcctatctctgccttttattcactcagttttaaaataaacagattttgtttatactgcttcttttattaatatttatggtaagatattttatactgctgataaatggacattaatgatatatagcctattgtttgaaaaaagcattttggattatagcccagaactggaaacaaccaagagataaataaatggtggtatattcatacaataaaatattactcagataaaaaagttcagttcaaaactttcagttttatcattgcattatttgcagttgtaaaacatggtaacatcacaaccttatgttacaaagttattaaaaatattagcaaggtacactgattgctgtagccatgttacaattaagctaaaggaatttcttgttaaccaaaagcaaaaaataagtttggtttttttggatcttaattgactatttataatagaacttgcctttgggtagcgaacagattcacaaatgaaagaggagattctggaacttactgtataattccaggtaactctgtaaagtttgaaatgtaaagaccatgccttaatacaattgataattggaatcgtgctggcatcttcttaacatctcttgcttgtctgtggagcatggcatgattacttatacattactacatttaggaaacagcctttataagacccactttttctgaagtttttggtgttactcttttcttaaccaccagtactgatctcattatgttttggccgacttacttgagggcatgctaaaaagtgatctaaatacttaatttctcccttcaattgtgcatcgtgttttacaaataaaccgtatctttactttcatttacttgcatgtcactgagaaaatttgagatctttagcattcatgtccttgcctgaagtataaggatttcacataatttcagcttttatcattcaagtcttatagatgcttttctcttgtctctgttttcaaataatggtgctaattatatttaaggggcagtatgtttattcaatatagttatagtgttagcagtgtaggatttaacaagcttttcctctggaatgtatactagttcttcatgttctatgtgataacttatacagtgctatggtatttttgttgttagatttaagttttctttgaattttttttctgtccataatcttaggctttctttttgtgcttactgtttttttctcccccagaatgatacatggcagcgattataaatctgttttataaaacttaacttcattaaacatatgaagaacgtgggattatttttcttgtcataaaaggtgacctccagtgacaaatggctattacattatttatgtgagattccttcatttcatatactgttatcaatgtgtttgataatggttgaagaaccagttggtgttggtttctaatactaattaataatttgccttgagcctgatcaatcttcttatatccattatcagatttttttcttcaaatctgaaaatgttttcttttcttttccttttctttttttttcttttcttttctttcttttttttttttttttagacggagtctcgctctttccccccagactggagtgcagtggcgcaatctctgctcactgcaagctccgcctcctggcttcacaccattctcctgcctcagcctcctgagtagctgagactacaggcgcccaccacgacgcctggctaatttttttttgttttgtatttttagtagagacgaggtttcactgagttagccaggatggtcttgatctcttgacctcgtgatccacctgccttggcctcccaaagtgctggaattacaggtgtgagccactgcacccagctattttttctatatttttatgtagttcattgagggtaataattttatcctacaacaaacatgtaagttattgaagaatattggagttttatgataatgctgtcataaatataaaaggtagggtaagagggatccaaatagagctcacttatattgtcactgataggcagtcacgctgtgctgatagaatgtggcctgacacttgatggagtgcagcatatgtatacttgggcaatttgagcagatatatacggtcccgagtttaaagaagagaacaaacaccagtgcacagctatagtattcctaatataggatgcattttaaagaatttcacattctacaaatggagagagatggcaggagaagccttattttaagtcctgcactaaggcaggttaacctcatgggtgtaattacctggacctttttgtaaggacaaaatatttaatcattaaaaggccctctgtagggtttgaaatatctatattttatatatgaatgcttcttttattaatatttatggtaagatattttatactgctgataaacggacattaatgatatatagcctattgtttgaaaaaagcattttggattatagcccaaaactggaaataaccaacagataaataaatggtggtatattcatacaataaaatactactcagataaaaaagatgaacttaatctcataaacattatgggcaacatagtgagaacccatctcttttaaaaaaaaaaaaaaaagaaaaggtgggtgtggtgatgcgtgtcatagtcccagctactcgggaggctgagctaggaggattgcttgagcccgggagtttgaggttgtagtgagctatgatcatgccactggactctagccaggagcctgggcaacagagcaagaccttgtctctaaacaaggcaaaacaaaaacaaaaaaacaaaaatcaattgcatttttatatattagcagtgaacacatggaaatacatgcaataccatttataacagttcaatcaaaagaaatacttgagcatatatctaacaaaacgtatataggacttacttgtatactgaaaactgcaaaatgctgatgaaagaaatcaaagaccaaaatagtgagagatactgtgttcatgattggaagactcaacatagtaaagatgtcagttctcctcaaattaatctacaagtttaatgcaatttttatcaaaagcccaggaagattttttgtagatataggcaagattattatcaattgtgtgtagaaatacaaggaaactagaatagctaaactgaataaaaaaattggaggaatcactctacctgatttcaagacttattgtatagctccagtaatcaagattgtgtaatattggtagaaggatagaccaaagatcaatgaaacagaatagaaaagcaggaataacagaatagagacctatacagatatcctcagtaaatttttaaattgagatataacttacatacctgtaaaattcagtggttttttattatattcacaaagttgtataacattcaccatcatttaattccagaacatgatcatcacttaaaaaataaatgctggcctggtgcggtggctcacgcctgtaatcccagcactttgggaggcctagtgggtggatcacctgaggtcaggcattcgaaaccagcctgaccaacatggtgaaaccccgtctctactaaatatacaaaaaaaaaaaaaaaaaaaaaaaaaaattagccgggtgtggtggtacatgccagtaatcccagctacttgggagggtgaggcagagaatcccttgaacctgtgcagtggaggttgcagtgagccaagatcgcgccattgcactccagcctgggaaacaagagcaaaactctgtctcaaataaataaataaaataaaaataaaataaaataaaataaaatgctgtattcattggccattgcccaactgatttttgataaagatgcagaagcaattcagtgcaggaaggatagccttttaaataaatggtgctggagcaactggacagctataagacaaaaaaaaaaaaaggaaaaaaggaaaaatctgacctaaacttcacaccttataaaaaaattaactgagagtggatcatggacttaaatgtaaaacataaaactaaaaaaaattttagaaaataacaggagaaaatgtttaggatatagagctaggcaaagagttctgagacttgacaccaaaagtatgatctagaaaaggaaaaattggtaagttggacttcataagaactaaaacattttggtctgctaaagaccatgttaaaaggctgaaaaggcaaactacagactgggagaaaatatttttgaaccacatatccaataaagactactgtctagaatatataaataactccaaactcagtattaaaaaaccccaagtaatccaattagaaaacagcaaaagatgttaaggaacatttcactgaagaggatatacagatggcatgtaaccccatgaagagatgttcaacatcattagccgttagggaactgcaaattaaaaccacagtgagatatctcaaaatagagtttaatttttaaaaagcctgggtgcactggcacacacctgtaatcctagtactttgcgaggttgaggtgggaggatcacctgagcctggaaagtcgaggctgcagtgagctgtagtcctgccactgcacaccagcctgggcaacgggaatgagactgtgtcttaaaacaaattgttttaaaggaaaaaataatatcattaaattcagtaaatgcaggaaaaaaggctaaagcagaaaaaaaccacatgtgatctcaataactgtatataacttccagtaacattttgttgtattttatacatttttttgccctctgcatttttatattatatagttaactgaatatgcagttgtgtcttgcttttttcacaatactcaatatcatgagtatttttatcacttaaaattatccatgaatatagattttaaatggctcataatctttgttgtatggatgtacagtaatttatttaaccattcctttcatatgtttaaagtagttccattttgttgctattgcaaataatgctgtgagaaacatttttgtatgtaaacttctgtcaggatttctgattccttccttacaatacattcttagaggtagaattactgtgtcacgacgtgggcatcttagaggcctttgttaactatacattgccaaaatactttgcagaaatatagtttcgatttatgccccttttatattcttacatttctcctttctctaggaaaataaatgttcatgttactcaccttcactcaaggtttccaaacactttttcttggctctcctcctacaactctgttctcagctttccaaaattgtttctctttactccttagatatctgggtttccttaggttctgtgctctccctcttctctctatgtatattcttctttgagctaatcagaaccagccccttgccttcaactacagtttacatcataatgactcctaaatcccatatctctgctgagttttgggaaccagttctaacaccatactagatatttttaccttatgctacatagccatcacaaatgtaactcccttatccaaaactgaactcattatccaaccacactaacttcatctccactgatggcagtatgacccatccagtggtagaagccagaagtttgggagttagcctagatttctccttgaattttgtgtaccactggtcaatcattacattttaagattctgcttccaaaatagctctctaatttgttacctcccctttccactgccttaatttaggccctcatattttttgtactgctgcattggtgtcttaactgatacgcccatttctgacctagttccatccctcagtttcatccttcacattaaaaccattttgtcttttaatttttaattttatttttgagacagggtctggctctgttgctcaggctagagtgcagtggtgcaatcttggctcactgcagcctctgcctcctgggttcaattcatccttccacctcagcctcctaagtagctgggactataggtgcttgccaccatgcccagctaattttttgtagatccagggtttcaccatgttgcccaggctagtctcaaactcctgagctcaagtgatccacctgcatctgccttccaaagtgctgggataggctgggcacagtgggtcacacctgtaatcccagcactttgggagaccgaggttggcggatcacttgaggtcaagagttcgagaccagcctggccagcatggtgaaaccttgtctccactaaaaataccaaaattagccgggcgtagtggcgggtgcctgtaatttcagctactcgggaggctgaggcgggaaaatcacttgaacccaggaggtggaagttgcagagagccgagatcacaccactgtgacaaagcaagattcaatctcaaaaacaaaatatacaaaatgctgggattacaggtatgagccaccatgcctggcccagtttgtcattttaatgcatgcatgtcagcatgtttctcaccgtcactgtcttctgtctcctgtaaaataaagcctgttctctgtagcatggcacccatgagcctggtcttgatttccttcctccaggctactttcatgatttatccctggccatgcctgatatggctcccagtcatgctgagctagtttcctcaacatattagaattgtttttcaggcctttatgcttttgctcatgttttttttttccttgacatgcttctttcttctatccatttgccagatttctttcacatcctaagattcaggtaacatcataacctcctatggaaagcaagccctctataggaattgttaagggcttccttgtctgtgttcccactgtgccatgtacctacttctttctgccacctcctacattggtgtacttttgttgttgttgttaagctgtccctattatactagattgtaacacatgctttctaccgcctagagcaggaactgtgtactcttaattgtttcctgagggcttgagattagcatctggcatgtagtaggtgtttaataaatatttcttgagtagatgaagatatgagtgaatgaatgaagggtttcatgctgaaaaatgaaaaaagggtttaactttaagaaaaaagtcacagattttggagtcataggaattgagtttgagtcctaccgtcatttcttagtgttgatataattttaagcaggttgtttccctcctctgatctttagttcttttgcaaaagggaggtggtagtagtagtagtaatactattaacagtagtagtagtaataataaaagtgcttttaaaataaatattctgcaaattttagttaatattgttaacagtaataaaaagcatcttctatatgtaggctgcacatgcataatgcattgtcttgaacgaagtgagaggagaattacttaaaactttgggtagacgtactcatcaattacaagatcaatttacttggttttgctataatttggttgccattgttgacccattgctttattgtcccattgtctcatcacttgctcagacgctgaagatgggtcagggggagtcagttttagaaaacagccttccctgggccgggcacagtggctcacgtctgtaatcccagcacttttggaggctgaggcaggtggatcacctgaggtcaggagttcaggaccagcctggccaacatggtgaaaccccatctctactaaaaaaaaatacaaaagttagctgggcatggtggcgggcgcgtgtaatcccagctactcgggaggctgagacaggaggattgcttgaacctggaaggtggaggtggcagtgagccgagattgcaccattgcactccatccagcctgggcgacaagagtgaaattccatctcaaacaaacaaacaaacaaacaaacagatataaaaaaaagaaaaaaaaagaaaacagccttccctgaaagttgtttgtgatgcttatggtctaggatgtgaaatttacaggatgatgaaacatgcagatattaatagtgttccatattatttttgaatgtggtttgacttttctaacgatcagcagtgacaaacttgtgtactaccagtcaaccctgttttccatgttttctctacagagatgtatagttagagcagagatgactaatgtgttttcaagaaatgctactataacctttaagtctgatgggtagattgagcatttaaagctgttgctttttcatcgcatctggatgactgtatgttcctaccaaatgaatcactttatgaatatgcatgagcttataaacacaactttttagaaaaaattcttgtgttctgaaacaaaattacgttggtagtattttccaagttttccgtaagaagtagctttgcattagccctagaaattccttgaataatatgtttttacccccttacttgtattacatttaatgacatctctggctttattttctccattcttttttccatggagtttcttaatttcactgtttttgccttgccctttagacgggtgaaacaatgatgactcattttagattgatgaaagggacagcttagcagctggagagctggtagacactagagcactaaattgccagcaccagccttctcttcattgtccacgtaaggcttgtggcagaggtatgcccattcagtcatttattaatatgtaatttgtaggttagatgacttcatcaaattatatttacatctgacctggaggttcaaccatgttttgctttgggacatttttaattgttaaaaatcatagttgggttctgatcaatatgtacatgctgaagttcttatttagccacattatgggcttttttggttttcttcagcatgtcaatagtacacagcagctcagaatggtcaaaattgtttcattagtgccttaacaaccattcatgatatatcatattgtagaatgcaagtatagtcacgcactgcttagcgatggggatacattctgagaaatgcatcattaggtgattgtttccttgtgggaacatcataagagtgtacttacacagacctagatggtatagcctactacccacctagggctatgtggtatggtctgttgctcctaggctacaaacctatacagcattttcctaactcaatattgtaggcagttgtgacccaacggttaagtatttgtgtatctaaacacagctaaacaggaaaggtgcagtataaatacagcgttatcatcttacaggacctctgttggtatatggtgcacgactgtatatcctttatctacatttcccccttttggcttggatagaccatcaattccttgggtttacatttatttcatgtaatcttaaaggattttgttttatgcatggcaccattttttttcaatacaaatggttagtataaaacccaaatttgagaatttgataacaatggcttagtattgaacacaagtgttacataaagttgtggaaaaagccttagagaggtagtcaggggatttgagttccaggtctgactgtgcacttgactcaccacgtcatcttggttaataatcacctaacaataaaaataataaccttaatttatataatgctctgcagtctgcagagcacttttaaagaaagtataggctgggtgtggtggatcacatctgtaatcccagcattttgggaggctgagacaggtggatcacttgagtgattaggagttcaagaccagcctggacaacatggtgaaactctgtttctaccaaaaacacaaaaaagtagctgggtgtggtgaaacatgcctgtggtctcagctactccagaggcttgagcctgggaggcagaagttgcagtgagctgagattgtgccattgcactctagcctgggtgacagaacgagatcttgtctcaaaaaaaaaaaattgtattgggcatagatatgattattcacattttgtgatgaggaaactaaaattcaaagactttaagagatttgctcaaggtcacataccggtaagggctagaactagcattgatttttatcactttcctttcagtcataccatgctgtctctcattttacttttatgggtatcagttatgaaataagggggttggaccggatcagtgatttttttcaagctacatttacagagagtcttaggattcttttgagtggcctccaggtttgcttgtggaatgaagattgaaatatagggaaaggtgcttagctttgcaccagagtatccacactgagtgaggtagtagttgctcattgacagttgagaaactactgcatgttattaccgatggatgagtttgtgtccctttagtatgactggacaaaaagaaagtggaaagacatctgatataaacttttgaggttttgtttttgttttttaaagaatggggtagaattccatagctacttaaagcttgcaaactactgcattagatgatttttttttttttaaggtagggtctcactctgtcactcaggctagagtgcagtggcgctgatctcagctctctgcaacctccgcttcctgggttcaagtgatcctcccacctcagcctgctaagtagctgggactacaggcacatgccaccacgcctgggtaatttttgtatattttggtagagttggggttttgccatgttgcccaggctggtcttgaactcctgagctcaagcaaacaaactgccttggcctcccgaagtgctgggattacaggtgtgagctaccatgcccagccagatggtttttaaggaatttttcagcctgtgagtttgtaaaatattgcaaccttaactttggtggtgttacctgatgaatccctgatgactttacagctgttgcaggcttacatcagtttagagttatggggcattattgaagccctgtttatcttccaagatagtctttattcttctttgctaaggtggctatttttagtaatctttagggaaaagaggcacaatggcagaaatgagcatgtgttattattagtatatttatgcagccaatattggtaatgctttttttttttttttttaaagactgtgtaggagtgaaaggggagttttcctttccgcctttgaggttagctgaaaatcaactgacaaaagtcagattaataggagaaaaggcataaacatttttattaacatgtatggaggaaaatcacagagagattgcccacaacccagtggggtacagatgcttatgtacccttgtttttagaggaagggagatggggaggtatggatgattttacagggctagtaaatgatttttaaagttattcagtgggcttggagaatatacagtggtctgggacaaagttttttgggcctacagagcagatagtggtttgtgacaaaagtctgtccaggcccgggtgtggtggctcatgcctgtaattccagcactttgggaggctaacgcaggtgaatcacttgaggccaggagttcaagaccagcctggccaacatagcaagaccccgtctctactaaaaatacaaaaaattagttatgccacggtggcgcacatctgtaatcccagctacttgagaggctgaagtgggagaatcacttgaaccctagaggcggaggttgcagtgaggtgagattgcgccactgcactccagcctgggtgacacagagagaccctgtgtcaaaaaaaagataaaagttactcccaagcactggcatagtgcagtgtgcaatatatatatatatatatatatatttttttttttttgtttgtttgtttgtttgtttgtttgtttttaagaatattagctgggcatagtggcacatgactatagtcccatctaccagggaggttgagactagaggatcacttgagcccagtaggtcaagggtgcagtgagctgtgattgtgattccagcttgagcgacagagtgagtccctgtctaaaaaaaaaaaaaaaaatcatcaggtgtattgacatacttcagtctctcttcctgcaatattagttcagttaatgaaaactcggggaagggacagagataactattttcttctttggcaggtccagatttaggcagataagggaacttcagagaacaacttctccctgtgctttgggggtggtgaggggatggtcagagaggccttgaggattgtacagttcagcatgtcaaagtgccatattttgaggtatcggtttctgggcctcaacaactgctaataagaatgattgactttggagttgccttggagttatttcaaaaagtgaaaatgttattgtttagcccacactagttatcttagttgtcatttgtgttttctacaatctgccaatggttaaacctggcatttctatcaagaaggaactctttttgcttccagagtaaaggtatttttattatattaacccttgaaatagatccagttatgtattcactttgcgtttgtttctgaacaaaataaacctgtgtggtaagatggaagtgggtttttcacttacaatattagttacttacatttgtaccttttttttttttttaacttcttcacatttcctcccttgccctccacaatctgataagcatctcattgatgactatgagagactaatttaggccgtgtggttataaatgagatttcaattcatttcttcttctcttaacccgtctcagaggagatatcacagggtgactttctatgttgcgttttgacacaaggacagtttgtttttgctttggctgatggatggggcagctctagttgatgaatgtggtttatatgctcacaggcagatgaaagtgtccactctgccctgagaccctctcctttctgcttagtggtgttatgaaagccccatgggtatttgatttttcaagaattaatcagtacacagaagttgaaatgtagaccaaaggaaagaatatgttttttcagttaggctttttgtctttttttaattatatggggtttaccctttgtgtttcccaactcaggggtttcactattaaataattgtctttgactcttaaactttttaggtaaaatttatataccaggaaatgcatagatattaaatatacagtttaatgagatttgatgaattattataaccaccaccttaatcaatagagaaaatctctatatcccagatagttcccttgtgcctctttccagtcaatctctagacacatttacttgtataataaaaagattttgacatacccaactacaaaatgatcagatctttgtttctgtagcaatgggtagaataaaataaagtaggatttacttaaaactaatattttctttgtaggcaggcctgttgttacaggtagaaggtgctcaaaagctggtttcttaactaatttatggattatttttattttttatttgttattttgttatttttaggtttttttttttttttttttttttttttttttttgtagagacagaggctcactgtgctatccagggtggtctcaaacacgttggctgaaatgatcttcctgcctcggcctcccaaagtgttgggtgtgagccactgtgcccagatttattttattttattctgtttttttagagatgacgtcttgttacgttgcccagacaggactcgagttcctaggggattctcctgcttcagcctcctgagtagctgggactataggtgcacaccatggtgcctagcttaattaatggagtttttgataatggttgacaaagatagtggtaagcaaagcagcccttatatagactttacatcttaaaacataatcccctatgtgtgaaattgagaacagctttctagaataataaacagagatctgtatgctaactaaaaggcagagagaatattggctcagccaggccctcacttttttgttcctccctatctgtaaaacatcatttacctcatcagcgtgctacggacatgggttaatgtttggaaaattctgtggaaagagtggggttctgacaatgtgctctgaccaaggcagtttagcaaatttgtactaagtggctgacctttgataagcaccactccttccccacctgacctgtgattccatttttcttttgtgcaaatagttctgaaggtttaatgtttattttttactacgatgcagtagactttcttctctcgtgtagaaactgctcgaatgactgtggatgactcctagaatataggaataacagaattggtttctcctgtactctcaacacaaaatacttctgtgaccaaatgtgtgggagtgtgtccccacacaccaagcagtcaaccagttctgcagcagctgccagctggtgtcctctaatgcagttcagttcagttcagttctgacactgtctacctggagatagcgtcagatctcacagattgagggctcagtcccacaagtctgtccccagtcttcagtgccagtcacaggctccaggtggttttacctgtgcttctgacctgctggctataaactggtttcccaatatccccttattgggttccatgaaattgttagagtggctcacagaactcaggaaacatactgaccagttcattagaaaggatgttttaaaggacacaagtgaacagccagatgaagagatacccagggcaaagcctggaagagtactgaacgcaggagcttccatcccggtagagctggggtgcctcaccctcccagcaagtggatgtgttcctcttcactctcctggatgcccccttttaggtttttatggaggcttcattaggtaagcatgattgattaagtcattggccattggttatcagtgcaaccttcagcccctctcctttccctggaggttgagggtggggttttgagttctaactgtatgagcacagggttgattcccctggcaattggccaccagtcctgtggttatctagggactttgcaaaaatcatctcattaacataagctcaggtgtggttgaaaggggcttgttataaatagcaaaagactgtcttttgcttttatcactctggagctgttcaggaaccagtggcaagaggccgaatacagtattttaaccaaagtcacttaggaaattacaagggttatataggagctttaagccaggaaccatggagatatatgtatgtgtatatatatatgcacatatacacatacaaatatcaccgcgacccatgatgctcttctcaagggcctgtgccttctgataaacggctgagttggctgttacacttactttttcgagcaaatgaatgtgtagtttcatctggctcattcgtcaaaccccgggtttggaaggttgtatgtttttatttagctagtagcagttgatgtggttgaggtggggcttttctttggggaaggtacagctttgaatggctgttatctttcaagtacaaatagtgtagctccttatggctcaatagtatcaataaactgttttatttgctttccttttctcttcctttttttctttttttttaaacggagtctctctctgttgaccaatctgaagtacagtggtgtatctaaactcactgaaacctccgcctcctggattcacggtgaaatcccgtctgtactaaaaaatacaaaaattagccgggcgtggtggcacgcgcctgtagtcccagctactcaggaggctgaggcaggagaatcacgtgaacccgggaggcagaggttgcagtgagtcaagatcacgccactgcatcccagcctgggaaacagcgagactctgtctcaaaaaaaaaaaagaaggggttgactgccaagtttaaatattggcaggagatgaggagatttcagtttttatggagctttgttaatgagccgtgactgtttattacaagacttttacttttaaaatttacttagtaattatttactcataaaacagctacttactgtaaccagtaggtcagttctactcttgaggcttcacatttcttcatttgtaaaattagtacttgtattggtgtccattccctttctgaaattctgtgatatatacatttcctttaaaatgttacaattgaaaaaaataaagttacaataaagaccgtgtgcggtggctcaccctgtaatcctggcactttgggaggctgaggtgggtggattgcctgagctcaggagttcgagaccagcctgggcaacacggtgaaaccttgtctccactaaaatatgaaaaattagccaggtgtggcggtgtgcacctgtagtcccagctacttgggaggctgaggcaggagaattgctagaacccgggaggtggaggttgcagtgagctgagatcatgccactgcactccagcctgggccacagagtaagactctgtctctaagggaaaaaaaaaagttacaataaaagccaggtgcagtggctcaccctgtaatcccagcactttgggaggccaaggcgggtggatcacctaaggtcaggagttcaagaccagcctggccagcatggtgaaaccccttctctactaaaaatacaaaaattagccgggcatggtggcaggcgcctgtaattccagctactcaggaggctgaggcaggagaatcacttgaacacaggaggtggaggtttcagtgagttgagatgcactactgtactccagactgggtgacggagtgaaactgtttcaaaaaaaaaaaataaataaaataaaataaaaacaatgatacaataattcagtcttgtttagagttgccattttctgagtgttctggccatagcatttcttcttcttgcctccttcccagcaacatttgcccacttgctgtggactgcagttaattaggctggtttggagctctttccttcctgttccatttgtgttacacctaaagcatctcatgaagatgatttagattagttcctgccatcaaagataatccagtttaggatgaagtcaacagtattttaagggtggagttctcttttggaactgtcatttggtcagaattagtgaatgctgttgtagagctgacccctgcacaacacaggtttgagctgcgttttttctttttaaaacaatccacttatatgtggatttgttttcatcccaatgctgatcaaaacagtggtatctgcaggatgtgaaacctgtctgtacagagggccaactttttgtatatgcaggttcctcgggggactgcaggacttgagtgtgtgtgtaatttggtgtactcaggggtccttcctggaaccagtcccccagtataccgagggacaactgtgttgagatatcagctgcgggtttccccccaagctgttactcaattttcacattatctggggtttcctctgttctcatattacccccgaagattttataccaatttagggacatcgtgttttccaaatcctaaatgaaaagcaggatatgaagtgttcgtattttcatgttctatggtatttcctctcatgctcgatttatttatatctaaaatcatgtcatgtaatagtatattaataatgctatacatttggtactttgccattcataaagtgtttttacaaatattgtttaatttgaacctcatgataagctatctagacaggtattttctcagacagatgaggaaactgagatttatagagattaatttgttcaattccaagtagctaattgaaatccatacgacctttctcatttataggatttgtagatcctacctcctttaggtgcaaaggagttgtataaccagttttttttctactagaatgatgacctaatcaggagtaaatgacttttacttcatgtgtgacttcttcatactcacaggtactttgattctttcaatgtgtgttacaccaatttgatagtatcttgccttaaaaaaacatttgttttattgaatgtttactatgtactaggcctgtgcttagcactttcaaaaacctttttgttttgaaagaaaagaggtatactgaaaagtgtataataaaatacacagcttaatgagctgttataaatactcctatatacaacacacagatcaagaaatagaacatttttagcatgcctaggagccagctttttgtgtgctgtgtccaatcaacatgctaactttttgatattcacttctttttcttcttcttatttattattatttttttagagacagaatcttgctctgtcaccctggagtgcagtggcatgattatggcttactgcagccttggcctcctggcctgaagtgattctcccacctcagccttccaagtagctgggactataggcacgtgccattgcactcagctaattctttgcttttctttattgatttacttcctaaacaagcatctttaaacaatatagtttgcctagtttttagcgttatataattggcattacacaatatgtattctgttgtatcagcttcttacatcctgttttatatttttctctattatgtgtagcagtagtttgttctttttcattgctgtatagtattccactgcatgaatatgccactatttcttcattctattgttggtggacatttgtgggtgttttcctgtttggggatactatgaatttgcagctgagaacatttcctcaccctcccagctttattgacgtacagttaacaaaatttgtgtatattcaaggtatacgccatgatgtcttgatagatatatacattatgcagtgattaccataacctaactaattaacataaagaacattattttattttttaaattaaaacaattttttcggagacagggtcttgctgttttgctcaggctggtcttgaactcctggtgtcagattatcctgctgcctcagcctcccaattagctgggattacagtcatgaaccactgtgcttagctcaagaactttcttatgtgtttattctggcacatctcagcacatatttgtgttggggatatacccaaaaatagataggtcatgggattccttccttccttccttccttccttccttccttccttccttccttccttccctccctccctctctccctccctctccttccctccctccctccctccctccttccttccttcctttttttttcgcagagtctctctctgtcgcccaggctagagtgcagtggcgtgatcgcggctcactgcaagggccgcctcctgggttcgagcgattctcctgcctcagcctcctgagtagctgggattacaggcatacaccattacactaggctaatttttgtattttttgtaaagacggggtttcattacattggccaggcttgccttgaactcctggcctcaagtgatctatctgccttggcctcccaaagtgttgggattacagatgtgaaccatgatgcctagccaggatttctttatcttcagtttattagctactgcccaacttttttcttttttaaaagccagtcaaatttagcaatggggggttgtataccaactttagtgacactaaagttaataagttctgataacccactaccataggaccagcctgtcaaacatttttctaaagtggttgtaggctgggcacggtggctcacgcttgtaatcccagcactttgggaggctgaggtgggcggatcacctgaggtcaggagttcgagaccagcctggccaacatggtgaaaccccgtttctactaaaagtacaaaattagctgggcatggtggcacatgcctgtaattagtttgggaggctgaggcaggagaatcacttgaacccaggaggcggaggttgcagtgagctgagattgtgccattgtactccagcctgggcaataagagtgaaacaacgtctcaaaaaaaaaaaaattagctggacatggggttgtatgtctgtaatcccagctactccagaggctgaggcaggagaattgcttgaacccaggaggtggaggttgcagtgagccaagatcgtgccactgtactccagcctgggtgacagagcgagactctgtctccaaaaataaaaaataaaaataaataaataaagtggttatagcagtttaaggtactcaccagcagtataggtgagttcccatttcttcagatcttctctaacacttgctgttgtcaacttctaaatttaaaattttaaaatttaaataattaaattaaaaattcctaatgtagtaggaatatagtggtatctcattgtggttttagtttgcatttctctggttaacaataggagcaccttttcatgagtttattagctgtgatattcaagtcttttgcacatttttcttttgggttatttgtcttttattgacttgtggtagttcttaaaaaaattttttttaaattaaaaacttttgtgtattttggagacagggccttgctcttttgcccaggctggagtgcagtggcgtgatcacagcttgctacagcctcaacttcctgggctcaagtgatcctcctgcctcagcctcctgagtagctgggactaaaggtgcacactatcgtgatcggctaattttcatatttttagtagaaacagggtcttgccatgttgcccaggctggtctcaaactcctaggctcaagccattcacctgcctcggcctcctaaagtgagagattccaggtgtgaactacccacttaaaaatcgttttaatttaaaaaataaaatgaaaagaatgttcttcatgttaattggttaggttatggtaatcattgcataatgtatacatctatcaaaacatcatggtgtatgccttgaatatatacaaatcttatttgttaataaattgttgaggaaatacctggccggtagttccctctatattttggagatgagccccccttttttttattgtacttgttacagatatcttttttcccctctgtagcttgtcttttccctgttagttgtgtcttttgataaataaattcttaattttaatgttgtaatgaaatttaatctttttttctgtatgattagtgctttctgtgagttatgacataaagtcataaagataatctctaatattatcttctaaaagttttattgctttgcctttcacatttagatttcttaagggctaaaattattagataactaggtattagttgattatatgtaattagtaaacaaatatttattgtgacttcagctatgtagaagagtcagtggtagatactaagagatgtaagacttggttcctgccctaaaataatcaacattctgtttgtgtaagtaaggcccttggcatcagcacgatgtaatagaaagaacactgactggactgggcctggtggctgatgcctgtaatcccagcattttgggaggctgaggtgggaggatcacttgagcccaggaggttgaggctgcagtgagccgtgagtacaacactgcactccagactgggtgacagagcaagaccatcctgtctcaaaaaaaaaaaaaaaaaaaaaagaaaagaaaaaaagaaataaaacacacacacacacacacacacacacacacacacaccctccccccccccccctcagaatctggagacttatatccatgtccttttggggacctggctgtgacaccacctttgtgattttagaaatctcctttccttctctgggtctcagttttatcagtaaaataagggattggcttaagtatgtagttcttgattttggttcctcagattgataaggggtctgagtagatagcactggaagcattttttttttaaagctaaaagtatacatttttagccatggtgatgccacacaggttaaccaaaaaataaaatatctttgcttttaactggagtcgtgtgtcctttctgtgtgagaactgagtttaacagctttgatttacaataaaagttttaacttagtttttcaaaaaaatacacttcgtttattgataatcccagtttggtatacaaagtttttttatgtttttttgaaatggagtttcactcttgacgcccaggctagagtgcagtggcacaggcttggctcactgcaacccctgcctcctgggttcaagtgggtcccagcctatctaggattataggcgtgtggcaccatgccctggtgattttttgtacttttagtggagacgaggtttcaccatgttggccaggctggtctcgagctcctgacctcaggtgatttgcccactttggcctcccaaagtggtgggattacaggcgtgagccactgtgcctgaccttatacaaagttttaaataacatggccttctgactttaacttagaaaccaaagagtggtaggagtagggggaaggtattaaataacagaaactatctttggtgattaaaaagttgggtacctactattctaataacttttaagggctcttctgtaggttagtgtaaaagtaattgtggtttttgccattaaaagtaatggcaaatggcgggcgcttgtagtcccagctactcgggaggctgaggcaggataatggtgtgaacccgggaggcagagcttgcagtgagccgagatcacgccgctgcactccagcctgggcaacagagcgagactctgtctcaaaaaaaaaaaaaaaaaaaagcagtaatggcaaaaaaaaaaaccctaagaatttcaatatattatgagtcagtgaaaatatagtatttgttgttttgtttccctaagtgcccaattgagagatctggacaattactattatagagattgtgaggatggacagagaaccttttgttgactgaggtagtcaaagaaggaaggctaccagggtgagctaggattgagcagtgagaaggattgtttctatgtatggagaaaaatgggaaagagggaattgtggacagagcagtgtaagcaaggatacggaaatagcaaagtacaggtcatttttagggacagaagatgaatcagtttagcattagaagatgatgaaaaagtagtctgaagttaaagtatggaaagccttcttcaaacataaggtcaaatacagctttggaaaagttaacagttacaagtatgatggtgtaatgaagattctagttcttctgtaagccaagcaggggccattggctttaggatgccctctatgctccaatataatggtgctgcctggcatcattgaaaacattaaaaaaacttttctaaaaagtatttgaggactgggcatggtggctcatgcctataatcccaacactttggaaggctgagatgagagaattgcttgagtccgggaattcgagaccagcctgcaacatagggagaccctgcctctacaaagaaataaaaataattagccaggtgtgggggtacatgcgtgtagtcccagctacttgggaggctgggaggatcacttgagcttgggagatgaaggctgcagtgagctgtgatcatgtcattgcactccagtcagtgatagagtgagatcctgtttctgaaaataaaaagtgtttaggggataaccagattgggcttgtattgatagccagaccgccaagcaggaaactttatgtatttattttttaagagttggagtctctttctctctattgcgtaggctggagtgccacagtcgttgggactacaggtactgccaccatgcctaattaaaaaaaattaaaagatggggtcttgctgtgttgtccaggctggtcttgaactcctggtctcaagcagtccttctgcctcagctccccaagctcccaagggagtataggcgtgagtcaccatgcctggccagaaaccttattttgtggtagttgttcagctataccttgcagaattttttatgtgaatcctcagtaaatcccaaacagcttctctcagtactaacacatggctgataaatggtactgaattctttgtaaatctcaccaatctcaacagaatttctggttcggggtaaaaaaaaaaatttccgtttaatttctgtagaaaataaccactcagaatccactctctgttatgtgtaacaatggacagaaattttactgttgttggtacaaaacaatgactcatcccaaatcatctcttggaattaagaatgtaatcgtaatacactcatactcatatgtacgtgctcagacagtccctttctgcctttctttttattaccccttctcactccgctgtggtttagcttgactaatctatttgcagcacatcagcatccttaatgcagaaagtttgcagcttctgtttacagggggaaaaaaaaaggagtgtggagattgcagatttcatctcttttttcttcttttaaaatttataatttccttttttcaggaggagggtgattattttcgtttttgtttgagacagggtctcacgctgtcccccaggctgtagtgcagtggcgcaatcttggctcactgcaacctctgcctcccatgctcaagcgatcctcccacgtcagcctcctgagtagctgggactacaggcatgcgccatcacacccagctgatttttgtagcttttggagagacaggatctgtccatgttggccaggctggtctcgaacttcagagctccagtgacccagccacctcggccttccaaagtgctgggattacaggtatgagccaccgtgcctggcctacattttgtctctgacatttctcaatctaaagtatatgtatatgtacatttatacatatgttatttacatatatttttttctttaaaaaattattttttggtggactgagtcgctttaattaagactcagtcattttaatgaagtggggttatttactttgaccttcctccccaggaaatagcacttaaatacttaaaggaaaaattaaagaggaccaaggccatggtggcagggactgggagcatggtggccatacagcctgataagccagcagagaagagtcccacagtaaactgacacaaccctggtgatgtaggtggtttaggcacagaaaaaaggaaagtcagatttgagtaccctcagcaggccttgtactggtcacccccaatacccatgagaacacagcatcctagtcctccctggcttatcggtgctctccacatgggggatacctgtcacagcttttattccaggactggggaagtcacacttttctgcccaccccacccattgttttgcagagaagaatctctaaaaccttcattactcatgctgaaagtgctataggtatttggaatgggagaatgggaaagagtaaattctgaatgcattggagccttaatttgctgccctttctttccttccctctctcatcttcatgaaggagggcccattgtgaataaggaagaggggaagcctgtctgggagaggctttttgggtactgggcttcccaggaagaagccacttcccaccgtccccttgatgatcatgtgacccttttctccatgcagccagaatcagcttctttggggatgaactggtaatagatgttgtcgttagtgttatttttaaatttttagatatttttttccagatgcatcttcaaaatgtaggctttggaggttgataaggttttgtgggattggtaagtgttaatctagaagttgggcagtaaacaagaatagtaccttatcagcattaaaacaaagcatctgaaagaaatgtttttgaggagtagttgaatatttagttggttaaaaatttagactcagaaaattttcaggaaggtgataaagattcactaatcattaagtagggaatctcttaaaggttttatattgatttgatacattagagaatgctataataatagtgtactttgattggtggcctataaagtaattgtgccttttatggtatttatgaattggttatattttaaacaataaatcttgacttttgcgtcagagtttctctgttttgttttttgtttttttttttgagacctgctttgtcacccaggctggagtgcagcagtgctgtcattgctaactgcagcctcaacctcctgggctcaagtgatactcctgcatcagcttcctgagtagctgagagcacaggtgcgtgccaccattcccagtgcctcactttaggctaagtttttcattttttgtagagacagggtcttgctttgttgcccaggctggtctcgaactcctgggctcaagcaatcttccctccttggcctcccaaagtgctgggattacaggcatgagctatcatgcctggccctgcatcatagatttttttttttttttttttgagacagtgtctcactctgtcgcccaggctggagtgcagtggtacaatctcgctcactgcaacctctgcctcctgggttcaagtgatctcctgcctcagccccccaagtagctgggattacaggcgcacaccactacacctggctgatttttgtacttttagtagagatggggtttcgccatgttggtcaggctggtcttgatctcctgacttcaggtgatccacctgcctcggcctcccaaagtgctggaattagaggtgtgagccaccgcacctggctacatcatagtttcttaaaatcaccaactgttatctatgttttcctattttaattagtctaatttttaataatttatttctgggttagtttctgtacttttggtagaattgcagactcacaacaggcttcaggaaagtaattttaccaaatgcaaggctatttgcaatttagttttctgattcagaagccataactctgtgctggatttgattattcattatttaaccaaacatttttcaaatgccttccttattttctgtcttaactgcgtagaattaagcccatttccaaaaggattttgaggtaattctggagtttgagattaatatttttaaaaagaaaccagagttcattttctgcagagaaagcttttaatcaaatatacatatagtaccctgtgtccttaattgaattgagggtttgacttttctccatgcagaattcgagttgatatttttgtagtttaggagttttgacttttctcttttgcctttatgttaacaaacttgtgagtttgcaaggttataatagaaagagtatatagggtttggagtcaggaagtcctaggttcaaattttagcttaatgagcaagttacttaatttttccaagccacaggttccccagctatgaaatggaataatattacccatctattggggttcttgtggggattaaatcagatgaaagtgcttagcatagcatataaatgttagtttattttcctttggcaattatttaggctttagggcaaaattgcctacttgttttggaatgaacccaaattttatggttaattttaggctttttcttcagttagacttttgatatgtctaactccttcccaattttttttttttttttttttttttttttttgagatggagtctctctctgttgcccaggctgaagtgccatggtgcgatctcagtttactgcagcttctgctacccgggttcaagcgattctcctgcctcagcctcctgagtagctgggattacatcactatgcccagctaatttttgtatttttagtagagatggggtttcaccatgttggccaggctggtctcgaactcctgacctcaggtgatctactcgcctcagcctcccaaagtgttgggattacaggcatgagccagcacacctgggtggcagtgcattttttaatgaggaagattgaacaacttgacagaagggtgagctcatattctgaactcttacagttcatctaatgtcaaatttctagaaaaaaattatctaaatctaaaagttagtatgacactccataacattaattgtgagtccctgagggggcagctataaagataaaatggagtataggatcccccaacacacataacacaaacgcttgtgattgagtgtgcattggcacatgtacacctgtgtgctcacccctcctctcccttccttcacctctatcatgagtacaggtgtgttgctttgaattggtgaggagtgggaaagagagtccttttggtgacaagaaagcaaactggttttatttagttcaccaaaatattgttttgatccttttttgtttgtttgtttgttttgagacagagtcttgctctctcacccaggctggagtgcagtggcgtgatcttcgctcactgcaacctctgcctcccaggttcaagcgattgtctcacatcagcctcccaagtagctgggattacaggtgctcaccacccagcccggataatttttatatttttagtagagacagggtttcactgtgttggccaggctggtctcaatctcctgacgtcaggtgatctacctgcctcggcctcccgaagtgctgagattacaggcgtgagccactgtgcccagccgatccttttattttcaatataaaactgttgctgtaagcacgagcatgtccaaagggaacaccatgggatagtagtgaattgagggtgataatccagttttgaggcttaagtctgcaattcctggattaatttggctgctctgttattggtggctttgctaggatcattttcaaatcactttattttcctttatggtaagtgtattaatagtatttaataacaagattaatctgggccaagggctttcctgtgaaagttactattttcattatgggagaaaaatagagcagcatggccagtgtgcatttttgttatcccatccttaggtaagtgagtttagacagcctgagctaaatacctagatttgcaaaaacacctcctacccccatgctttccttttaccatttaaaattgtttgtgaagatcttttttttctttctttctttcttttttttttaaacacagagatagggtctcactgtgttgtttgtttgggtttgcaactcctaggctaaagggttcctcccgcctctgcctcccaaagtgctgggaatacaggtgtgagccgcagtgtgcagcagcttaagtttctgatctccctcaccacctcgcactttcactcctcataccccttccttgtttaatagaaggatcctttgttttgagtagtctccaagtggagtattttggagagactttgaataaatcctggcccaagcctgatcacaacacttggacattgagcttacctgcattctgctgttgggtagatatggaatctctgcccctcttgatcaaagctacatagcccataaggaaacatccattgagcagccttctttcctttcacttaatcaatttcaatgtattgtggtagaggtctttgtgatattccattttagactatatgatctttaggaatgcttaaccctgctgtgccaaagaccaggggaaggctgtgtattcaaactcatttgttctctgcttttttctttttaattattagtagttaactctaaatgaaagtatagaactgtttagtttgagcaaggaacactatttgttggcctctgctttctgttccccttccttcccttccctccctttactgtggcatcatgattcttccttcctgtattcttggtcattctcccagcacctcactttagccctacagtggagattcttctgttcactaataactgcagtggtgtcagtttcagtagatcagccttcgtcttcctttgcttgaatggagtgtttaacatgctggatatcctgcctctttctgctgaagcatctttcctggggtcattttgacttgctgcttatataactattatgtcctttgggtttgtgatactttatattatcaaaagcagcaaaagatagtaatagaagtaagatttttattactctcattctatgaatcagatgttattatcccattttagagataagtaaattaagagagtggttatacctgaagttccagagttattaaatgacatgactggattcaaacccaagagagcctgacttcaaaatctgtgcattgatctctactgagtctgaaggttactgacccagtgaaccagtcactgttctgtttctaagaaacgtttaggttctggctcttgcagggatctttatagtcctgtatttgcaaaaacacctcccacctccatgctttccttttaccatttaaaaatgtttgtgaagatcttttttatctttttttttttttttttttttttttctgagacggggtctcgctctgtcaccaggctagagtgcagtggtgcgatctcggctcactgcagccttcacctcctgggttggccaggctggtctcgaactcctgacctcaggtgatctgcccgcctcagcctcccaaagtgctgggattacaggtgtgagccaccatgcccagcccacattttgtttttatattctgagtattatatagtaaaaaaggagaagagttcattgatacagtcttttaaaaactgatctcaatgatatagtaggaaaaacactggattaggagataggggttttaagttctaatcctgcctggctgtgcccttaactagctgtatgagactaggcaacatttaccatttccttcccaattaaattgaggtagccgtactagatttatctaacatgcctttcattgctcacatcatgcgacattaagctttaattagaaagctttggttttgggacctctttgttttcccataggctttaaccttgtttcctttcttattgcccagcaggaattggactagagttggccaaaggtgggatgaggagaagaggtaggaatcttacaagagttggttggagtaaagttattgacaggtgggaagaagtattcctgtgactctgtggttgttcccttgtaagatttgaaggaaagtaatgagtcaggtcttaataatagtgcctctatgttatttcctccaccccattatcttttgtcagaattgattagcaaaatgcacttacccaagtattttcagggtccctgtttggatagtctaaataacgttgttctttttttttgttttggagacagggtctcactttgtcacccaggctggagtgcagtggcacaatcttggcttactgcagcctcgaccttctgggctcaagcaatcctcccacctcatcctcctgagtagctgggaccacaggtgtgcaccatcacgcctggctaattttttgtattttttgtagagatggggtttcaccatgttgcccaggctggtctcaaactcctgggctcaagcgatctgcccacctcggcctcgcaacatgctgggattacaggtgtgagccactgctccctgcctttagttacctttatcaacctatggtcctaaaggtagattcattgaacttgcctgtcagtgcttaaggatcagtcctgtcttagttcagacaagttaaattcagggttgcattctgtcaactttgtttctaatcagtggatgatcagatgatatttggagaggatttttaatatatgtgaatcttatggtggcattctgttacttaataaatactttaatttcttagcttttttccccatattctccataatttttgtagatagatgctcagacgaaggcagcagtagcacatggataatcagagttttttgtttgtttgttttaacatttctcgttaaagtataatgttcagcaatggggaccaatctatactcctcatctgtagtctgtcaataaataggttgctccgactttaaattctcagcttgaattgtttcttttttgtgtgtggaatttatgaccctctgtgatgttgaccctacctaaagcaagtagaatagctacaccagcaaaatgaaataccataacaacaacgtatgcttatgtttatatagtgcttactgtgtgcctggcatggcattgaataaatatatatatttaataaatagagttggggtctcgctttgttgcctaccttgtgttgaactcctggcctcaagtgatccttctgcctccgccccgtcaaagtgctaggattacaggcatgagccactgctcccagccagcattgaatatatttttttttttatttcatcctgagaacaaccttatgaggtactttcaggtcatacttttattaccctcattttatactagaaaaattgtgctttaagatgttaagcaaattgcccaaagtgcaaaaccagtgtgttggagcttgaattccaaaccagatctgcctgagtcaagcttttcttttatgttcttatttactaaaggcttcttgaacagaagtatgtgagagttgggcacatgcagcttggtcaattctatgtaaacccggtcagattctgagtagtgtagatctgataaagtcaatgtgaatttcttatcattcgttgcaagagacttaatgtagcaaaaatcagtatcataggaaacgagatgttactgtggtaggcacactgttctctctcagctacctcatttttgttgttattggtggtggctattgctctggcaactacaaaggcagcatttacttgacacggcgtgtatgcttaaggcagaacactgactgcttttcattgctggcaaatccggacttcatcagtactggctacctgtaaggaatgtgagcatgttggattttagaacaggaaaaacacaacttccacctcatttcacagtagagttcacttagggatacagactttttggtgacagtaactgttactttctgcttattaattcagatacttgcataatgctaacctggtagatattgtcagatgacaagccttcctcctacatgttctctataaaagaactgctagtgacaagcattttattatattaaaaattctacttcatactgttttaagttaaaatgtatttattatgaagccaatattgtgaaatgtttttttctttttccagaatgtggtttttttttcttgtaatggactaagatgcaggcttattgtgtagaatgaggagctattgcccagatggaccttagtgaaagtaacttaaataagcaagtagattttgcttctgtttgggaaaatgatctaagacggatgctggtattttgggcaggtggagactaatgttttatctcaatgtttgcaacttaagttcagcctacttaagggctgtcccttaagggtgtccaattgtttggcttccctggccacactggaagaattgtgttgggccacatataaaaatacactaacactaacaatagctgatgagctaaaaaaaaaaaattgcaaaaaagtgtgataatgttttaagaaagtttatgaatttgtgttgggccacattcaaagccgtcctgggacgcatgtagcccacaggctgggttggacaagcttggtctagaagttttctagattttactacaatgttcaaatggcaaactttaaaagtggggaaaggaattttgggtgagataaaaagacaggtttgaaaaagcatacaagttcagggaactgcaaatggtttcttaagaccaaagcgcaatgtcagtgtgaagaagtggcaggcaatgggaaaggataaatcagtggagcccagacaatgaaggagctttgtacttgatgctgaggagtgtggatttgtttctgcagataatggggaacttctgatttttctttttttaggtggacagatagaatcaagtttgcttttgttaattcatgtgacaatgtagaaggtggactgaaggtagggagagtattgtattcattggagactcattaattgttagaagactattgtaatcattcaagcaagaaataatgacctaggccaggtacagtggttcatgcctgtaattttagcactttgggaggccgaggtgggagaatcgtttgaggcctggaggcagggtcttgctctgttgcccgggctggagttcagtggtgtgatcatggctcactgcagcctccaattcctgggcttgtgattctcttgtctcagcctcccaagtagctgggactatagacgtgagccactgtgcccagctcaaattactttattttaaattttttttttttgagatggaatcttgctgtgttgcccaggctggagtgcagtggggcgatctcagctcactgcaacctccacctcctgggttcaagtgattctcctgcctcaacctcccaagtagctgggaatataggtgcacaccgccatgcctggctaatttttgtagttttagtagagatggggtttcaccatatttgtcaggctggtcttgaactcctgacctcaggtgatgcacctgccttggcctcccaaagtgttgggattacaggcgtgagccactgcacctggcctcagattactttttatacattgaaagatgacctagaaattagtcaagacattaatttagatagtcatacagtcaagtgacataaacctcagagaagaggaaggtttccgtgctatcgccccacccactagagtggaagaactttgagggagatagaatagtgatattataatctagttcctatagataaagaatgtttgccaagaaggttaacttctgtagctgagctcctttgctgagaagatgaaggaacactgtttaatggatagatttagtctgtgattctctgtggaggtgattactgtcagttctctttatcctagcagcatttggaaaactgcagctaagcaacccgtcgtcatttcctaatgttactataatctggtgtcaatgactaatgatctcattgggctagttattcccttccagcgatgctggcatcaggaagcacattaatagtctgtaagaaatgcattcattaaaaaccaggtaatcactttggagctggtcctggcagtgtctgaataaattggacaagttagagaaaatcttgaacctgaaagctactttgtctttcagcttggtttgggcaaggtaggaagagatgaatcagttataatttgatgggatctaatgttacttttataagatacatcactttaatatgatgcttcatcattaatgttttagtaatctgacagcattagacagaattgatattccccttattttattatttcttggcttcatgacagaactgtgcattaaaaggcacttaagattttaaaagggatatctaagaaagtggttaaaaaacaaacaaatcccaagtggcttgatctgacttacaaactctaacaatgtgtagctaattgcagatagattttattattcacagtattgtgtcaagtctcctgtgcacatcttctgtattggagcataagtaatggagatgttatcttgcccaacattaggtttgaggaagtcgtttttaagacagaaatagtagaacagtgttattccatactgtactttccccttttatataagcttgctaaaattaaggttgggcaataggcccttgagctaaatgtgacctgatagaaagttttagcaacaatgaaaaaaattataactatctaatatacatatctaatattagatatttaccttacttacatatcatgcacaatcaaacaaatggcaattataactacattcttttttacttgccataatggaaaaactttattaaacaaattatgcccactgttgctctgggatttggggactaggtaggcatgatttcaatggaaaataatttagtaatggtatgtctcaataatgtatcaacaacctggaaagtatatattctttgacttaggattttcatttctaagaatttgtcttatagaaataatagtaggtcaaaacaagaatgtagtcataagagtatttactgcaatgttgtttagaagagggagaaaacaaatgaaaatgggctgggtgcagtggctcacgcctgtaatcccagcactttggaaggctgaggtgggtagaccacttgaggccaggagtttgagaccagcctggtgaaaccccatctctactgaaaaaacaaaaaagaaaagaaaagaaaagaaaacaaaatgccacaaaaaacaaagagatgaaaatgaaaagagatctcacaagacatatgaatatgttgcacttcaaactgatgcaaacaggtgtccatctaaattcaatagtgggcagttagaatttgaaacttagttgtcattgatgattgccctgtgctcagaggaatcacagattaaaaaaattttttttagaaagaattgaagttgagtttcagaaaagtcagacatttaagtttacaaccgtagttggagtgcaaacacatatatgtcttaattacaaaatgtctgttctgttagtacaacttagcataaagaagagatggacctacaagtgaagtatatcaactgataagaaacaaaatgctttaaaactttggattcaaacctatgattccagaactgttctaacattttaaacaatatggtcaaactctaggcaagtttggttcccttgtgtttgtgaaactatatttttcatacatcttctgaagtaaaaactaaacactctcattagttgtttaaatctggaattggatttggaatttgccttgattttatatacctttgttcttgaggctacctgtatttgtcagttttatcttaacttactcaaaatgggtcacttagtaaaaataattgtctaactatacacttttagtttgattaagctttttggattagtttgggattttgactaagtttctatatttgtatgatcaataatttcatacttatagtaaacaaaaatttatatatctgtactcctatagatttatgattctgtggctctaaaaatttcagtgctcttagagttgtggaaagagcagagcactagattaaatgaaacctctgtgtgccaggccctagctgggctttctcgaggcattagagtgataaagttggttgaggaaatggtgaaagccatacctttgtcctgccattttttttctttatgagatcatggttgaagtccctgactctcatgatagtgaaattgagattttaaatatttgtttctctttacatcccaaatccattatagctaagaggaggaatttcagatatttttccaagagcggttgtcaattttttttttttttttttttttaagacggagtcttgttctttcgcccatgctggagtgcaatggcatgatctcagctcactgcagccttcgcctccagggttcaagtgattctcctgcctcagcctcctgagtagctgggactacaggcgtgcgccaccatgcctggctaattttttgtatttttagtagagacggggtttcaccatgttagtcaggctggtttcaaactcctgaccttgtgatctgcctgcctcagcctcccaaagttgtcagtattttacttacttttctttccttgcatattggaatagcttttttttttttttaaattatcatatacactacctgtggaggtaaaaacataaactgttgttttcttggaggctgaggcaggaggatcacttgagcccaacagtttgagaccagcctgggtaacatagcaagaccctgtctttataaaaataaaaagaattactgggtggtgtgcacctgtagtcctagctacttgggaggctgagtcaggaggattgcttgagcccaggaatttaaagctgcaatgagctatgattatggcactgcactgcagtctgggtgacaaagtgagaccccatctctaagaataaaataaaatggaattaacattcactgtcaacaaaggcactcttgtgccgtttttgtccccttcttgactgtcctggtcgtatgagatctgtttttcctctaaattcattgtatactattttctttacattgtacatttggccatctctgggaaaatgttaagaatgttaatgttctcattttagtatactgatatctcacttttcagaatatcaccttcctaatctttttctttagtcattttatccagttgtacttatgtaagctaccataaactttttctgaatcaaagcaaaatataaattaataaatgtttgcttctttaatagtgtatattttattccttttatcaaatttttaagtcagtaagtactgtgatttaagaactttttatcctataatactgaataaagtgttttgatatagaatacggtacatagatgtagatatgcatttagtgccttgcatatttgttgaatgaatgattactacacatatgagctaagtcagctgtttggggtcttctttttgcctgcatctgattggcttgtcaagcagactgactgcccacctgttagacccatatgggctggctgagtatatagctagtgttttgctcagcacacctgcttgtgcgcatggattgatgtctgctcttaaactagttgccaaggagtcaagtgtatggcaaggtgaaggaagactggcagtgaagatatcttaaagaggtaatctaataataatggccagtggttcccctgaatcttgtttgctcaagttgttcacatcagagagatgtaaaattgctttcatttgggtggatttgggaattcttttttgataatgggaaaaaatgagaaggtcctctatgatattgttgtggatggatgtgcatatggtcagagaacatgaacctgttaaattttgagcttgaatacttttcattaacaacttaattgagaatagctagatagcatctattgtttattctttttataacaagtagagaaatagagaaatgtcttttttttttttttttttttttttttttgagagagagtctccctctggcgcccaggctggagtgtagtggcgcgatcttggctcacagcaacctccgcctcccgagttcaagcgattcctatgcctcagcctcttgagtagctgggattacaggtgcccgtcaccacacccagctaattttcatatttctagtagagatggggtttcatgatgttggccaggctggtcttgaattcctggccttaggtgatccacccgccttgggctccccaagtgttgggattacaggcgtgagccaccgtgcccggcctgagaactgtcatatttttaatcctgttgggtctcccccttctcctgtcactgtatttgagcaagtttatataaattattgatatttttctggccacaaaagtgcagctatatttaagataatatttttttattttcaccctcttgacataatcaagccataacatgaaatggagatttattatttattgtttattgaataaaattttgttccttcttctattttttttggagacagaatctcattctgtcacccaggctggagtgcagtggcacaatctcggctcattgcaacctttgtctcccaggttcaagcgattctcatgcctcagcctcccgaatagctgggattataggcacacaccaccacacctggctaatttttgtatttttagtagagacagggttttgccatgttggccaggcaggtctcgaactcctggcctaaaatgatctgcctgccttggcctcccaaagtgctgggattataggcatgaaccactgcacccagccagaattttgttcctttttaataattaattaattaattaattaagatgaagtctcactatgttgtccaggctagccttgaactccttgggctcaaatgattctcccatctcagccttctaagtatttgggactacaggcaggttctaccacacctgacttgttccttattttagatgttgaaaataagcaagtgaaataaaggcttatcaaagtgtacacagcactttgctagatactgtggatgatttttcagggaagatgccattcctcccctgaagaagataattattgtagagttagagctaacagacaaaatagatgatatataaatttattcttaggagccaggttgttgagaggattaagagcaatcactagacgattagaatattggggacttccaaaacatctgaagtgtatctagaatagtagataagatctgcacaggtaggaagtagggtgagccgggtgtggcggctcatacctgtaatcccagcactttgggagggttgaggtgggtggatgccttgagcgcaggagtttgggaccagcctgggcaacatagtgaaaccttgtctctacaaaaatacaaaaattagctgggtgtgatggtgcacacctgtagtcctagctactcgggaggctgaggcgggaggatctcctgagcctgggaggtggaggttgcaatgagccaagatcacgccactgcactccagcctgggtgacagagtgagaccctgtctttttttttttttttttgagacggagtcttgctctgtcgcctaggctggagtgcaatggtgcgatcttggctcactgcaacctccacctcctgggttcaagcgattctcctgcctcagcctcctgagtagctgggattacgggcatgcgccatcatgcccagctaatttttgtatttttgtagagacaaggtttcactatgttgcccaggctggtctcaaactcctgacctcaggtgacatacctacctcagcctcccaagtgctgggattacaggcgtgagccaccatgcccggcctgagactctgtcttaaagaaaaaaagaaaaaaaaaggagtgaaagtagaggtgagaagtgcctggaaaacgggacttttaaactgagcttgctgcagaggtggacacaaaaatttggggctgttttgtttgaggaatgaagaatagcaggacaaaaacagattgttttggggttggtattaataattgtataggtagcgtggggaaaacttttagagagccttaaaagctgaacccgtatgttttagtttggtgtgagtaaacgtagattcctggtgctctgtaacaggagtgtttgtcgcagtttagtccgacagtgatggcttatagtacatatgattgtggtcaagatgaggagattaattagctaatcccaaagggatttcgtgatcatttattgaatccttaccaccaagcactttttgtcatgaatcattatttcatctaaacctggcaactgccctgtgagtttgatattgttataatcctcaccgtaacaagtgagaatgctgatacccagcaagggcaagcacctttcttagggtcacaaaacgaggaaggagtagagcagtcagtgtggctccaggaaccagaatcttaaccactatgctctaaagtgtttttcagagaaaggaagattaacattctttccttcgatgtatttttttccttgctaattccctatctccttacctacaatgtggcttagtgatcttaggacaaaggtttggcttggagacttcaaagaggtttgtccatttcagactcttcaaaaacagttactggttacttacaaataacactttgtaattcaataactgaaaaatcaaaacaactttaaatagattttaaggctggagaagggaggctagctaatttcataaatttgttgaagtttgattttctttaccctagttgtatcataaataggaatggttttttatatttatacttgtttaaatatactgtttatacctgtttaaatgctaagccaacaaaagctctctgaaagaatacatgcacacaaacacatgtctgtttcgtcacggatgtgtaactcactcatggttgctcctcctgatgtctgtgtgccacacagttcggaaaaggcacttgcttggctgtcacgctgtaagttccctttgtcatttgtgacaattggtctctttgctgtacatcttttgggatgaaggattgagctcttgtaaaagcatttcagaggtttttcagctaatgatttttccgctcattctttactgtttggtttcctaggcaacccatcctccccttgcaccctgctgacgtctgttcagcccctcttcctctccactacccctcccattactcaagttgttttttcattgctgctttaggattgcactaaaggaatatacatgttttcctaaatatctgctcctctatactttttagaatatattagaaggatgggaagaaaaaaaatcatttttagaagctaagtaacctgtatttttaggtcagttataacagggtttcatccatataaggctaaatttattctgttgtttctaggttggttttcttttttaaagttaaacaataataaagaaattgttgtccatttaaaccaggaattccataattaagctattttaggaatgtaaggtgttgtataggaaaaaacagtctgaaaatggtgggcatagttgcgtttctagatggttatgctgtgatttatttttttaaaaaatcagttgtgtctgttaaaagcatttctgttactgtggggaggggtttttaaagttttaaaaatctagcttttgggtgagtgcagtggctcatgccagtaatcccaccactttgggaggctgatgtgggaggatcacctcaggccaggagtttgagacccatctgggcaacatagtgagactctgtttattaaaataaaaataaaagtagaaataaaataaaataaaaatctgtttagttgttgttcacatttggtcctttagagatacttttttgagacagaatctcactctgtcacccaggctggagagcagtggcatgatcacggctcactgcagcctctatctcctggacttaagtgaccctcccacctcagcctcccaaatagctgggactacaggtgcatggcactatgtctggctaatttttaaatttttctgtagagatgaggtccctccatgttgcctaggctggtcttgaacttttgggctcaagagtcctcctgccttggctccccgaggtgctgggattattatagtcatgagctactgctcctgacctagtgataactttttgaattccaattccttgatcctttagcatcctaggcaaagacaaccatttctgctgggtaaagcacagtgaaaagccctgcttctctgtatacaaatgaaacagattgtacaattaatatgtattgggtgctgcatggtccatcctaacagtagtgctaattgccatatcatttatttttacatttggaagtattttactttggcctcaatgtaattttgtttttttaatgctgtagagtgtatgggatataggtaaggagtggataagaaaggaaacaatagaatcagaaatagtaagaattgctatataaatgcctttccctgtaaatgcacacaaatatatgaggtgtttttttttgggggggggggtcttgctctgttgcccaggctggagtgcattggtaggatcttagctcactgcagcctccacctcctgggttcaagcaattctcttgcctcagcctcctgagtagctgggattataggcgcccaccaccacgcctggctaattttttgtatttttagtaaaaatgaggtttcaccatgttggccaagctggtctcgaactcctgacctcaagtgttctgcccgctttggcctccgaaagtgctgagattccaggtatgagccaccatgcccggccacgagttttttgtatgtatgtctaaatacgtagaaagacaagatttacccccttttttggtgtctgtaataaatttagtgatatacgtgtatgggtgtatatgtatatagatatgtatgctatgagttagaaatgaaaaacctgccataaaagcaagaggaaggaggagttaattttgcctgaagatgtcagagaaggctgcattgaaaaaatttgccatagacctggtgataggagattgaatgggccttactagctgtgtatagtggtttgtaccaaaaagtatggggataggaggggaaagtggctgggaatattggaaaatctagttgaaagataggttgaaggccgattgtgaaatagtttcacttactttatcatttaagtaataggttggttagaccttttagatcagatcagtattttgagagtatctctaatagtatagaattatttgtacttcttgactgaaactatatgttaaataatgaatttgtaacttagttattagagtgttcaaattatacctgtttctctcccttccctcaatttttagaaagcattctctaatgaggcaggggtttttgtttgttttgagacagcgccttgctctattgcccatactggagcgcagtggcatgatctcgactcactgcaaccttcgcctcccgggttcaagtgattctcatgcctcagcctcccttgtaggtgagattacgggcgtgtgccaccatgcctggttaatttttgtatttttgatagagacggggttttgccatgttggccagctggtctcaaactcctggccaccttggatccgcccaccttggcctcccaaagtgctggggttacaggcatgagccaccatgaccagccaaggcaggttacttttatattggttaaaagagtgcctgatattaaatccttagtctcccactaaccagctctctctctgaccttggatgagccttaaactttggtttaattcatttgtaaaacaagcataataatgcctacctgaaagaactgttgtgaggatttgattgaacgggataatatgtaaagcacagctcttgacacactgtaaatgtagctgaaaaatagtagtgattattttgtggtaacagctttcattgtagaagaaaattaatggaatgtgaaggattaatgattttgggaggtggaggggaggagaccttgttaagtagattaattaggaagttattggtttgtccaaacagtgcttttaggtgacaagggaattcagtgtggaagaggaggtttggtaggagaagaaaatataatcagtttagttgtagatgggttgagtttaaggtacccaaggacacaaaggtaatactgtggaggtggctgttggaaatacgaagcctggaggtacgaatgtggaagttattgctgtctggttggagatacttgtgtctgggaagagtgatcgagtgagtagtggcctattaatgttttctttttttaaaaaatttactttcaatatactgccaataaagtaatttgcactgttatactaaggtattagaccacgtattctgagttcagatttgttgcttgactcgttaatgtatgtaggttatacccagttttggtaagcctcctgacctttggccccattcacagcattatctctatctctcaaagggaaaaagaagttcattctttgaactggggagtgctctgatgttggcaggtctactcctcctcaggtctagacactcttggcctccacagtggttttattcaggaaagttctcacctttgaattgtagacttagtgcagacttgctggtagttggctaggcgggatcacaacagtgattggtattggtaagtacatgtattgctgccaagaagttgcatagttcatgtgttcagtcatagccttttctttatatgacgaccccgctgaaatacagaatggcctgctgccttctcacagaaggtctactgttccaagcttatttttttctgagtgagaagaaaaggtcttttgccactgttttcagactgaaatttaaatttcagctgccttggatcctatataataaaagattgagacacagaaattgttctattagacttgaaatttcaattgcttttacttcccagtttgtagtagtgtttgaacctaaaatcctatgtgtgtttttagttaccttttcaagttaaactttcagaaactatctgcttaacttaaaaatttactcttgttaattgcccaaccacatcttacttcatgtgtcaaaatctgcctgatatttttaatttggaagtccacagtagtgggaagtcataggaactcccagtcagggtattcacagtaactactcacagtaataggaactcacagtcaagtctaatttttcattttaatttttccaatcccttctttacttctagtatactaattgaaaaaaaaaaacttgggttgcctttagtttcaatttataatttttattaggattttactgatactgtatctttttggtactggaggtctcagaggactgacctggttctacttgtttgctcttgggatttagaacgatagtttctattgtgttgagccagcaacattttgcttattttcaagaggcagagtggcagagtactaaattgcaaggttgtgcagaccttaaataagtgtatggtgagctataaagttacaatgttaaattagtttctggctggcccacattgtttccaaagttgactttgcattttaaaagaccttactgatttaaaaagcgaatagagaactgcttggaaacacatatcatctgagagacattcgaacatgcggggaaaaaaaaaagtggaaggaaaggtgctgctggctgggcatcatagactagaaagctgcatttaaagtttaaactgcttgggtaagacatgttttcctggtttatcctcatgtttttttccatctgtgttctcttgccattattaccaccaaatacaggagaatactcctttacttattgtagtcttatttgggagacagactagagtgtggattatgtagggacagaaagggagacttgagggtttttttttgttttgttttgttttttcttccagtatttaggttcattgatgtacagggcatatgttgtcttcttttagatttttcagtgaagttttgtactcctctccataaaactctcacacatttatatttatacatatatatgtaatatatatattatttatttattgagaaagagtcttgctttgttacctaggctggagtgcagtggcatgatcatggctcactgaaggctcaaccccaaagactcaagcaatccttccacctcagcctcccaagtagctgggaccacaggtgcacattaatatgcttggctaattttttaatttttaaattattattattgtagagatggggtcttgctgtgttgcctaggctggtctcaaactcctgagctcaagcaattcacctgcctcggcatcccaaagtgctgggattataggtgtgagcaccactggctgggccaatgttttttctcttataatgtttcttctgatactttgtggctattctgaatgtgttcttttaaaaattatcattagaaagttacttcatttttctttttttctttttttttgagtcagagtctcgctctgttgcccgggctggagtgcagtggcgccatctcggctcactgcaagctccgcctcccgggttcacgccattctcctgccttagcctccctagtagctgggactacaggcgcctgccaccgtgccggctaattttttgtagttttagtagagacggggtttcatggtgttagccaggatggtctcaatctccttgtgatccacctgccttggcctcccaaagtgctgagattacaggcgttactgcatttttctgcaccaggatctctttattttgtacttaggctttgcttgctccctctttgctttagtttcatcatctgtgaaacaaaggggttaggttagaataagaaatttccaaagatctttctacttctcacagtacgtggtgctgtgtcgaggtaacgtcctttacatacctcatgaagttagtgctagttgtaccatccaaaccacacataagttctgtgaatacaaccaaacagctttgttcacatgtatttgcatgtgtttcaacttaccgtgttctctgcataatgattcttcaacagtttgaggtaaagagtgaatatttcagtttaaaaatacagtcaaaagtatagtttcttattctggtggacgtggtttactactacctcctccccctgtgttttagtttgttgctgtgctagttttattgcatattttctctcctaaaaatagatggtctttatctaaagcgtagtttttataaatatttgcatctcaagtaaattttttcctaccacatggatttcatgtggtgagttccatgaaagcaggttgtgttaagagggcattctcctagtacctgtttattcttttccatacctctgccccaaggatcttgtttactgatgtcagaatactggcagtttgagtagtactcttgaagagttatttttgtatttatttctgctggattgaaggaggtagatgttgtactcattatctctcagaacatctattcaatcctaacccccaaaatataccttagaaacaggctctctgtgtttttttttttttttttaatcttttatgaagacatacaatacacacatttctcttagatgctggccaggaatttgtttgaacaaattgaaatggcaagttttaaccctaatttgaatagagttccagaaaatgaagttagggcagaggttggtgaggggtcatattggagtgtcactgagctagtaccaatttgtttgtttgttttgtggtaaaatgcacataatataaaacttagcattgtaaccatttttaagtgtacggttcactagtgttaagtacacttgtatagttgtgcaatcaatctccaggactcttttcatcttgcaaaactgaaactctgtacccattaagtaacaactcctcatttccccttccctccagcctctggcaccaccattctgctttctgtttctatgagtttgagccagtatttgtttagctttttcatttttgtcttgagaacttgaccttctttatgacagctaaatggatgttgaacatgaagaggagagtaatccagtaaaactggtagccactcttcatgatccatgagtgttggtagttgccaaccccgaaattagagtatcagtcagtcttctgtaatgcagtttggaaattgctattccttgtgtttgaggatgatgacaatagctagtgactaacacttacttggtacttattacatgcctgaggttagaggaaagacctgcttctgggaagaaagagtaaaggaaagattgggtgcatgacaatgtatagatacataaaggaagttcttgtctgttttctctgttaagctcaaagctaagtcatctgttgaaagttagggggctcaggttggttaggaggtttaaataaagtgacagatgtttgcaattaccaggaaatgggatagagactcatcagggaaagtagaataatactaacagtattagtggtaataataacaacaacaagaacagctaataatgactagttatctgttctatgccagctacattttatgttgtaatctttatagcaaccttattaaagtagttgttattacaggtaagagactaagttgcagagttaggatgccagtgtcactctgctgccccaagcccaggtgttctttcctttttctgcactgttaatggcattgggagtgtctgcctgacactacaaaccagaagtttagagtataatttttagaaattgttcttcagagaaaggaggaagagtgggctgaagtaaacgctatatgtctaaaatatcacaattatgttgacttttttttgccaccagaatgattgatgcccttgatgggtcatttcactaaataaagtgagttaccacagcccagtagaaacccagatctggttgtgtgaccttaatagaggtatctgaaattataaattgattttcttccaatagcccgcatctgaaataactggattgaggttcatgtcagtaaattcttcaatttctatgtagggaaaaatgaggacctttttgtttgtaattattctatttattgaacagttattagttgtacttctaatctgtactagaagactatattacaaagtgtttattttccctaaacaatggcttctcttgattcgtgttcattattgccctaaataaattgaaatttagaaaaagaaaaacccagttttcttagtatcatacatgcaagcttaagttttcttatttgtttgtttttatttgacatacatgaaggttatttccaaagatacaaatggaggccaaaacagtttgacataaagcagaccaaaacagattgaattatactgtacctctacactgactagcattttgatgtctagatggataagtaagcatagtgctaatttacaagcgcaaactcaactagtaagattaactaatttctaggctgtaatgaatttatataaatattcttgttattcagatgggaaacctcataactgtgctgtagattagacttgcattgcctaaaactggagaatgtaactttttttgtttttttgacaaacccacagccagcatcatagagaatgtaactttgcctcccaaatctgtgtatgtcagatcacttataattggagctgcacagttccctcttctaggtttgactctttaaacttggtaacatctcattaggctaaatgaattctccatgccctattgtctgtcttgctatgttgcctaacactttgattttaacattaggaaaacaactaccaataaacatgagataaaacacaaaatagatgaataccactagcttggtaatataaaccattatataacagggatttgctgcagactcttttcacacatagaaaacttttccaaaagacatttttgaagtttcgctatgaagaaagtttgccagtgactgaaagaaccttttgtaggtccctatttgggagtgcggtaactggtgcttctggactctatacacagagatccaaggctaggaaaatatctcagggtaaagctatctaagttttgtatccaaaagctattaatttcttcagttatgagaagaaaccacaaattgcgtaatggccttggtattttgttggtatggagagaaggatgatctcagaagacttgtaggcctgtcttggggtgtctgtggtgtgtgtgtgtgttgctttttttccaacttataaaaaaactcaacaatcaatcttagccacgtttttgaaaccgtagatattctaagttagcaaatccaaatcagtacacgaaacaaccatttttgccagcaccaaatgcatactttgctgagctttcgtatctgggctccagagtttattcatagcaaattctgacatctgctaagttctattatgacccagaggggagcgaagtgaagtaggatgaagaatctggaaacgcatgctgcttatagggtaaattgcattgaggaatttgcatccatgtagcctttccccttatggaccactgtgacgtttagtaggctgagctaaaaggtcatattgctcaagatgaataacaataaatggtttgttcagtgacttgttaagcctactgccagtgcctactaatagccaaaatagctatttctcttctgggatatatgagtttggctgtcatctttttgggaatatggtaatttgtagccatcactttcagtgtggtggggagatctaacatttaaaagttcttatcccagtggtttacagatcccttttcccccacaaaccgctgctgcttcttttgaaccttgaatgctaccatggtttaattttttttttttttttttttttgagtcagggtcttgctctgtcacccaggctggagtgcagtggcatgatcatgactcactgcagccccagccgcctggactcaagtgctcctcctgcctcagccacccaagtagctgggactacaggcgtgtgccaccacacctggctaatttttagatgggatttcgcatgttgcccaggctggtcaagcagttctcccaccttggcctcccaaagtgctgggattacaggtgtgagccctcatgcccggccttcctttgctttgcttttcttcagttgtggttcagttctagaccatgtttacagtagatacaggggcacagctcccaatagtgtttaaaacatgtgaagtatcggggcagaagttagcacctctaataagtttaaattccctcggatttgctttataggaagtatgttaagaacattttccagagcattttcattcaactgatatattttacatagctgccttattaaaatacagatgtattcttgaaattattgaccaatttttttttttgagatagtcttgctgtgtcgcccaggctggagtgcagtggcacaatctcggctcactgcaacttctgcctcctgggttcaagcgattctcttgcctcagtttcccgagtagctgggattacaggcgccctccaacatgcctggctaatttttgtatttttagtagagatgggtttggcatgttgtccaggcttgtctcgaactcctgacctcaagtgatccatccacctcagccttccaaagtgctgggattacaggtgtgagctaccatgcctggccgatcaatttttttttttttttttgagacagagtctcgctctgtcgcccaggctggtgtgcagtggccgaatcttggctcactgcaagctccgcctcccgggtttatgccattctcctgcctcagcctcccgagtagctgggactacaggtgcctgccaccacgcccggctaattttttatatttcaatttttaagaaatgaaataagatgaatgatgagtaattcctttttcagtaatatagtagattagatattcagagaaatcccctcgggtcagaaattttttttttttttttttttttttttgagacggagtctcgtaccgtcacccaggctggagtgcagtggtgtgatctgagctcactgccacctccgcctcctgggttcaagcgattatcctgcttcaacctcctgagtaactgggactacaggtgtgtgccaccatgctcagctaatttttgcatttttaatagagatggttttcaccatgttggccttgatgtcttgaccttgtgatctgcccgcctcaacctcccaaagtgctgggattacaggtgtgagccagctggaacatttttaaatgaggctaggaaaggtaaaaatgtatgagcacatataatatacatataacgttctggaactagtgtaagaaaaataattgaggccgggcatagtggcgcacgcctgtaatcccagcactttgggaagccgaggtgggcaaatcacgaggtcaggagttcaagaccagcctggccaacatggtgaaaccctgtctccactaaaaatacaaacaattagctgggcgtagtggtaggcgcctgtaatcccagctactcgggaggctgaggcaggaggattgcttgaacccaggaggtggaggttgcagtgaactgagattgccccactgcactccagcccgggtgacagagtgagactccgtctgaaaaaaaaaaaaaagcatcatttcataaggcagaggaagccctgaaggtggtggtggttctgagggtttcttgtaggattagaggaaagtggagggacaagagacaagtagtacctaagcatagtggaaggtcctactggagactgtcccagatggaactgggaccctggagggtgcaagtcttcagtgcatgagtagaaaaaagatgtccaagatgtcctgcatgcagagacttgcctcttactgtcttggatctggttggagaggggaaagaagcctcccatgtgattgcctaagcagacgcccatactcaaagatttgcagtcagattttatactacctgtgaggactgaaaatctctaaactgaaaacttagttgaaagtattcctatttggttatggttcccagtgtctgggagaatcaaattcatatctcttttaaattaattaattaattttagagacagggtcttgctatgttgcccaggctagtgttgaactcctaggctcaagcagtcctcctgccccggcctcccaaagtgctgggattataggcatgagctaccacgcctggcgaaaacacactttctagtcaggccttaaagacttttaatagaggaagttgcaagaaatgtgagtttgcgtaagaaaataagcaactatgagttggttattttgagtcagatggggcagattctattttccagatatggaaacagtatttcctgactcctgctcttctagaacctcactattgtactatcaagaagtagaatctttttctgttgaagctgggcagtcctttgtgactgctttgaccaaaagaatatgacagaagtgatattatttcatttctgaggctaagtcataaaaataccacacatttctttattctcttgggatgctcattcttggaacccatcagcatactctgaagaagcccatggagagatccatgtggaaaggaactgaggtctcaggccagtggcaccagctataggcttccagctgatggtcagtactgacttgccatctttttaagtaagcgatcctgcaagtggatccttcagttctctatcaagctgccctgggtgatgccatgtggagcagaggcaagctcttctctctaagccctgaacagattactaatttgtgagcaaaataagtaattattgttattttgatccactaaattttggagtggtttgatatgcatcgattgacaggtaactaaacatcggtggtaaccatcagtcttataaagcctacagatgtttaaagaaataaaggaggaggttaaaaatatgatgaggagactcttaaaactgatgaggaaaatatggaagaagaactcagtctctgtagaacttctagaaataaaaaacatgcagatgcccccagacttatgatgatgatctgattgtaatttttctttctttatttctttttttttttcgagacagggtcttgctctgttgcccagctggaatgcagtggcatgatctcagctcactgcagcctccgcctcctaggttcaagtgatcctcccacctcagtctccctagtagctaggaatacaggcaggcaccactatactcagcaagttttttatttttagtagagacagggttttaccatgttgcccaggctggtcttgagctcctgagctcaagtgatctgcccacttcggcctcccgaagtgctggcattataggcatgagccacctcagctgacctgattatgatttttcaactttacgatggtgtgaaagtgatattcattcagtagaaattatacttcagtacagtattcatgaaatattcagcactttattgtaaaataggccttgtgttagaattcaagctgtctaaaccaccttgttttgttttgttttgttttaggcttttagcagtgtgaagccattgtttttagtttctctctctagtgataagcggaaaagagggttgaggaaggggctttaccgaaccaaccagaaacaggaactaagaacccaagcctgtgttccctcccttggacacccctgtaagatgattttgctcagtcgtaggctaacatcagtgttctgagcatatttaaggtggaccaggctatgatgtttggtaggctaggtgtattaaatgcatttttgacttagtaatatttcaacttatgatgggtttataaggacataagccccttgtaaattgaggagcatttgcagcgaaaaatacagtggaaagaggatacagagtagagtaaattaatgaactggaaaatggatctgaagaaaatttctagaatttagtacagagaaagaagagatggaacatatgagaggtttagtgacatagagaatgagacgataacatctgtctgatctagtggatcccaaactttttaaatcttaggatcccttatgccttatgctctctctctctcttttttttctttgtttgttggagatggagtcttgctctgttggccaggctagagtgcactggcatgatcttggctcactgcaaactccacctcccaggttcaaacgattctcctgcttcagcctcccaagtaactgggactacaggtgtccattaccacgcctggctagtttttgtatttttagtagagatgaggtcttgccatgttggtcagtctggtcttgaactcctgacctcaagtgatctgcccaccttggcctcccacagtgctgggattataggcatgagccactgcacccagcctactctttaaaattattgaggacccaaattgcttttgtttatgtgagttacacttataatttggccacatttttgcatatatgttatagatccattaaaagtttactttaaaaaagaaacatcatagagtgagaaggtgagccacaacttgggaaatgtactaacaaaggtttgttagccagaatataaaagaactcctcaaataaaaaaaaaaattaggaaaaatggaaataggaaagtcatgaaaaagttaattttacaggagtagaaacaaatggttcatgaacatatgaaagatcctcaacccttttagtaatcaagaaaatgcaaattaaaatggcaaggaactgtctatctcctgctcgtctcctttcccccaccaaacagggaaaaattaaaaatatagttacagttgttagagatgatatgagcagtaggagcagtcatactgttaggtaccttcatttttgaaaacaatttggctttacctagtgatgcctaggtatgtcccctagtgaaattcttgtgcgcatggcttaagagacatatgtaagaatattttaattattgttcatagtagctaaaaatccaaacaactcaaatgtctagcaactgtaaagcataaatacagttggtatatttataaaagggtgacctctgagcataaaaggaatttaagtgccactacatgcatcttcgtagaggaatattccaaaatagtggggatcaaaaaaggcagttagaaataataaatacggggtgggtgcagtggtacaggcctgtaatcccagcactttgggaggctgaggcaggaggatcccttgagcccaggagttcaagaccagcttgggcaacatagcaagaccctttccctacaacaaattaaaaaaaatattatctgggcatggtggtgtgtacccgtatttctagttactcagaaggctgaggtggaaggatctcttgagcccaggagtttacagctacagtgagttatgctcatatcactccactccagcctgtacatcattgtgagaccctgcctcaaaaaaaaaacgagtatgattctatttgcataaagtttagatgcaggcaaatctaaacaatatgttgtttggggatacatatatggtaagattataaagaaaagcaaatgaacaaacttcaggatggtggttttcttggagtgggatgaggtggtactggggaatggaagagtacgtaggaactatggtttgaatatgacatattttacaataaaattttttataagcttgttgttgaaaggaaccctgaggtgattcttttttctgaagaagacttttggtaatgcggatagtaattttttttttttgagacggagtctctgtcaccaaggctggagtgcagtggtgcgatttcggctcaccacaacctccgcctccccggttcaagcaattctcctgcctcagcctcctgagtagctgggactacaggtgcatgccaccatgcccagctaagtttttgtaattttagtagagatggggtttcaccgtgttagccaggacggtctcgatctcctgacctcgtgatccacccgcctcggcctcccaaagtgctgggattacaggcgtgagccaccgcacccggcttgcagatagtaattcttaatcttttggtacatgctcttgcacataaagttttacagtaaatatatttttcatttttttcctgaatttctttatgtcaaccttgctaaatagagagcgtgcctaggaagaagatgaaactaggagaattcatccacaagcttaagttcaatggttgtagccttagaatgagaaattaggccttttattctacctgtcttaaaattagcttattattgttaaaaaccaaagactgtttcttagtttgtttatttttattttttgttcaggagcagaagcactcttttgcccctagccctagcctgcatctgctgtttgttaaatacctccatgaattgacatctcttccttttccgaaggaatgtgaaacccaataattacacacagacctgacctactttggaagaaccagaggacaaagaaaccctagatttcttcgtctttttttaactaaaaagcagagatttttgggaggcgagggccagaacttcctgtatctattcttctttgaagagcccaactcacctaagaaatttctggctgggcatgatggctcatggttgtaatcccagcactttgtgggactgaggagggaggatgccttgagcccaggagttcaaaaccattccaggcaacataacgagactctgtctgtatgaaaaggaaggaagggagggagggagggagggagggagggagggaggaagaagagagaagttttcccttgtgtgtgctgcttgtaggctagtggacttgattctaatgaagcctttgcatgtctgctgatccggaaatatttggccttttcccaaggctctatggctttgggaaaataatgatgaaatacctatttattttttatttttaattgtcctattttatatgtttgatttttgtaaacacctcagccctttttaaaaagaaatagttggaatataaacatatattctcattaattaataaatcagctggatgactagtccaaactattattccattatcattgtcactgccctgtaacttattttagttctgtgttagttatatttacctgttgttattttgctaatttgatagtttattgtgaaaacaatttttaatatttgtctactgacattttttaaaatagaaaaaaattctcctaaaccacaatcagaaatcttttcatttgattcattaacagttactaaaacaccacaactgcgttctgggtcctaggccctgtaggggggctcacacaacttcactaaacaccagccttagcagaggaagataactatcaatatctggaatgtcaagaactagaagaaacaagataatgtggtcctagcagacagataaatgggatagattcaagaattcagaaataaaaccttacacttatggtcatttgacttttgttaagtctgcaaagataattcattggagaaagaagagtcttttcaccaaacagtgctggaataagtgtatatccatgttcaaaagaatgaagttggacctttgctttataccatatgcaaaaattaacttcaagtggaccacaaaactctctaagagttttcatagagttttatagttttagctctcacatttatgaagagaagaaaacatacgagcaaaccttcctgatttggagttaggcagtggtttcttaaatagactaccaaaagcagaagggacaaagggaaaaatagataaatggactacatcaaaattaaaaacttttgttctgcagacaataccatcagaaaattgatgacaacccatagaatggaagaaaatgtttgcaaatcgtacatctgataagggacttgtatctagaatatataaaaacttttataactcaatagtaaaaagtctaataatttaaaaatagaggaaagatttcaatgtgtaatgcccctcaaagtgtatgcagttagtccacaaacacatggaaagattctcagcatcattagtcattaggaaaatgcaaatgaaatcctcaatgagataccacgtatccactaagatggctgtaataaaaaaagatggacaataacaagtgttggttaggatatgtggaaagtagaactttctggcattgctggtgagagagaatttaatgatgcagcagctttgtcatttcttcaaaatgtttaatgttccaaaaaatgttaaaagtggaattaccatataacccagcaattccactggtaggtataaacccaagataagtgaaaacacattcacataaaaattttatgaatgttcatggcagcattattcataatagccaaaaagcagaacaaccaaaatgtccatcaactaaagaatggataattaaaattaatatatccatacaatggaatattatttggcaataaaaagtaatgaagtactgatacatgctgcaaggtgaatgccccttgaaaacattatgccaagtaaaagaaacaagtcacaaaaggaccagatattgtatgatctcattgagatgaaatatttagtataggcaaatttatagaaagaaagtggattagtggttgcctagggctggtggagggataggagtgggggaatgaggagtgacagctaaacaggtatgaggtttttttcagtcggaacaaaaatgttcagttagattgtgatggttgcactatcctgtgaatttataaaacacgttgaattttacactttaaattggtgaattgcatggtatgtgaatatctcaataaagctgcttttttttttaaataactagaatacaaagaaagcagggaaattcttgctgaggagaaatactaatgtgattatttgtcttgttaatgaatttcatgtcctcgttcgggctaaatatttgtcaatttttaaaaaaatctactttcagaaagagtttcaggtatctttaacagaagatcaacagattaaaacaaatttaaaagaattagggccaaatagtctagggaagaggagagatggatactattttaccagaaaacttaggctaagtagagctaccacagttcacttagcttttgctttctggcagtacaggccaacaagaaaacatggattccttaactaacattattaaataaaaggaaaaaatacaattgagaaaaccgatttcccagcaccacactgtaagtcaaaacttaataccctgtgacttgatatcaggttcacaaaactatgtctaaaagaaaaattcttcaataatacatttttaaaaaagatttcaaggccaggtacggtggcttatacctgtaatcccagcactttgggagtccaaggcagatcacttacagccaggagtttgagtccagcctgggcaatataacaagacactgtctctacaaaaacaaacaaacaaacaaacagaaacccctatggtggcacatgcctgtaggcccagtcgctggggaggatcacttgaggccaggaggttgaggctgtagtgaactgtgatcgtgccactgtactccagcctgggtgacaaagaccctgtttcaaaagggggaaaaaaagggttccaaagtgttctttatatggaaaccattttgattctggatataggtctagtgagtctagtgaagaaatgttgtttgttaagcgatctggttacttgaactgacggaaagcagaaagctgttgtttagtctggtatctccaacattaaatagaagtttcctaacaaaacaatttaagactgaatttgaatgtagtgctagaagagcagagcattccattatgatgtttgcagttaactattttagaatagctttagatgtgtagaaaaattgcagatacagtacagaggtcccaaataccccacggtcagtttcctctattcttattatcttacagtaatatgatacatttgtcataattaatggaccaatattagtacatccttattaaagttcatactttactcaaattccgttagtttttaccaaaatgtcctttttctgtgtcaggatcttgtccaggataccacacgccatttagtcaccatgtctccttaggtttctcttagctgtgacagtttctcagtcttttcttgtttttgatgaccttaatggttttgagtagtactggtcaggtattgtagaatgctcctcagttggaatttgtctgatgtctttgtcatgattagattggggttataggttttgagtggtaagataaccaaggtaaagcgccattttcatcacatcataccaagggcacatactatcaacatgacttattactgttgatgctaaccttgatcacctggctcaggtagtgtttgtcaagtttttccactgtaaagttctttctttccccccctttcataatgtactgtctggaaggaagtcattagatgcacatgcttttgatagcattttgtgcaattgaaaaaagtaactttgtttggtaaactaaggagcctgacatatttacttttccagtggagagcttacctatgtttacacagagtttgctggaatctctacaagtaaggctaaagcaaagcttttctcaagaaagagctttagttttgttcacatgcttgaactcttgcttgaaactgctacagttctgtactataaattatggaagagatttccttggcctagaatttcttggagatgatagttgtctaccttataaagaaccatgagctgttagttttctattactatgtagcaacctgccacaaatttagcagcttaaagcagcacacatttactgtcttacagtttccatgggtcttgagtcctggcatggcttagctgagccctctgctcagggtctcagaaggctgtacagtattaaatggactgcattgtcacctggaggcttaactgggaaagtagttacttacgagatcgttcaggtagttggtagaattgctttatgagtgaggatcccagctttttgttggctgttggctggggcttctaaagagactgatcctagagagactgcccgcagttctttgatgccacccacagttccttttcctgagggcttccgtaacatggccatttacttcattaagctctctagctccacttggaagaaagggaggatattacataaaggcatgaataggtctgtcattatgtgtgtgtgtgtgtgtatgtgtgtgtgagagagaaccattgggggccagtcatcatggggtctgtttgtcacacagaatatgacttttatttttatttttaattttttttgagggtacatagtaggtgtatatatttcataatatgacttctgaagagaatatttaattttgagtaggactgcatccagtaagtctgtcttgatgaaaattagtcacagagtacatcccaaatgttagtttaacccaatagagctggttgtagtaaaaagaataaactttacttttaaaaatattgggtacaaggttaaatggaggtaggtagagctgttcaatgcagcataccagctggggatgaagaaagaagttggaggataggtgaaatacggggatatgttttccttgtttcaaaattttgctaaagtctgatgctgtcagtcatccattcttttattagtcaattatctctgtttatatttaacaactcattaccataaaatctacttttgagaaggagcaaaacataatgaagtggagggctcaggttcttgagctcgactgtctggcttcgattcctgcctctgccattcagtactgtatatccagggcacataacttcattggtaggtgtctcagaaacatctgtaaaatgagaataatagtacctactccatagggttgttgtatgggttaagagttaatgcctgtaattattcttttcttttttttttttttttgagaccgagtctcgctctgttgcccaggctggagtgcagtgaggcgatctcagctctctgcagcctccgcccctccaggtttaagcagttctctgctcagcctctggagtagctgggattacaggcgcgtgccaccacgcccaggtaatttttcgtatttttagtagagacgggatttcaccatcttggccaagctggtcttgaactcctgacctcgtgatccacccgcctcggcctcccaaagtgctgggattacaggcgtgagccaccacgcctggccattattcctcatttttttcaagtgcagtaaagatgtcatagttatgtttaaaaaaagagaaagactcctgtttgaggtatattgaagtagttacagatgaaatgatacggtgattgggattttggagaaacttggtagagatatagataaaacaattgactataaagtaataattcttgaagctgattgatgctttgaattattttattgtctacttttgttaatatttgaaaattttcattacaaaaagtaacaaaaaaatttagtgccttgggacatattaggtgctcagtatattttacctattcttactatgcttatgtttaatatattggaattaactagtctaaaacaaaaaatataaaacaaactaaaattgactctttgagtttctcatttctaagtgagaaatttgataatggaaacatcgtcaaatttggctgacattggattatgcaacatttcttagactcggattcttggtttctgtgttcatgtctttctggtgtggttgtaatttacagtttaattaatttgacctacttgttgcccgtttcacattccatttaatttagtctgccattgtttgttctgtaagtgggatggaaattaatgtcaatattattatttagtgttcttagttttaacagtgggaaacattgactttaccaatagtgaaaatattagcaaatgccaaggcttttctgggcaaacagtggtgttatgctttagttttaatgtatttaattgaggaaagaaacacttattcaccaaggttatctcaaatgtggtaaatgcagttttctgcttattatcatatggtcctacattatatagcactgtaaaactagatgacttagggctgggtgtggtgactcatgcctgtaaccccagtgctttgggagcctgaggtgggaggattgcttgaggccaggagttccagatcagcttgggcaaaagagcaagacccttctcttaaaaaaaattaatttagctgggcatggtagtacatgcctgtagtcctgactactcaggaggctgaggtggaggatctcttgaggccaggagtttgaggctgcagtgagctattatcacatcattgcactccagcgtggtcaacggagcaagactctgtctctaaaagaaataacaaatacagccgggcgtggtggctcatgcctgttatcctagcactttgggaggctgaggcaggaggattgcttgagcccgggagtttgagagcagcctggactatagtgagacctcatctttacaaaaataagtaaataataaacagataagagaaaataaaagaaataataactaaaactaaatggcttgattactttaactaaccaagattgagagttgtatgactagtagtgattctgatttatgtgaatgaacccttaggacttaaatgtcaatttaaaaacttaaaaaagtcaaaacccaagtctcccagagttcgaattaggaattggcacagtgagaaccttatcttgataactctctttctttcttttttatagtcagggtctcactctgtcacccaggctaggagtgtagtggcttgatcacaactcactgcagccttgacctccggagctcaagcagttcttgtgccccagcctcccaaaatgctgggaccacaggcacatgctaatgtgcccaaccaatttgaaattttttttgtagagacaggattccactatgttgcctaggctggtctgaagctcctgggcttaagcgatcatctcaccttggcctcccaaagtgctgggattgcaggtgtgagccactgtgcccagctgatacctctgctttcaagtcatgtaatagatgaaaacattgaggattagaggggtaaagtgattttcccaaggtcacaaacatatcttagagatacagctggaaattgaactctcaatctcagcacccactgcattcgtctttttgctgtcacagtgatttccaaactgttctgcagagccctaggcttctaaaaagttttgtctgtaaccaggatggatactcttttttctgtcttatgtgttagggtttatgtgtgattttgttcagaaggaaaaagtttctactgctgtgtatgatcatttttatatccttcctacactctgagctccttattctgtgctgttttctacccagaaaagtacatttgattcattgaagggatttttttttacttagtttcaaaaaatgccaacttgatctcttagtttcaaaaaatgccaacttgatctatcaagaaacctgtgacccagagacctcaggaaagttgcacaaagacttttaaatatggagggataattagttttattatgacattattatcaattaacattttacttccttctagctctctacattttcattttctcatctcataaatctcattccttatgattttttggtggggatgtgttacttacggtctcttattttcctagaacaatatttatgcaaatatgtctttttttttttttttttttttttgagacggagtcttgctctgtctcccaggctggagtgcggtggtgccatctcggctcactgcaagctccgcctcctgggttcacgccattcttctgcctcagcctcccgagtagctgggactacaggcgcctgccactacgcccagctaattttttgtattttcagtagagacgaggtttcaccgtgttagccaggatggtctcaatctcctgaccttgtgatccacccgcctcggcctcccaaaatgctgggattacaggcatgagccaccgcgtcggccgtctgtctatcttaaatgaaactatttctgatatctggagattcttttggatctcattggcaatgaattaggggtcatgttaattggcttaaaagtagtattgtcataagacataaaagaggggctaatagtataatagttgggttttacttaaattgtggatgcttttaatgatttttaaaaacccacaatgttattaactatactcaatactttaatgaattgatacacagttacgacaatttcctttacataaaatccttggttctaccttagcatctttttgaaattctacacttgtactctaatgcaaatttaggaccatcagagaaggtcagtatttaggatgtctgtaatcctgctacaggaaaacacaaagaatcttgttaaatgttaactctgttatattaagcatatacttcatgtagctgtcttttgacatctgttgtggctatgtttaacctatataataattttatatttcagtggaatcattctcagttttttctatggcaatgttgtttatcagttgtccgcttaccacctttaaaataaatatcagaaatttggccaggcacggtggctcacacctgtcatcccagccctttgggaggccaaggtgtgtggatcacaaggttaggagtttgagaccagcctggccagcatggtgaaaccccatctctactaaaaatacaaaaaattagccgggcatggtggtgcgcgcctgtagtcccagctacttgggaggctgaggcaggagaattgcccgaacccaggaggtggaggttgcagtgagccgagatggcgccactgtactccagtctgggagacagagcgagattccatctcaaaaaacaaaaacaaaaaaacccagaaatttaagaattaattaatgtttactattagacttccagggattgatttaagttacttaaattacactattcatcacatgaaatgcaaacattcattatggaaataacatttgtttgacttgaaaatgtgatgattactaaatataaggaactcattgaaactggaataaatgcacaagccatcacacaaaacattccattttgaaggaatcccagaggggcattatctgtcagcgctggtagtgtgcacctgttcttcggaaaacaccttggaaggtagttggtgccatgttcctgatgggcacagggaggctggcttcttactccaggctgctcagggaagatagtctggtatcataaacatccagacaagaaatgcatgatttcacaacgatgcaccttttgacaaacaatgagcacactactgacatccgaggatgcattacaagtgagactttcagaaataggaggatgaaatgcagtctgaaaatggatattgcttcctgtttttccttagtcttcattgtcaaataattgggagatgtcaagagatgagggtttaggatagtttttcaactgttttctgtttccttggttcactcagctcctgctacttcacgcagactgtgttattagtccttgagggcatattgatataatttaaaacaatttaaaatatgaactgttgctgattttgttcaacaggaacagcactaccattgtaaggttagcaagatacccaatataataaatctccataggggaagtttaagaaaattatgttacggcagttgagttcagctctcttttcagctggagccttaagtcttggagcgttctaggttctacatctaaatgtgcttaacagtacacaggcttcttgacaaatgctgttcttgggaagagtacaatccttctgtgagtctgtgttatttttacctgtgagttggcattccaggaaagagtagcatgtactcattaagaaaattcatcttaaaatttattcagctttttgtcttctgacaaccttgtattttaggccctattgccaagttatttcccgtctttctgtcctgggactaaagtttctttttttcttttctttttctttttctttttctttttttttttgaaacagagtcttgctctgtcaccaggctggagtgcagtggtgtgatcttgactcactgcaacctccaccttcctggttcaagcaattcccctgcctcagcctcccaagtagctggggctacaggcccacgccaccatgcttggctaattttttttttgtatttttagtagagacggggtttcaccatgttggccagactgatctcaaactcctgaccccaggcagtccgcccacctcggcctcccaaagtgcaaaatttcattttttatagtttaatttcccaccataactttgacatttttctttggaaataaactacttttttaaaaatttcaaaatatttctataagttgtaggttgaacacccctaattcaaaaacgaaaaatgcccccaaatcttaaactctttgagtgccaacatgacaccatgtggaaaattctatgcataagcacttaatacaaacttgtttttaatgcacaagattatttaaaatattgtgtaaaattaccttcaagctatgtgtataaggtgtatatgaaacataacgttttggataagggatattcaacctgtattgttattcttattatttttattgttttattttttgaaatggggtctccctctcgcccaggctggagtgcagtggcgtgatcacagcccactatagccttgagctcttggactcaaatgatcttcccacctcagtctcctgagtactaggactacaggcatatgccatcatggctggataatttttaaaaaattttttgtagagttgggggtcttgctgtgttgcccaggccggtctcgaactcctgggattacagcatgagccaccaggccggcctattttgtcattatgccactttcttagacagtgttctttggttgccattttgaactattagaactgccttgttaaaccatttagcttttgcccttttcttccccagatccctaatacttttctgcccaatcctttctctctattcagagtgtttcctgtttgtcctacattctctttctgtcctccttctttcctgctcttccctctttttttttttgagacggagtcttgctctgtcacccaggctggcatgtagtggtgtcatctcggctcactgcaacctccacctcccaggttcaggcgattctcctgccttagtctcccaagtagctgggactacaggcatacaccaccatgtttggctaatttatatatatatatatatatatatatatatatatatatatatatatatattttagcagagacgggttttcaccatgttagagaggctggtcttgaactcctgacttcaagtgatctgcccgcctcagcctcccaaagtgctaggattacaggtgtgagccctgcacctggcctcttccctctcttttttttagggctttgaggcatccttttcaacagctccttaaccttaaaattaagccatcaatcccattctaagtatctccctcttaaacttctgcaatttgtttaatctgaaataaacacctgaaaatagaaaattgaatatctatattttgtaaataatcctgattgacctttatttttattgtcaactctcttttcctccactccttttttttaaaaaaaaaaaattgttgaatacatttaagtgataaacctgtaggacaagagttgatttaactataaaacattgttggcactttgcaacaataacaatcatgtcagtatgcctgagagagttgctcataatattggagacactcgtaggcttctgttttctgagagggtaaatgtcaaccagatgggaattactggaactgagaaatcattttctttttgtctttaaaaatttctcttctatatcttgaatttcaagtaatcacagaaaatttcctttgcttcagataccatttactaattttgcacagtataccattttccaacttattttcccactttcagtaaactttctgttctctatccagacattggaaatgcatgaactattttacagtcaccattcagtacagcctagagggcagaaaaataaaagttcaaccactcacctaaaaagcactatacattttattgtattttattattattattattattatttttgagatggagtttcgctcttgttgccctggctggagtgcagcggcgccatctcggctcactgcaacctccgcctcctgggttcaagcgattctccctgcctcagcctcccaagtagctgggattacaggtgcccaccaccacacctggctaatttttgtatttttagtagaggtggggtttcaccatgttggccaggctggtctcgagctcctgacctcaagtgatctgcctacctcggcctcccaaagtgctgggattagaggcatgagccaccgtgcctggagtgctatacattttaaattatagttgttaaccactttctgtggagtttattgaaagctgcctgacccttatctttgctggccatgtagagtccttgtgtctcgagttggctagcatccttgcatcccagccattccttaggcttgacagctgcatattttcccagaaacagttgtgattggtgtgtataatgaatagaataacctgttctttccaaatatacatccctgttttgccccttagtacttgatttgactaattgtttcaagctgaaatatagacttcaattaaaaaattggaagccaggtgtggtggctgttgcgtgtaaccccagcactttaggagactgaggtgggaggatccattgagaccagcctgggcaacatagtgagaccctgttgctacagaaaattaaaaaatatatattatccaggtgtggtggtgtgtccctgtagtcccagctactcagaaggctgaggtgagagaatggcttcagcccagaaggttgaggctgcagcgagctatggtcgtgtcactgcactccagcctgggtaacagtgcagacgttaggatcttcccaagaatgtggccagcctacatcctgaccttggtcatgtggcacgttattaatcatggccatttaatgtgtaacaggttgcattcaagagcctagcttgtgttggtttggggttcttttaaatttgttttctgttgacaattctattttctagtaaattttaaataaaaatgttttttcattaaggctgattccaaaggtacttaagttcctttctagccagccattcttagctgggtcctgtgaaagcattatgccctatagaaaagaaaattgagtgactattttctcagttctcccaaacatggtactattctagatgcattgaagagaagtcaattcattacatacagtgatgctttaagggcagttgttctcagagtttgattcagggatgtcatagactccaatactgtttcagtgggtcccctaggtcaaaaccatttttaaagaaatgccacaacattattttcacttttcattcatagtctctcacaattataaaatagagatttccagagactatgctatgtatgatgctgcaattgctctgatgaccaaggagatgtgtggttgtatacacgtgtcttttaaatttttgtcttaatttctgatttttaatttgatttctaagcaaatattgaaagatattactcacataatcaaaacttctttgaagtttctcctaacttttaagagaaggagtcctgagaccaaacagtttgggaactgctgtcttaaggctgtaagacttaattctctgagagaacccctcctgggaatggctgcacacaagggcagtacagtaaaccagtcagttgctcaatagacattttaaaaattgaattaaattgagctcctagaatataacttttgagaccttatttgagattttctcccaaggcaatgtttgagcattgagagccttgtaacttgggccaggtttctgtgagatagacagttggcaattctcaatatcaagtcaatgatttcagaagtcattttcaaggaatacgtcctttaactggtagattaattatgtagcctgttggcattatgtggatcagtgccgtccaagagaaagagggcacatatattatttacaatttttaaataatcatattaaaaaagtaaaaagtggtgaaattagttttaatatcttttgtttagcctaatatatctaaaatattataatttccacatgtaatcaatataaaaatgtatcagggagatagtttaattcttttttatattactatctttgaaatctggtatatattttacatttatagcgcatcagtctggatagttacacgtggctggtgcctactgtattacactgtacagatctagatcataaaatagttgtagagctgagccgagaatgttctagagtagataagctttgtcataaaaatagagaataaaaattttgctacagaagttagtataaaaacataaccccattgaaaaaagcttacaatgacaaaatgtttgatatctgcctaaattctaaagacatttctaaaagaaatagagctctttccttaaaacaaattttttaaaaaaataagcttttcttcaaactgtaatgttttctctttccttctaaaaagcatgcagtctgctcactatattctttgaaattactgtatgttcatctgcataccagtgtaaggagatcctctttctcgtcttggaagaatttgagcccttgtgatctttgcatttccctcctacgtagttctttcttgaactgtccatttgtcctggcatatccctgaatccgtactatctgctatagggcatttatttctgatggggaagggtggtttgttttgatcttaatgctgaactgtcccttagttcattgtcttttactctgttgccgtatcttgcttacaaatatggtgtcagaatatgcaagtgaatttattgcctgttgtgaagaaaccactatttttttcagcttcattcactatgaacattattgtgcttacaaaagtgagttgagttaaaaagaactgtgttttttagaagtgagaattaaaagggagaaatagtaatttttcctctcatagaatgaataataaagaactatgactttaaatttggcatgatctaaatttaatttttttcctaccacatgccaattgaaacagaagaatttgttgaatgggaatgtcttgagtagggaaattaaggactctcacaatctgttatctctttagtagcatacttgatacagtgtcatgtttaattaatattagaatgtcaatttacaaaatcatgctctttggaagataaaagaattctgtgtagaacaggcaaacttaggaaatatatggtctcttggtaacatgttggaagttttctgctttgttataattttcatatgtaagtacaattaggagatttatagattttcaaccccaatataataacattctttgagagtttatcttttctttacctactgatttacctttgttgtggacacattcagtttttcaagcaactggtgtgtactttacaccaaaacctttattatatagtcttcagtaatctgtagctgtgaaactcatactcatttatctgtttagatattctcaaaacaatcatacctgtgtgccagccacctgctgtctgacttggcagtttctctgttccaactttatttttctgctttttagaaaactcccactttccagtttgcagctaaggtaggagctgagttcctttccctgttaagtggtcttatcaggcagttatgccattgccaagcaacagtaagttctctcctctcaggtgttagctagtaggtagggttggcaaggggagcctggcctgctgtgaagaagtagaccagtgtctctctgccacagccctcagggtcgggtcttgctgtgggttccatcctatggctcactgtgactttcctgaatggaatgcgtttattttttttccagctctgttctttccatgttcttcccacatcagctggcggcagccagttggttctgaatgctgcccacaaattgttagctattttgcttcttggtccctcaatttgtcccttgaataaggaattgatgtgtttcagatccaggattatgttgcttagtgaagcaaatctaatccttgccaaggaatgcctaaagttgaaggcttgattccagaagaaaataaaataacaacagcactacctgtaattaacatatattgcctgtttactgtgccaggcattatattaatcaggttgcatgtattagctttgttaatccccaaaatcactttaaagtaggttccattgttgcccacattttacagatagggagccattggaaaattaagtaacctgttctaggttatatattaagggatagttccaagattttgaatctaagtagcttgtcttcagagtccttgctttcagtactatattcaactgctaaataaagcttcactttggtttttttgttttgttttgtttttttgttttggagaaagtgtctcattctgttgcacagattgcaatgcagtggcgtgatcacggctcacttcacccttgctaggctcatgcaatccttctgtctcagcttcctgagtaactgggactacaggcacacactaccacacctggctaatttttttattttttgtagagatgaggtctcactttgttgcccaggctggtcttgaactcctcgcctcaagccatccgcctgcctttaactcccaaagtgctggaattacaggcgtgaaccaccgtgcctggcccaaagcttcacttttcaatgtcttctggaatctgaactctcactgaagagtagacaggagtttgatgttttaatctattaaaacttctttgtacgtgccttctaagaacagattatattcaatgcaatttttcctgaaaagatgaagtacatttgtttgtaaaattcatgtatgtatgtatttatttattatagtacatatttatggggtacatttgatattttgctgcatggatacaacatgtaatgatcaaatcagggtaattaggatatccattaccccaaacatttatcatgtctttctgttggtgacatttcaaatctccttcagccattttgaaatatgtaataaattattgttaattatagccaacaaaaggcattattgctagtacagatatttcttgacttatgatgggttacgtcccaataaacccattataagttgaaaatatggtaagtcagaaatgcatttaattcactctattgttatctacccacgtgattgtgtggctgactgggagccacacaatctctgtttaccattatgaagatcctattgcttcagaatgcaaatgaaatttagagtgagtgccttgtgaatcagggaggccccactatatgactccctgtgatctcttggaggtgaaagaatgcacaaatttcataagttaacctgaaggtcacccgcttttccccagttacattgtacatgccatcaattagtagggggtgggcagaggtggaagatttcaggcacaggccttagacagttgatgccctctgttattaaggtaaataaatcctagcagttcttcccaccttttgcacatcatggcatgcacagaaagttgagattggaggtgatccattattgcttgtaacccatttccaacacacttgtttggaagttctttttttttcttttgagacagggtctcattctgttgctggcacgatcatagctcactgcaacttcagctcccgggatcaaactgtccttccacctcagcctcctgagtagctgggactacagacacatgctaccatgctcggctaatttttaaaaagttttttagtagagatggggtttcaccatattgcccatgctggtcttgaactcctggactcaatcagtctgccctccttggcctccgaaagtgctgggattacagctgtttggcagctctgctatggggatatatctgcaagtttctaagcttgttatatttatgaaagcattctgtacattacaaggtgccattcacatgtaagattttattaataatgactattaagaccaagctatttgttctaggaagagacattgtgtaccatgattttttttgttgttgttttgggagctgtcctgagagaagcaggagcagatgctagaccagttgtggagttaaggtcttgtatgtgatctggtgcagtaatgaggagaagtagaaatgcaggtggtcaagggttatattatccaagacttcttacaggaaaccaagcagctggtgagatcctcattaaattctctaccttcttctctgcctatcccagttctctctgtagtgaaattctgctttctttgtcaagtctttcccagactttttctacctcttctcctgtaggtgaaggtcattcaccatcctctgtctgttgttatacctggtacatagctccattgcttgtacttccaatgctgcattgttttcagttccacacatcttttttcctttttagactgtgatctccttgaagtttaggctgtgtctgattaatccttgtagctccagccacacccagctcctttcatcacactccctcgttaggcatggcttgaatgctctttgagtacagctgaaatttatctccctgtgcctttctcccgtgggtcctcattttaacacctgaaacagcttcagataaagttacttttatgccagccatttatacatctgaataatctgccacgtatggctccaaacagtctttatttctctgagctaaacatttttacttttgtaattttgttttcctgattttttcctcagtaagtactgtatatgttccctttacctctctggtgcatagaatcttagaatgttaagatttggagaggactagagtttgactagtctaggttcttcatctaaccagtattgcttccatactgattacataattgaaactgagatatagacatattttggagcaacacaaatattttaagtatttcactgaggaagtttagatttagtaaatttttaaaagtccttcatcgttcattcttcattaaaatgtatttgctgatgagtatcttattaaaagggggcacattggaaagatatgttttatgatgcagtgcatgtatgctaaagaaagatcttcagattcttataacattcttattaagaatttgattctaaagccaagctacctaggcttcaatcctgcacctgccacatactaggtgtaaattacttaatcttgggttaattacttaatctctgtgtgcctcagtttctgtatttctaaagcaaggttaatgataaggtgggtgttaggaggtttaaatgagttagtacttccaaaccactaagagttatgcctggcccatagtaaacatttcgtatatggtagatgctgctactgctgctgccaccaccatcactgctactattattattattattgagttctacaagcatctggtgagatgtgtaaagcccctgtgaaagttctcatagaaccttagtaagacaccatgtatttatgatacaagcttcttgcctttttaaaaattttttattttatttaaagcttcttgtcttaatgagagaccctgtataccactctgcactgaaacatgatttgacccagaccgtaacgacatctatggagtaataaagtattttttcataggattttaccgtataagcaattgaagaaatggcagaagacccattagcttttggagtctgttcctttgagaccaacttgctaggaatccatttcctatctttttaaaaagagtaaattaattttcctcattgacattctgtaaacagaatactggcagcttatattttatggaacgtaatgttttaaagtgaacctaatttttcttagtaaactgcttttaataatgcatcagagtaatttttttccctctgttgtcaggttgctatcaagatcatagataagacccagctggatgaagaaaacttgaagaagattttccgggaagttcaaattatgaagatgctttgccacccccatatcatcaggctctaccaggtaggatcattagtgtatagcagatagctgcaaagaacccagaatattgtatgtatggctccctttgaagaaatgtgggtgggtgaacatctgtgactttttttgtttctatgttaatcctgctatctttcctacccttctgtttacgcgctcagcacttagtatcctcaagtttcccctggccatttactagtacgttttccttacccaggtaggtctttttaatttgttctttaaaatttgatgccattcttagcaacaactacacaaaatgttaattcagaagatgatgagaatttattttatttagttcagagttctaacacaggatgggaaactcaaaaagaagagaatttagagaggtgaaaagttagagatgaatataacatttttttaatagcattatttgaatactagtttctgtgatcatgttataaattgttatggcaaaggactgcttcttggatcaatcaaaacctacctcttttctattctaataggattgtagacttagttttccaaggtagtaattattttgataatcaagagaccagatcaagtgaccagatctctccaataggagagatttctattttagttttttttttttttggtcttcccaagaaacatgcatatttcatgccatcatcaaaatgattccctagcataactacaaaagcagtaaatctgatggctggaatttcaagcgggataggaggagaggaccttgccttagcaggctggtgaaagagatattttgggagaggtggggcttcgggatgcttctcaaattgcaatgtgttggcagccgagaactttgcctctgcataggcccaactctacttgctgctttctgccagaacagccatctcttagttctgaaggacgtggccacccacttggttattttgctgctgttagtctgcagtaaatggttactggcccagacataggaccatgtgtaaaagtggagaaagtacacccaaggctctatgggcaagctttcgtagcctcttagttttatggaaaagaaaacatgttgtgatattaacatgtgtggttaaaactacagcgttagagctcttccctggcatcagctgctcacataatgaaattaggtcaacaggagcagacctgttgaaatttatcagcctaaattatgttgaacaacgcctaccttctgccccacaagcaaacttatgaaagcttcctggtgctgcctgaagacctatatctgtgagctcacaggtgtctaacctcagcttccttcctatcctgatgggctgaataaatttcttgaccttaccttttaaaataaatcatctttaaataattgtggggcttaggctgacctttctcaagaggttgacttatagctattacccttgtaactgaattctgcaagtttgcctgtcttacccaagattagcctatgaggatttccacaggtccagtgctagctttgagcagtgccttctttcaagctttaattttgctttctggcagctgggttttttaaattttatttatttatttatttatttatttttgagacgaagtctcactctgttgcccgggctggagtgcagtggcatgatctctgctcactgcagcctgcgcctcctgggttcaagtgattctactgcctcagccttccaagtagctgggatcacaggcatgtgccaccacgcccagctaatttttgtatttttagtagaaacggggtttcactgtgttggccaggctggtctcgaactcctaatctcaagtgatccacccacctcggcctcccaaagtgctgggattacaggcgtgagccactgcgcctggccggaactgaatttttaattgtatttagttttaattaatttaagtgtaaaactaaaaataattttaaaaagaattgttgaaatgatagtattttggatatattggggtaaataaaaagtagtattagaattatcttcaccttttcctttttcctttttaaatgtggctactagaaaagttaaaataatatatgcagttcatattatatttctattggacagcactgttgtagaaagatatacaataagcagagaacagtgttcctctggggattgagatggaggagattgggaagaggaaagcctttggtcttttgttttataatgagtgtatgtaatcattattacttttaaaaatgtttgatggaaaatgtaaaaaggaagaaaggactgacaacatactacaatgaattttaaaaaggagcaacaaagggaccaagacaaaacacaaatcacttacgttactttaaaaggttgagtattttaaattactgttctctttttttcaaataaatgggcagtggaaaggaaagttgtcatttctataaaaaaaagaaagacatatgtgatttctgtggcgttcttatgtgactcccattattttccccaaaggcttctttttgctttagtttttttttttttgatttgatagggcatttttgtgcttcagatgattgatgttgaatctgaagtttaagttttggttcttgacaacttctttgcctctcagttttatggagcttaagagattgcagagacctcatggaacatcaaaaagcctatctctctcaagcaataaatgtttcctacttttaagaacttggaggaatatctaattttccctttcttcttaataacatttatatttgtttccccaaaaatgttttaaattttctttaatctatagtggttattaatatttcaaatgagaaaagaggagtcattagtttatcttcctgtatcagcctgtcatttgtgtcactgtctgtcactttcctgcctttgcaccaggttatggagacagaacggatgatttatctggtgacagaatatgctagtggaggggaaatatttggtaagtacatttattgcattctttaaacagctattgagcacactatggcaaacctaaaatagctgttcagtgcctttgtcacttgagcagcagtcacttgatgctgttcttcaatcctgccattttctatcaacaaaggcattttaatttgttttgattaatctagtaaaatccctttaacacatttgtttccttagcaaaggtgttttgtttatttcagtcaggcgctgacagttgagattaaagatctccaaaaacaagcatcctttctgaacgtgggacttagggtctttcctgtttgcaggttttaattgaggttaccaagtgcgacagaactcacacaagtgtgtgggcctctgttgtgtcagaaagagccacttagagcacataatctcacccgagtgcgttccttaaactttgtttaaatataacatgtaactatattatttaccatgtgttcacagttcccctcagtaattcttgtaattttgggggttctgccttcagtagctatattttcctctcacacttagctttagcacaatgtcagaaataagcaagagactttgttactgacaaatctgatttttaagatgctaaaaactgacaaaacgattttttttctaacagtgataaatggagccaagtagagttaaagggtaaacttccaaatctaaattgatgtgtcttttattttttcttttggcaactaactacagagaaaagtttctttatatactttatttgtctaatttcctcattttaaaaaaaatttatcaatatgaacacttgctagtttaaaattttttaatttttattttaaacatttgctccttcctgcacgataaaatgtatttaaaagcatagaatcacttttaaaatgaatcttcttattaatgactagtcagttgtggctgcatggatgtgtgtgtgtgtgtgtttgtgtttttaaagtttccctagcgatctagtgtttttttgtgtgtcaaagtatctttagggtaagtgctagtcctttttaaaagaggtatcattatttcttaattttatatttaattggctttgtatatgtgattagttaatgtcaaagctaatggtgatagaaatttatactcaatatagtatgggaggggatactttattttaaagaaatgaaagcattacaagatttgaaggatagcattgtttgtcaagaaggtatagtaggccttcactatgtatgataattatatgccaatcatgtgccttggagatgctgactcaattaagacactggttttcctttccgtggagaaatctggtggaaaacagacagggaaatcaacatattactttgaagatgagaatggaaactgtaaaactctgtatagtagagaacagtagtgcagatggcagtttggttaactcttggagatcagggaaatcttcctggagggcatggttatatggaaatttatgaaccagaaaatgaaagcacaagagagaatatttggagagagagaaatagcagtcatgttattgggagactatactatggtctgacattccaggcacatgttatgataaacctgccttaattaagatcacaaatgtatacaaaggcaaatagaaaactttcattatctagataaggttttttctttggacaaggtattgctctgctgccctggctggaatgcagtggtgcaatcctagctcactgcagcctcgaactcctgggctcaagtgatcctcctgcctcagccatctgagtagctgatactatagctgtgcactagcatacctggctaatttttaaatttttagtagagacgggggtctcactatattgttcaggctggaagatacctttttacaagttttattctataaaaagtcaaacatctcccaaatccttgagctgcctgttaggtattttatttcatagaacgacatttattggtggggaaacaatggtaatttggggagaaaaaagatcatgtcatcttaatgtttgtaataaaaaaagacccaaacacagggcacatcaatctaccttactctttaagaaagcagattttatttatttatttatttatttatttatttatttatttatttattcttttttgagctagggtcttggctctgttgaccaggtgaagtgcagtaacgggatcacagctcagtgcacccccagcttcctgggctcaagtaatcctcctgccttagcttcctgagtagctgggactgtaggtatacaccaccatgccaggctaatttttaaatttttatagcgattaggtctcattatgttgcccaggctggttgtgaactcctgggctgtagcaatcctcctgccttggcctcccaaagtgttgggattataggcatgagctactgcacccagcaggaagcagtattagagagatccgtttcttggtcctggacttcatgtgaatgtacctcaagggatgaacaaacagaataccacttctgataatgttattttaaaaacaaaatattttaggttggtgaaaaagtaattgtggcttttgtcattgaaagtaatggcaaaaaccgcaattacttttgcaccaacctataattatatattgtaacacatattatgtaatatataacaatagaatttgaaatgttattattgatactattaagtaatattattataaaagatccagatgtggaagaaaatagtgtattacctaaagaaattattgagactgcacagggatagaactgtctcatgagctctgatttttaaaaatgtctgtgtaaaaaagatgaaaggggcttagtcaagaaaacctgggctttggatgtatttagacctaggtttgaatcagatctctgtcacctatttgcccttttacttagagcaaattactagatgattctggtgcacaggttccaggtctgtataaggtaagatctagaatatttgtattatagttgtgaagattaaatgagatcgcatatatagagctctagcacagtgcttccttacgccttcatgtgagagagagatcaacttctgccgtcaaggtgtgaggagctctgctgacctgccttgcttgctgaaacaagtgaaaactattaaagaaaacaaaacccagtcatttaaagtctctggaaatcgtcctaagagtaagcagaaaatgaaggaacattattcaagaacatctgtgcaaattcggtaagaaacaaagtctggtcagcaaggtggaaattcccgtccaggctactgcagccaagaacgcagggcttccttctgtcaaaagacaaaattgcaagtttagtttgatgatcccagttggctttatttgcgattctagaatcggacaacatttcatttcatagaataagtgttccagtaagttgagcagaagagtttggcttatggacagaagggcttaagaagtctgaacagtgtattggttacttttaaacagaacaatagaaaattaaccagttaacatcaggttacttcgggctaccttttttagtaaggattaaagcagagggaacttcatcattgtgccagttaaagattttagactgggctgtttgggaaattggctgttatctctttctcctgatttctcaggtcagataacaacctagttttcgctttggaactttagcatgagtgactccattttgatatttagtttggtctgttggtgcctagtgcagaagtttattcgaaaacaatggtctcctgtaatttttatttgtcacttctcctcaattctctccagcatctgaatagcagctttcttcccaggaggatttggacatcagcaattctcattctgccccgagctgcctattgctgagtcctggagaagtgcagttaagagatgggggccccttcttctactcagcccccacttgtggaacttgatcaggtatgccgagaatactaggacccagatcactcttgccttgggtattaagacagtggtttcactgtcttttgctgctaggagaggcaagctgagaggaccccaggctgctgtcctcccccgctctccatccaccaaactctcagttcctagagtgggagcgtcactcagagaagtttgctgttgtccccaaccccagctccagagccctaactctgagatttttacctgtggagaaaaacaaaccataaaacagctcctaatttcttcccaaaggaactgacttcatttgcaacagggagtgaagaagttcaaacctgattgtactctcaagaacagtagagggaaaagaaaaaagaaaaagaacagtggaggttgtggtaaaggacatttgagaagagattcatgaaacaggccaaatggtaggtttgctagttcgcagggggagaaccaatgaattaatttagaaagagcttctctgggattagaatgaaaataaatcactggctgggtgcacacctgtaattctagctattcaggcaggaggatggctcgagcctaggagttggaggtcagcataggcaacatagggagaccctgtcttaaataaaaacaaaaataaaacaaaaaaacactgatggcaaaaattatttcttcaaaggaaccagaatttgattgtattgtttgtagaccaatttgtgccccagggcattattcaaaacaaaagggcaatcagccagcaactagtggagtttaacggctgagtatggtcagtaaatgagaggaagaaagtcctagcaaaaacactgtgatcccaaggtaactaactgtaggcataccgaagctgcctgttccagaggaatcacattagaggctgaacactgtaaatatggagaaataaacttcactagaagaatctagcttttagctgggcatggtggcatgcgcctgtagtcatagctccttaggttattgatacgagatctttctaactgtgggcattttacagctataaatttctctctaagcatgctttggctgcatatcatgagttttagtatgccgtattttcattttcattcatttgaaagtattttctgaattcacttttgatgtcttgtttcattatttatttattagtgtgttgtttaattttcacatatttgtgaatttcccgaatgtttcctactcttgatttccaatttcattccattatagttggttgtttttctatcctctatttcataatttctgctataatatttgttatttccttctttctgcttgcttcagttttagtttgttcttcctcttctagtgtcttgaagccaagcagaaagaaggaaataaagattatagcagaaattatgaaatagagaatagaaaaacaatagaggatatcagtgaaaccaaaagatagttctttgaaaaaatcgacaacattgacagatctttagctagattgacgagagagagaagagaaaaagagaagactgaaatgactagaatcagaagtgaaagaaaggaacattactacagtcccttaagaaacaaaaatgggctgggcatggtgactcacgcctataatcccagcactttggtatgctgaggtgggaggattgctttagcccaggagttcagtaccagcatggacaacatagtgagacctcatttctactaaacataaaaaattagccggatgtggtagcatgagcctgtggtcccagctacttaggaggctgaggcaggaggatcacttgagcccaggatgtcaaggctgcagtgagccatgattgtgccaatgcatttcagcctgggcaacagagcaagaccctgtcttaaaaaaaaataaaaatgattataaaggaatattatgaacaactatacatcaacaaatcagctgggcttggtggctcatgcctataatcctagcactttggggggctgaggtgagtggattgcttgacctcaggagttcaagaccagcctgggcaacatggtgaaacaccatctctacaaaaaaaaatagaaaaattagccatgcatggtggtgcacacctgtagtcccagctactcgagaggctgaagtgggaggatcacctgagcctaggaggtggaggttgcagtgagctatgattgcaccactgcactccagtctgggcaacagagtgagaccctgtctcaaaaaaaaaaaaaaagtcagcttagatgaaatggacaaattcctagaaagataccaactgttgaaacaactgacttaagaagaaatagaggccaggcacggtggctcatgcctgtaatcccagcactttgggaggctgaggtgggcagatcacgaggtcaggagatgagaccatcctggctaacacggtgaaaccccgtctctactaaaaatacaaaaaattagctgggcaaggtggtgggcacctgtagtcccagctacttgggaggctgaggcaggagaatggcgtgaacctgggaggcggaacttgcagtgagccgagatcgtgccactgcactccagcctggacaaaagagcaagactctgtctcaaaaaaaaaaaaaatacatacatacatacatacatacatacatacatacatatatatatatatatttccctagctaaagtaaaaaatggtgttctggttgcaaattgatagtctttacttcatttgacctctttgtagcatctgaattcttgactgtttccttctaaagctcttagttttgacttccacaaatgttcaacttctgattcttctattgttcggactgttccttcttagtatcttttgctgggcctcctttctctgactgctagaacatgttgacatgttgtagcatattctctgactttatatatatatataatatataaataataattatatataaaatatataaataattatatattgtatataaataataatttgtatataatatattatatataaataataatttatatataatatattatatataaataataatttatatattatatatatatttttttgagacgaagtctcactctgtggccatgctggagtgcagtggcgcaatctcggctcactgcaagctccacgtcccaggttcagaccattctgcctcagtctcccaagtagctgggactacaggcactcgccactatgcccggctaattttttgtatttttagtagagatgggttttcaccatgttagccaggatggtcttgatctcctgaccttgtgatctgcccgcctcagcctcccaaagtgctgggattacaggcgtgagccaacgctcctggcctggctagggaaatattaataaaatggcagaggtggagacagatgttaaagaagtggaggcattgggtgctattttgagaagcattgctctgaaggaaagaagggagaagacagtagtttgtacaggaagcaaggttgttgggagagagttctccacggatatctcacatttcttcatgtttcatgagtaaggcactgactgcctttgttctagactgttttctcaaggatgtttatatagtgagcacccttgaaagacagagatagtatctccctccacagctcaaagatctgtttattgcccagtgtgaaagattccctaagctccaagctcagggttcctctcctataatggacccgactgtgtgtgtaggcgtcatctggtcccctttgcagtgccctgtgaaaattagggcttggggaactgaagcaaatatgttgatgttcatgctgcttgctgtgccgtaagtgacaaagtcttttgtctctgacagaggggtttcctatcttctgccatcacccatgtaattgtggcaggttgagttattagcttgcagaaatggtgagatctcagaccctcttgatacttgacaggaaataaggaggggtttgttttattttgattcgtttaaatatgagacttgattacaggttgaggttgaagatgcagtagtggggaagatgagtttgaaaataattgatatggaaaacaatctctaaagcaagatcaatgaggaactgagggatgagcataattgcaagaaattagccttgcacatgaagaaggatagaagataaaggatgcatgtgggtgtaggcaattttttaggtagaagaatgtgaaaaagatgtttcatgcttttcatataattttctattgagagtagcagattatgttatcagatgaattaagggtgagagggtagagacctggatcagcatggagaaagtgaaattagctgcagggaggaatgagagagagggcaattaagaatagctaaataagttgattaaaggccttagagataggaaacagttaacttgttattccattatacagaattgagtgatttttttcccctaccaccaatgctcaattacctgtgtgtaaattgaataagacagacaattggactgatcctgtttagagtttacaggacatgtgcaaatgaagaggcaacaggtgacaagggttttgaggccactagcaataatgtaattaaagtgtgggcttttgggcttaggctgaagtgggttgggaaggcaagtgagaccaggatgactgatcttaaataagaatttttaaagctggctgggcatggtggatcatacctctaatcccagcactttgggaggcccaggcaggcagatcactggagcccaggagtttgaaaccagcctgggcaacatggagaaattctctgttatttaaaaaaaaaaaaaaaaaaaaaaaagaattcatgaagctacaggtctagatgaagttgaaaagcaagtgtgttagtgtgttgggcatatgaaggttggagagatgaaagtctaaaactacactgcccaacacgacagccactgtccacatgttgctgttgtgctcacgcctgtaatcccagcactttgggaggctgaggcgggcggatcacgaggtcaggagattgagaacatcctggctaacatggtgaaaccctgtctctactaaaaatacaaaaaatgagccaggtgtggtggcggacgcctgtagtcccagctactcaggaggctgaggcaggagaatgttgtgaacccgggaggcggagcttgcagtgagtcgagatccagccactgcactccagcctacgggacagagcgagactccgtctcaaaaaaaaaaaagaaaaaagaaatgtagctagtgcccctgaggaactgagttttgaatttaatttacatttaaatttaaaaactgaggtattatgaaaagttttaggccagctgtgagagttagccaactacagactaagagagcatagtctccaagatcacccctcactctgctgtcacctacaagttcaggaaattcccaaaaccggttcagtttgataaatagctagaaggattcacaaaattcactgaaagctaatatactcccggtttggtttaatacaggtaaaggatacagattaaaatcagccagggaaggaagtgcagagtccaggagaagtacgaaatgcagaacttttgttgtcctttccatgtggatacaagatatgttacactcctggtattgatgtgttacattgtgtacagagcagtacccatcagggaagctcagcccagcctctgtgttcagtgtttttattttacataagcctgattgattgattgattgattgctcacatgattgatctgtgtgtctcggtcaactgatgctcgtgacccaaagcccacacgtcaagtcacgctgttgtgcagccaacaatgtatatccagcctctaccctgagactatatgggtgtggcgaatcccagcctaaatcatgttattagactctctggcatgacccaaggctcccagacagagacactccgagcagacataacattccaagaacccagagactgcttcccagaagccaagggaaggccaggccttctctttgggtaaggccaagttcttcactctgcagagtctaaaatatttttctattaaacgcaactcttattttgataaaactacattacaccttggctatagacaacttagtattttagttgtgatacgcttataaagtataaaatacacagtggattttgaagacttactatgaaaaaagaaggtaccctatctcattgctattatttttattgattacattctgaaatgatcttttgatgtatttggttaaagtaagttactgattttcaaaatgagtgctttttttttttacttttaaatgtgattacaagaaaatctgaaattatataaatggcacacattgtattttatttgatagtgctaatttagaaggttaagataagagagggggaagtttagaatttcagagttaaaataatgtcaagcaaagacaagttcaagatgtggccataggaatagttgctatacattggtagagttctaggtcaccggagagaaagaaggctaaaggaaccatgaagcaaactgtcaaataagttatcctcattgatgttcacattccctaggtgatggcagaatttgagtggagggcgcaatagactacaaactaggtttcggtgagtgtctttgatgaatgtgaaggcaagagaggcagaaagggagtataccagctgcccaaacatatggcgtagtattgttagtggagaccttgaagaggttacattaattcctaatccctggtggaatattgtccctttttacctcaagaggcctgtaaaggaattgctagtcttagaggagttggttggaaaagtgattatcaatgggaggtgttggccccgatgtaaaagccctgctgcccttctttgccctctttgtccctccttaacttttgtgacccatctcaaatgttattccccctgtgaactctgctctgattttgccaaatagctaattacctttttttcttcactttgaacatacctctcctatagcactttttgaagtaattttttttttcatttctaagtttgtcttttactggtaatttagactctggtccatttctttttcctttgactattttccaaggggcttgattgaatccatgaatgtggtgcccacagatagagagggaagactatatatgctgaattcaatcacttatcaccacctccataactaccaatctggtctaagccaccatcatgtcttgctaagatcactgcagtagcctttaaatagtctctctgaatctgccctgacttcccccccgattatagctagaaggattcttttaaaattcaagtgggaccttaccactgagctacttctgttggctttcccatctatttggaataaatttataattcctactatagcctataagattatataatttggtctcctgctgtctctcaccacagctcctagcactctcctcctcacatcggcatctttctttttcattaaacccttcgctgtgctcccgctttaagaccatatattccatttcttcttcctgaattactcttttcctacatatccacatggctgtctctcctgtttcttgccagtctcttatcaaatgttatctcattagagaggtgtttgctcaccatgctgtctaaaatctcattcttcctactggcccattgctctgtagtctctgtcttgctttacttttctttttggtttttatcatgaactgacatatatttatttgtttttttactgtcttgagtcaataaaatttacgtgccattaaagactttgtcatttttgtttcctaccaaatcttcaatactcaaaatagtgcctacagggaatgcatgttccataaatatttattgataagttgaataaaatactaagtgaatgaaagaacatcactggattgctgattatggcgtttaagttttattcatctgtgtcttccttgtttaatgtagtgtctaacatatagtaggcactcagtaaatgtatttcattgtgtcataatgaaatataactaagtcaagcatggaatttgcatgttatttaataacatcttagttaaatgagtttttgacatggggaaagcaccttttttgggtaactgtatagagaaagacatattgaagattatgaattctaagcagtgtaataaatagacttcagtaattggttatttcatgaatatttactactcattcaattgacttatccagtttatttttgcatactattcagccttatattatgaaggagcagtgatgacagtgtgggtttatttaatgttacaaacagaattgagaaactggttagttttgtaaaccactaaatttataatttaaaacttccacactctgatatctttagatatatatccccaaacttcctatttgagaccatgaagtcataaatccagcactttatcaagcaaaatttcctgaataccaggcagaactcatgggcatttaaaacaaattactaatttaagaggagtctgttgaaatgtgtatgatttattatgaacattctcagtgtcttaaaaataatatttcttaatggtgccaacatgtatggaaccctgaacttctcacaaagccattcatttatgccataggtcactcaaaaactattaggacagaggatcagaaagactaacttgcataaccattgtgtacaagatactgtgttaagtgtttcacataggttattttatcttgtgactgcctggaagttcaagaatacaacacatttgtttgaacactactatgtactggtttgttgtggctttttttttttttttacatgtttttatttaatccgcagcatcctttatgtcttcacaactaaactaccattttcccactagtttatttactcctttgattattaaaaaaggtattttcggccaggcgcggtggctcacgcctgtaatcccagcactttgggaggctgaggcgggcggatcacgaggtcaggagattgagaccatcctggctaacatggtgaaagcccgtctctaccgaaaatacaaaaaattagccgagcatggtggtgggcacctgtggtcccaactacttgggaggctgaggcaggaaaatggcctgaacccaggaggcggagcttgcagtgagccgagattgcgccactgcactccagcctgggggacagagcgaggctccgtctcaaaaaaatcaaaacaaaacaaacaaacaaacaaacaaaaacttagctattttctaagggtctcctaacaagcaagtaaccatgctactgaactttagtcactctgaatcaaaataattgacttgtatttatttccctaattaatttcccatttattattattcattttttgttctgttttcttaatatcagatatgactaacatttattttatttatttatccttttttttttttaatgcccccaccaggagtgtgcaagtggagagatgcatggatgaaggaggggagctggcgggggtgggtctgtgaccagcatttatattgtaactggccaagatgtatgaggaagccacctgtgctttgacctcactttacactaaaacattcatttatagtctgatcatccagtcatttctaccatgacataaaaataagagccccagagaacaaatcaaattatttttgctgtattgagtatatataaatcccaaagggccaggcatggtggctcacttctgtaatcccagcactttgggaggctgagatgggcagatcacttgagatcaggagttcaagaccagcctggccaacatgttgaaaccccgtctttactaaaaaatacaaaaattagctgggcgtggtgacacacgcctatagtcccacctactcgggaggctgaggtacaagaatcacttgaatatgggaggcagaggttgcagtgagccaagatcgcaccactgcactccagcctgggtgacagagtgagactctgtctcaaaaaaaaaaaaaaaacaaaaaaaccttaaaggaatatttttgcctggctcctacattaacatttactttctctgaaaatcataaccctgtgtttgttattatccagtgtctacaaacagcccagcttctatagttaggtaaagtaaattcaatatcagttgttctttcataatcaaaacagaagtctacaatgccattcttacatacaacagcattgacagtaattccttactatcatgtaatagccagggcatgtttagctttctgcagatgtttcaaaacatcttcttatagtttgtacaaattacgatgcaagaaatccatacatccattgagttgaaaaatgtctaaattttttataatctaaatttttaaataatctgtgacaacctcatctcttccctacaaacatttactttttttctatgctatctatttatgtaagaaactggattgtcttaaaaaatgtcctacatttggaatttggctgatcatatatttattgtgtcattcaacatgttcctgtagttcagtgtttcttggaaagtggaagttatatttaggaatttgcttagttcagtttttggaggggaagcaggagtgctccatagttttttattgcatcacttcaagagttgtataatatctgattttcccacttttagtgatacttagaataatcttcaggtatagttattgttcaccaaattgatcctttataaagtttcccatcagtcttttacgtaatgttttatctactcctgtcatttagttgcctagctatttcattagaagttgcaaggccgggcttggtggctcacacctgtaatcccagcactttgggaggccgaggcaggtggatcacgaggtcaggattttcagaccagcctgaccaacatggtgaaaccttgtctttattgaaaatacaaaaattaaccagccatggtgatgcacacctgtagtcccagctacttgggaggctgaggcaggagaattgcttgaacccaggaggcggaggttgcagtgagctgagtccgcgccattgcactacagcctgggtgacagagtgagacttgtcttaaaaacaaaacaaaacaaaaaagaagttgcaaaatggtgattatttgaattctctcattcattcaacatttatgagttattcttcttctgtaaagaactttgccttataaactacttagaaattatagtaatgacaagataaatgcttgattctttcttttccttatgtatcagtttttagaataatgaattggttctctgcaatctccagtggagactaaggaagttggttttctattttgtaacataattatgcaattatggattttagtatattttatgtgcttcagtccattaagtcattcttcttttgaaactgaaattattccacttagccagtgggagcctggagcctcttcaggctgactcctgtgtccttttgatgtgagctcaatagtctttgatatttttgttgcttttaggcaagatgtcctatgcttatcttgaacatttcctgtaccagacatggaatcaaacatttctcctaggaattctggtttggtctcctctcctctcctctcctctcctctcctctcctctcctcccctcccctctcctctcctctcctcccctctcctctcctcccctcccctcccctcccctcccctcccctcccctcccctccccttccgtcccgtccccttcttttcattttccttttctttttctctccttctcttctcctctcctctcctctcctctcctcccctcccctcccctcccgtcccgtccccttcttttcattttccttttctttttctctccttctcctctcctctcctctcctcccctcccctcccctcccctcccctcccctcccgtccccttcttttccttttccttttctttttctctccttctcttctcctctcctctcctctcctctcctctcctctcctctcctctcttctcccctcttctcccttcccctcccctcccctcccctcccctcccctcccctctagatagagtctcactctgttgcccaggcgggagtgcagtggtgtgaactcagctcactgcagcctccgcctcccaggttcaagtgattctcctgcctcagcctcccgagtagctgggactacaggcacacgccaccatgcccagctaatttttgtatttttagttgagacggggtttcaccatgttggccaagctggtcttgaactcctggcctcaagtgatccacttgtctcagcctcccagagcactgggattacaggcgtgagccaccgtgcccagccaactctggtttctttaaatggaaaatagcatttaaagaccagaatttgggcctcagggatgctcgttagtgctactgggttattattgcttagaggaggggacagagctatgaaatatatatttttaatggagaggaaaatgaaacaagtttatactaacactccaattaaaatgtaagatttcagcatttttacttcttaaatattatatctttagttctcttttcccttatgttgaaaattgtggttccagatgacgttaacatagtcacttttttgatatgagtgaggggagagactgattgattgaaaacaataccagtagtattacaaataataaggagacttgtggttctttttgttcttaggatatatcccatgaagaattgtcttagtctatttgggctgctctagcagaatacttttaactttatgtatagttaggtattatgtaccgtaatctactgattttttacaggttgctttcaatttttagaaatgttcttctatttgattcaattctgaattgtttcagttatgtaagacattacttgtttccaaagttaaagctacaaaacaaggtgcattcatatgtctggcttccacaccttttccgtaagtaaccatttatttaacattattccttttggcaaatctaaataaatatatgcatatacatacacatgcatatttgtattttcccttccttcctacacaaacagaaacacactctacatatttttctacgtcttgcagtgcttcatggatataaacccatccatggaccaaaaatccatgggctaggagggaagacacacaagataagaaattactgtaatataattgtttgctgatgtcatagaggcagatagattaaatgtcattagacacaaattatggagcagtttttctagggcgggtgagtaggttagggttagcttcagagaaatgacctttaagctggactttaaaggataaccttgaattccaaagttcagctggggatggggatgagaataggagacaggcattccagcaagaagtaaaaccctgagcaaagtgtacagcatgttggtgaaacagcaagtacacatgcaggtgaactatgtttatgaattagaactatatattgtaggctgtgagattttgttgaaaagttctaagttaaatgaatgacacgaccaaagaaatgtgttagaataactggtaacaatgtaaaggatgatgggcagaaagggaaacctgaaggatagagaagaggaggcatactctttaaatgtaagtcgaaaatttagcgtattttgtaagtaattggatgttaagagtgaggaagaaagaggagttgaagatgattccaaagtttctttcatggacatctagatgatggtaatagggattcaggaggagaactaggttacagcaggaagataaagagaacgttagttcaggccaggtgctgtggctcacgcctgtaatcccagaactttgggaggctgaggtaggtgcattacttgaggtaaagagtttgagaccagcctgaccaacatggtgaaactccgtctctattaaaaatacaaaaattagctgggcatggtggcacctgttgtcccagtgacttgggaggctgagataggagaatcacttgaacctgggaggcagaggttgtgatgagccgagatcacaccaccccgcttcagcctggatgacaaagtgagtctctgtctcaaaaatgcaaacaaacaaagagaacgctagttcagtttggtccatgttaaatttagatatctttcaaatttttttaaattataaaaataaagatgggatctcactatgttgcccaggctgatcttgaactcctggactcaagtgatcctcccttcttggcctcccagtgtgctgggatcacaggtgtgagccaccacacctggcctaaatttagatatatttatgatacctagatgaagtttttcagtagacatttgaaaacaggagtttggagctcaggaggttagatgactagaaacagtgaatttggaagccattagccttatgtattggcattagttaccatctcatgctacataaaattccctggagacatgtacttgagctgttccctttggaagactagttagagctaggattgcaacattttgatagtcaatattttaacaaatcgaaaggtacctctgttgacttggagcatgcaggttatactaggatctgattagaacctctgttacaggattagcaaaccaagtattgctaataccttggtgtagcatgagaaacattggtactatatgagaaaacttgaataacatttttgaaaggccttttgtaatatatgagattctatttcaaagcctacctgggtttatgcttagtctagaaatactttttaagaagccataagaaaacaaatccttccttatacattactgtgaatggacttgatatgaaaaggatggcatgttttttatgaagacaacttaaaaagtgtgtagtttacaaaccttgtttaatagcaaaatgaagagtaaaaaaagtgtttttgtaaaagcttatagtctcttctctcattggtattccttgagttaatttataataataaattaataagtattaataatcaatataattaataataatttatcattattaataatagtttaaagatagggtcttgccctgttgcccaggctggagtgcagtggcatgctcatagctcactgcagcctcgaactcctgggttcaagtgatcctcctgcctcagcctctcaacagattaccaggtgcataccaccatgcctggctgattttgtttgtttgttttctgagactgggtctcactctgtcgcccaggctggagtgcagtggcacgatctcggcttactgcaaactctgctttccaggttcaagcgattctcctgcctcagcctcccgaatagctgggactataggcatgcgccaccacacccggctaattttttttttgtattttgagtagaaatgaggtttcaccatgttggccaggctggtcttgaactcctgacctcaggtaatccacctacctctgcctcccaaagtgctgggattatagaggtgagccaccgcgcccggcctatgcctggctgatttttaaattttttgtagcaatggggtcttgctttgctgttcaggctggtctttaagtgcggggattataggtgtgaaccaccatgcctggcctaatctataattattaagtatccatcataggcagagtactattttatgtgtaataaggaggcatagaaaaaaatagttctagttccacattttcaaaactaaagcatatcctgtgataatgtgtttcacgaagaaattgtgttgtctcaaaactctcagggaaaaagtttagtttatttggaagagacagaagaaaatttagtatactttttgcttgtatgccaagtacagacttggatatatgaagacaggtcatatatgttagtgtgcctttttagattagttgggaagactcttgaattcattgaggtgagcaatagcatttagcattcattttgctaataaaatctaaggttcaggaaatagttttaataaacagggataggaatgtattcaatcatcttttgttcttttaataaatacttattaagtgcttaatatgcgtcagataccgttcattgtactagacacagtattgaacaaaatggcaagaatgcctgccctcatggagcttgttttctagtggagaagacagatagtacaccaactaagtagggtagaatgtgtcatttgttagaaaatgataaagtgcgtaggggaagtgaatatgaaattgaaatatcaggaggtaagctgacaatagagataggaaagacctctctgagaaggttatacttttgtaaaagatcatgcagctatttggggaggagcattccaagtagaaagaatagaaagaacaaaggccctgtggcaggagtatttctgctgtgtttgagaaatagcaaggtggcatatgtgattatagtagaacaaaagagccagtgaaagaaggtaaggtcaaaggtcatgagctgggaacccatccggaggttttgacagaaaaaaatgatgtgatcttatttaagatttaagagaattaccctgctacatagaaatgcagacttaattgtttgagtgtaggagtttgaggctacaatgagccatgattgggccactgcactccaacatgggcaacacagcaagaccttgtctcttgagagagagagagagagagaggaaggaagaaaagagaaaatgcaaacttatattcatataaaattctatacacaattgtttaattgttgatagcagctttctttgtaatagctaagaactggaaacaaccaaaatgtccttcagtaggtgaatggataaggaaactcttgtacatctattccatgctgtactactcagcagtaaaaaggagcaaatggggccaggtgcagtggctcacgcctgtaatcccagcactttggggggctgaggcgggtggagcacgaggtcaggagtttgagaccagcctggccaatatggtgaaaccctgtctctactaaaaatgcaaaaattagccgggtgtggtggcgcacgcctgtagtcccagctacttgggaggctgaggcaggagaatcacttgaacccaggaggtggaggttgcagtgagccaagattgcaccactgcactccatcctgggtgacagtgagactctgcctcaaaaaagaaaaaaaaaaaaaaaaggagcaaggttaatagacacatcaacttggatggatcttaaggacattatggtgactaaaaatatcaggccagtcatggtggtttatgcctgtaatcccaacactttggaaggcctaggcaggaatatcacttgagcccatgagtttgagaccagcttggtcaacttggtgaaaccctacctctaaataattagctaggcatggtggcagatgcttgtagtcctagctgcttgggaggctgaggtgggaggaggtcaaggctgcagtgagccgtgatcttgccactgcagtccagcttgaatgactctttctcaaaaaacaaacaaacaaaaacaagaaaataaaaaagccaatctcaaaaggtcgccgactgtatgattctgtttatatagtgttcttaaaatgatgaaattacataaatgggaaacagattagtggtttctaggagttagggatggtggggcatagaggaacaagcatgactgtgtaggggtagtgcaacggagatctttgtggtggtgaaatatttttgtatctttttttgatacaaaaaattgaacaggggaaaggcaagatccgtttacacatgcaggcatatatgtgagagtactcagtaatgactgagtccgaatagttgtaattgctattgtagtaattgcagttgttgttccacaaatctacacatgtgataaagtgacatagaactatacatacgcattgtacccatgtcaaattctgggttttgatatcgttctataattatataagatttaaccattggcggaaactgggcgaagggtacacgggacctctctgcactgtctttgcaacttcctgtgaatctataattatctcaaaataaaaagtttttaaaaaaagattactaccttggctgctcttttgaggagtaatcctaggaggttattgcagaaatctaggagtgaggtagttgctgttaaatgaggctggtggcactagagtggagtgaaggcaggggtgagaaatagttggattctgaatatgatttgaacgtagagttaatagaatttgctgatggataggatgcagggtgtgagagaaagagaagaatgaaagatgccataaaagtttttggcctggtcaatggaggagcaaagaaaagagatagtaacaagaagcagcaacaagtcaagaagcccggtaagaggtagttggattcttggcaagaaagacaaaatgacaaaccctcttcctctagtcagtggcagccacgcctgggagttagaggacaataggatattaaagtgactgcactcttattaacctgcttagggggagctgagttatcttggcctcgccctgcttttttggaaagaagcgtttgtttgataaacaggaagtcgtttccatgggtgtaggaagaagaaatgatagaactgagtggcaaagcaaagaactactagctgtggttagtttggaattggcagaagttttttcaggtagtcacctaagatgaagatgagcacacatactgccttttcccttttctaggctgggttcattcttcactgaaatgtggtatttctgcctattgcttgtcctgctgtcagggtatgttcattttcagctagtgttttgcatcaactatgagttgtagacttagcagacaaatggagacactgtctgtttagagtggaaaagtgacttattttaagaaatgttggctccgcaccactatcccattagtggcatacctctgacactccattgaagctggcctagggaaggtaagactggcttctgtgtatttttgctctttgaaaggtcagaacctaaatgtaccacaagatattttcttcctgagtaagattgggacaaaattacaaacagtgaattctgaagcaaacttacgtgctggtgctctaatactttagaaaattcaaaatcgatttcctgtacttctaacaatattactcttcgtcgggtatgtaaatctcttagtgtcacttacttcttttcattttgcaaggaagggcagaccaaaaagattaaagaagaccaatgccaagtcatggtcatgggaaagtgagaaagagaatttaaaagtactttttacttttttttactttgttttactttttacttttgaaaagcacttgaaacaggagaaccattttttttccttttaaccgagagtcacctcatccctgtctgggtacatgtttggagtgaaattgtggtcaaagaaaactttaaatttgtcccagacctataatggcaactaaatagataagtagttgattgatggtgaaaaaagcttagtgtgatggacttgactttatgcagcaggtgtctacttgaggtttgtttagattggtgggggtggggagggggcaggactctagctaggggcatggctgcagtgtggatgattgggatgaggatatgggtagtatttgtgtctcagtatttaggagaggtagttcactgaattgcctggaagaagcagaacaactctggagttccttgcaattggagtttatcctgacaaggttcaacgtacattttactttgcgtattgagtggattcaggagccatttggtttcatttgccttctgaaagtactgcagtatttgtaaaaatgctgtgactatgtgttaagtccaggctggtctacagctctggatttcttcactgaaagttaaatatcacatttgaacttgaagaatgtttgctgcctgcctctagagcatatacgaatataaagcagctatttgtcagcaggcagctgaaaggcgattttcagcagggagtgaaaaccactgcaggctgctggcttcctggcacacccactagacctcgtaggtttacagtgaaagcaaaccaatgggagtaggggttggggggataagatgggcaaaaatcagggcagaggctgaggtctgaatgcgattgagccactggaaggagcttgcatgtgaagagcacagtgctcccaaagagaagaaaacttgaaccctaaacacaatggctaggagcaaatatctaatgtgaacactttaaaaaaaaaaagtgatttgttccgtaagtgtatttagagtccaggggaaaaaaaaaagtgatttgtttatcttctttgtatctataactataggggtactgaaggtaactttggggaaagtattatagtttaagctgtactacccagtgcgctgttacagctaccttttaaccagaaccattaacagtgacaatcgatgtgtagaaaatcacctttaagctctgcagaatcctgaaggactttgtgctctattgactagatgtttaagtattccctatatagtattcagtggaccttttcaaaaatgtcttttgcaacatctttgaaagtgaaagttttaacgtatgatactcttaatcagagtacacgtttattcccaaatattctgttctttctttgggtatagcatgcaacagagtttacttgtatttagaagatcaagaggtgggggtattggcaggataaatgatttgtccagggacaactgatgtgtcactgtagagataaaacagaactaggctgcattccagcagcttctggcccgtataacagttttgagaactttccaatcactttaggaaaacaaggtacttagaaatttataaagactttcttaataaaagaaatcacttattttggaaattgtgaaattaatcattctgcagcatttaagaagcactttgatgtgttctggtaattagtatttactgccagacaaatgtctcttgggcattttaattaatgggtagcttggccaaatgagcttctgatggtaaaccttcataagggtttatttttatgtttctcaagaatagctgtctcttcaaagctctttaattagacaaggtttagcaactaaaacatattattagaataattaggccttgggttaagagaaatagggggtcagaggagcaggtactgttagaaaatggcctcttaaaacatagcattctacctctgatggatggccagttctttcacagcttctgttaagttactctccctagtttggacttcgtgttgtttaaagttcatagcagacctcaccggaagcctaaacacacccgagtgggagcttacttatccccacctctgacctcccagggaaagcttgattctagtccttttaactgctaagtggaagacttcttattttctcctttttcttctattaaatcgataatcttggctataacaatgacttgtatttttgagggagatgcttcaaaagccttgtgtgtggcgaacaaaaattacaataattcctttgaggatctttcttaatgatttatattatctacatataagatatgttcttaaagtgactacagtatttgcattccagaatgttatatttcttgtggtcagaatgcagtttgaattattttgcaatctgctctgtagatgggctggcatctaactccccttcttcaaccttctcccctaccatttcttgccacaagcgctcagtcttggcagttattgctagtaaatatgtgctaccctgaacttcctctttgtggtgaaggaaagatacacctgactggtcctgtgagggagtgagatgtcaccaaaacaattgtgtattctaccaaaactgttgataaatcacaatatatttatctatattccctcatttttcactttcctactgtctcaggatgcttaggatggcaaatatgtccttttcccagctagatcagttgattaaaggacagtgctcatgagactattagacatttctaacagaacaactgtatcatagctgacatttctaatcccactagctgtcatgacctatatgtgttgttggtttgataaagaactgagtcaaagatatgtatgttgttggtttggtataaacctactgctattattagaaagttcttaaagaacctgctaatccatcaaatcatttttgaatattgaggatagcctgctttatagtattatgattttatcacatgtaaattcttttgatataccttagttaacaacatggccaatgaaatgattttatttgagttggtagaaacttcacttggtttttgattgatgttatctgtaaaaattatcattttgtaagaaccatttggtgagccccataaatgcagatataaagatgtaggtatatcgctatgcactccagagaacagttaccgagtaagtgtgtttttatgtcaaatcgaagaactttgagaaagcagaaagatagtaacctaaacagagtgctctgtcgaggagttttctccccctagcagtgacgaatttctgtccaccctttccttaaatgatttaatattggggccttgcttttttacctcctctttaacacaggaaatatttctgatacttatcttcatgtgtgtgtttgctcatgtctgtgcagtcttctgcagtgaggatatgaaaagaaaggtagtgagttctatgacccttgaaaaacaccagaactctcttttcctaatgaaagtacaagtgtgttcttatgcatacttttgtataacaggatttatacttaaaatagtttggatacttattactaatgaattttgatagatgcaaaccaggactatcaatgtgttgttctctcattgctcattttgcctctttaactcactcgagagggccccttgtagccctccttaagtctaccttttgaaattacacaagtgtccaaaatgaaaactgactgtattcttcttcaacacagaccacctggtggcccatggtagaatggcagaaaaggaggcacgtcggaagttcaaacagatcgtcacagctgtctatttttgtcactgtcggaacattgttcatcgtgatttaaaagctgaaaatttacttctggatgccaatctgaatatcaaaatagcaggtgagaactgtactgaggatgtcagatagggacaaaggagcttttccttggggttctataagcaagggattatctgtttccatctcttcagaaagaactattgtgaaagtaaggacaatttaagatgaaaaaaaaaatagcctgaaaattgataaactttaaaagtacttcccctcccctgccctttttttttttttttcgagactgagtctcattgtcgcccaggctggagtgcagtggtgcagtcttgactcactgcagcctccatctcccaggttcaagcgattctcctgcctcagcctcccaagtagctaggattacaggtgcgcatcaccacgcctggctaatttttatacttttagtagagttggggttttgccatgttgggcaggctggtcttgaactcctgacctcaagtgatctgcctgccttggtctcccaaagtgctgggattacaggcgtgagccaccacacccggcctgtttatttttaatgtagtatcagctggaactaggctggggagaaagaagggaaaggtgatatttaaaatactattactttggttaacgggtccttttttacataagaaataaaatatgtaataaagtggaaaggaaaactactaaaattgtataccctctcaccttcacttgagaaggttgatttatgtcactgctgacacagagcatacttattctaaaggctgtaattgtatgataatttaggaaaaatagatcttagagtggcttataggcagtccagctttttgtcttctcaaattttactagtctgcttatctgacagtgccttgagagcacttttcactgccttgatctgttcatgcttaattttagtaaactatcagcattttgcctaatgaatacagactcaccatttactaataaaattaagtgactgcaatctatagagaaactgtaaatatgaaaataagccatttatgtttgccgacactttccggtatagcatcgtgtatccccggtctcccagataaaaggaaggacatctcatatagaaaactaaaatatagctagaatgtaattgtctagaaaaggcaaggtataaagcagttctaaggattttcttccttagtagaggtgggatttgagagtttggatttttatcataggtcaaagttacctaagggtacctttgcagggtcacaattcttctgagagttgcttttgtgtagataagcctgttcacttttacatcctggagcatcacctagctttttatatatctgaaactgacagctacacttttgtttagaactttcatatcatttataagttctttcactcctgcactagcttattacagagtacacaggaattaaaggctttctttatcttatataaaatcatgtttttcctttgctctcatgtcggttttattttctccaaagctctatagatactggtagttcccacaaaggtgtgtggcatggaaaagcctggcaatttcaaaccttcttttgtaattatttgttgtagcttcaattaaattaatactaataatacctactaaacttcacaacccttaaaactgtaataaaagattgattagtgtcttattattactataacaaattaccacaaacttaatgacttggaaaaacacagatttgttagcctgtagttctggaggtcagaagtccaagctgggtctcacagggtgaaagttaaaacagcagcaagggctgttcctcctggaggctctgaaggaaaaatgtgtccttgccttttttagcttctaaaggtcacctgcattctttagctcagccccttccttccttcactccaacctgtggcttccattgtcacatctcctactcctaattccgaccctcctgcttccctcttgcaaggacctttgtcattacattgggctgtctcagataatccaggatcatctctctcccacccccacctttttttgtttttgttttcgagacagggcctcattctgttgcccaggcaggagggcagtggcgtgatctcagctcactgcaacctcaacttcctgagtatctggaactacaggtgcgcgcttctatgcccagctaacttttgtatttttagtagagatggggttttaccatgttggccgtgctggtctcgaactcctggtctccagcgatccacccaccttggcctcccaaagtgctgggagccaccgtgtctgtcctcatctccccattttaagatctttaatcatgttaatacaagtcctttttaccatgtatggtaacacattcacaagtatgggggattgggatatagatgtatttgggggccattattcaacatgccacagatgtcactgtaaggctctttggattatagattagggtagtgaattaaaagaaggccctctggacacgcaccacccactctgcactgaccagcccacctggatagcagaggacacccccagcccccaccaagcattgaagacatagtttatttcctcatatcctttctccttgggtgtagttggggtggggaaggagggaagactggggtcatctccattccttgggctctgtgcccgagtccatggtgcaccactgtgctgcgagctgtggggcctgctgcagtgggagtgtgtggaacaccttgaccaaaggggagctttgtcttgtgtgttttgaaaaaggcttaatgaagagaatgttgttcattcttagtagtatagtttgcaattcttaatgacaaatagtaagtttcagtagaaaacaaaacaaaacaaaaagaaggccttctttatattctctagttttattttccgtccgctgacccaagattaaaaattttcttaatgctcccttggttcttgattttgaatttaggatgattttgatttagttaaagaaatttcttttttttctttttttttttttgagatggagtctcacactgttgcccaggctggagtgcagtggcatgatctccgctcactgcaacctctgcctcccccaggttcaagcgattctcctacctcagcctcccgtgtagctgggattacaggcatgcgccaccacgttctgctaattttttgtatttttagcagagacgagttttactatgctggccaggctagtcttgaactcctgacctcaggagttcaagatcctgatccacccgcctcagcctcccaaagtgctgggattataggcgtgagccaccacgcccggctgttaaggaaattttatatcctttagtttttacattgagaaactcagagtaaaaacagagattattgataattgaagttggaaactctactgaaatatttggtaaggagatttttaaagacttttctgttgttgttgttgttaatagttaaaacaaattcaaggagtcacaatgagagtgtctacctgctgatatataattacagactccggggtgctggcagccagccttgggctctctctgtgttaacacatatactttggcaagatttttaagttcattaacccaaagcgtacatttttattatttgttttaagagcaaaacagaaaaataaatgagcacctctagttttgcggcctgctacaatacctaacattagctttgctcatgcagtctttctcttatatgccatcgttactcagtttctcagtcattgcctgaacctcctttcttgcacataaattaaatagaattatcattctcacctcccagttcttttttgaacttaatggactagtgggagaaatgcttctagttgaagccaactagaacatgactaattttggagaggtaggttggatgtttttgacaggataaggtcagataggtaacgaaatcaactttaattctaaaagccaaaagtaactttcagattcctgatcttttcaatggcctcccttttggtaaagtatcttaaatgtcagtaagaagaaactactatatatgaaagaaacatgcaagagagaaaaagggttttttggttttattttaagaagttagtcttggctgggcgcagtggctcatgcctgtaatcccagcactttgggaggccaaggtgggtggatcacctgaggtcaggagtttgagaccagcctggccaacgtggtgaaaaccggtctctacaaaagttcacaaattagctgggcatgatggcgggtgcctgtaatcccagctactcacgaggctgaggcagaagaatcacttgaacccaggaggcagaggttgcagtgagctgagatcacgccattgcactccaacctgggtgagagagcgagactccatctcaaaaaaaaaaaaaaaaaaaaaaaaaaagagaaaagaaaaggagaaattagtcgtaagcagctcatctttaaaataatcgtatatgttatagtaccaaaataacttggaactaataaaactcagattaggaagtataaaagattcatgttttctgtatgccattgtttaagtgattttaatgaaaataatcatgcatccagtttcgtgtagaagatgaataaattggtctgtggatatttgtgtttacattaatttatttttacattttgtattaatgtggtgatttacatttgatactgtttgtttgttttgtagagacagaatctcactatgttgcctaggctggtctcaaactcctggcctcaagcgattctcctgccttggcctcataaagtgctgggattataggtgtgagccaccatgcccgccccttcccccttcttttttaagaaactgggttaccttctgttgaccaggctgcagtggcataatcatggctcactgcaacctcagcctcctgggctcaagtgatcctcctgcctcagcctcccaagtagctgggactacaggcatgttccaccacacctcgctaattttaaacattttttgtcactatgttcctcagcctggtctcaaactcttggcctcaaccagtcctccctccttaacctcccaaagtgttagaattatgggcatgagccaccgtgcctggcctacatttgatatttgatactgtaaaaagctagctatcacaactgtccatactagttctcttcgagagaataagtgttccctggatagatagatattagttatagatattataagttataattatagtataagttatatcttcagtcataaatactataagattcagctgagcaaggtggcatgcatctgtagtcccagctagttgagatcaaggctaaggcaggagtcttacttggacttaggagtttgagtctagcctcatagtgataccttgtctactgaaaaaaaaaaaagattgaaccattgttccactgtttatgattttttttgtgcttaattcttatttatgaatttttgttctagttctgtttctagagagaataaagcccaggtgaataactttgttttctttctggttttagaattattagtaacaaatccgtgttcttaatggcagtagcaaacctgtcttctgtagaatttttaaagagatgtttctgtcattagtaatacagaagaagccttgatcattttcagaataaagaattttacgacagggagaggtggctcatgcccgtaatctcagcactttgtgaagccgaagtgggaagatcacttgaggccaggattttgagacctggggcaacatagtgagattccatctcttttttattaagaagaaaaaagaaaaaaaaagaattttatttctaaaggcagttaccaagtctagaactaagaatttgtggaggtaatctagaatcttacttgttaacgaagcctccttgcataatggcacagaagagaaaaaagaagcgtgaaacgtgactccagccctaaagaactgaggctatatgggcagcaaacattagatctttgaaaagttggtaacaccaaaattatgctttgcatatatataatgtacttcacaaagcatttttacatgtatcacctaattttattggcatgcaaatatatcttattaaaaaagtaaaatctcttcatcttctggcacttttaactctccaaaacttctgaatttcttgtaaagagcacccaggcaaggtatagagaaccccaatgctgggaaaagagtaggattcttggcctccgacttttaacttttcttgcctgagatgtgtaaggatccacagaagagcagttgaaggactgacgaggcacaacacagctcactcagcatggagccggcatcgctggatgatagtatccttaacagctaccaaattatagttggatacaatagaagagatgttacaaggcatgtcatgactcattatcacattaattgtacagtctaattagcataggagttcagaggatgatagaagtactgtagtttgtaagattccacaagattgtcagttccacaaggactgtaaccatgtcctgtttattgtcacactcccactggctcatacatgcctgttctgtagcaggtgctccccagctttgtcgaactgaagttcaggcggtactgataaaggacataaatattgtattgaggacatggcatttgaggtgcgtccagtgtcatgtgattggatgatcaggtgtagaggagagaattccagcaagtgttaataaggcacctgtcagttgcagacactgatacaggcacgggggtacagcagtcagtaagataaccccttggaacttatattctaatggggataaatagacagtaaacacaaataagctctcatagggctgtgacaaagataaactcgagtaacatggcagaatgatttgtgcgagaggtactgcttttagccaggatcttcaaaacattccacgcagaaagaagaacaatgcaaaggcctgagagagataaattcaacatagaagaaaggggtagaagaaagtccagcatggctggagataatgaataaaatggggattggaagaagttggggtgagagagatggcaaaggccagttgcacgtggttaggatgtgggatttcatttaggttccagtgggcactgagttggagcagcgtgggcagcagtagaatgcacaaggtctatttgaaaaaaaaaaaaaaagggtgagcagctcagtggaagggaaggctaaaggagaggagtctccccgagaaggcaggagcagtagatgtttatattagattgaaatcatttgaatataagatataaggcttaattaatccaattcagtatggagacggcaaaaagctggaagctgagggaagggaagggcctcctggtaataggaaggccagttaaaggctgtgaatggtaaaatcccgcatgagggtgatggtggcagtaaacatgcaaaggaagaaaacggcaacaaattcaagagagaaagcaagcgagaatttctaggaccagataaccaatcatatgtcttgaccaggaagagggaattttgaaagatatgtttagaaataaagaaatgaaattttcttactgatggattatattaagctatcaaaaaaatggtgttttgaaaatggttaatgtattgctattcgaaagtaattttaatgtccttgtccccaaagattaagtagcaaggtgtctatatttaaaatagattgcctgagaaaaaactgaaatgtagctggcttactccctgaagaaaagttctttcaaatgcttagacgttataagaatgttctgaaaattgtggaaacattttttttaaacctaaggaagttggaaacttttgtctttaaatgtcgactcccagaatggtctccatgagatagtttccactctcgtgttattgttttagttggcaatcagtagacagcaaagatcagaaatgcaactatagaaaggccaatatcctggaaagaattttcagagcatggatttaaggtaccatggaaaattttgaccttaatgcagtgagagctagaccattttattattttttagggagaaattaaaacatttcctaactcaattgacctttcacccttagtatgaatatactgagataccatcatatagaaaagaaaggttggaaaccttggatttttgagtacccttccacagtgtgttgactgacagtgcctctgactggtcacaggaagtagttatgcaatactcattatatcaatctaaattgtatttcatgattctaatgccctctttttaggctatcattcattgcacctcccaggttgacatgtccagtgaattgagaccagagaggcctttgtgtttgtcctgaattcataatagagtctaggaattttaatagctagacctgtgttcttgccctgaaatggcatatgaccattaccaagaagcggctctaaataaccttcctgcacgttgacccttgggaaaagaaaatttgaaatattatctctcttgaatcctattcctgagactagaactttacaaatttgtattctacttaatgtcatatctatattttttaatattaagattattaacttagtttaacacagaaaaaacgttgatgttccaggaaggtgcaccctatttagcctacggtttctcgtatatcttggaacactgaagtgtaacacctgaggctgtgtaaacagaggccagcctgagaagctgagaatcaagaatttgatgctcaaccatagattcctcttactcacacttctagtttgtgcagagtgacttctctattacttttcctcagcctcaaggattttcatgccattatctattaattgcacgtcacttattttggggataattagaaaaagggggaatgagaggttgggaatagaaaaagggagagaagcaaagggcagaaaagaaatggaagcttttgctttgaggtcttgtgggggtgggggtggaaaaaaaagtgtaggagaagcctgagcccaaaagcttgcctcctccctctacagggaaagggagttgagcggagtgtaagagggtggatggcatgcgcttctgacctaccaaagcatctggaaatttcagactgctctttgtctctgagactgtgttgggcacagcattgaataaagtgtggatcaataagtatgtgaagtgctggatatgttaattcactggatttaatcattcctcagtgtatacatgtatcataacatgtacgatgtaccctgtaaatatatacaactattgtaatttgcccattaaaataaaacaaaatataaataaaacatgagcagtgatgattaaaagccaaagtttcatcttaatctgtataatatctagaacaaagaaaaataattttatcggcattttattgaagctgcagaaaatgacagctttgaaaaatctcaagcaacgtatggtttaaggaaattaggtgtacacttaagctatagtttgtttgtttctccctttcctttcctttcctttcctttcctttcctttcctttccttccttcttcttccttctttccttcctctcttgtcctctccttttctttctttcgttctttctctctcgctctctttcctctctctctctctctctttcccttcctcctttccttccttgcctccctccctcccttcctgtcgctcagactggagtgcagtggtgcagtcatagctcactgtaaccttgaactcatgggctcaggggatcctcccacctcagcctcccaagtagctgggactacaggtgttttgccaccatgcctggcgaatttttaaattttttgtggagatgggactcgttttgctgctcaggctggtcctgaacttttgagctcaagagatcttctcaccccacctacctaactgttgggattacaagcatgagctactgtgcccagcctcttacctgtagtttctagtttaagaagttttagaagaacattgatattctatccatttagagtagtgttttacttttattagtggctatagaaactataagaactatagaaaagttatagaaacttacagttcttataggaactctaagaacgtttatataagtctgcccaaggtcatgtgtcctcatgaggatcgtaagctcctcaaatgcaagttgatgttgggaagggactaacgaatcacccagagtgctccttcactctgattctgagggagtctttattgtgttgtgtgaagcgtgttggaagccaggtgtggtcgcacgcacctgtagtcccagctactcaagaggctgagatgggagggtcgcttgagccgcagaggttgaagctgcagtaagctatgattacaccattgctctctagcctaggcgacagagcgagaccctgtctcttaaaaaaaacaataaaattttttactttttgtagagatgaggtctcgctctgtcgcctagtttggtcttgaactcctgagctcaagtgatcttcctgcctcagcctcccaaagtgctaggattataggcatgagacactgtgcctgacctaaaaaaaaaatttttttttttttttggctcacacctgtaatcctagcactttgggaggccgaggcgggcggatcacgaggtcaggagatcgagaccatcctggctaacacggtgaaaccccgtctctactaaaaatacaaaaaattagccgggcgtggtggcaggcacctgtagtcccagctactcaggaggctgaggcaggagaatggcgtgaacccgggaggcaaagcttgcagtgagctgagattgcgccactgcactccagcctgggcgacagagcaagactctgtctcaaaaaaaaaaaaaaaatttgatgtgatattatagaaatttaaaattaaagcaatgtcaaaaagagtgaggctgactttttaggcaagcctttgcaaggtggcagaatattagtaaaggtccccattatatcagaatctggttgtcatttatgagttctgaaatataccttatcagttctcttaaaatcataagagagtgagtataatatttgtatcagttttcttagcatcaaaaagtacagtttgctagtggtaggcatgggtatttcatctagtctttttaaaatatcctgatttgagtggtctttggctcgtctttgcggaggttatacacagaccatccttaatttaccatctcaagtagtatacaggatcttttcccagccagtgacttctgaatcctcagagattttcagtgttccaagagattcatgtcatacaaagtgataatgacttttctattttttagaagttaataaatgaaataattacttaggtctttccgcccttcttaaatggaatagtttgagagcctctgagtataaatcgagtctacctgctggcagggcgctaatgagcatgcttatgacttggtcattccatttattgttcaagtagttggttatcataatagctttgaccagggtacagtttttcattgtattttattaagtttacatctattatggatcactggattatataaagcataaagaacactaatgttgaaattcaaattgatgaggataaaaatgataattctgtaatgcctcaagacaaccttcaccaaattcatgatttgtctttgtttggccatggttcttacacagcacatcaaattgtttctagggcctcaagaaacaaagtttaaaaatgttacattacatacatacacacaaaatatgtatataccacatgtatatacattttttacacacatatccgtatctatatctatctatctatattatatccagtttgatttattgggaataaagactatctacattcatagtatattatttgcaaagaagtgctaataagtaatgacccaatatttgttaatccatttcattatttaaaagcaaggcatgaaaataattcatttaatcaagtctggtttttaggttcaaacatgtaagtgttccaaatcctaggtcatgaaaagtattcatctgttttgtgtattataatctcagtatatttgtggcttccaaagccaggtgccgtggttcatgcttgtaatcccagcactttgggaggccaaggcgggaggatccctgcataccagcctgggcaacataataagaccccatctctatcccaccgcctgcccccccgccccatcaaaaagaaaaaatacacatacacacacacacacacacacacacacacacacacacatatatggcttcctactaaacatgatatatcaattttaaataaatactttttcttgaataattgaaataaatagtgtgggtcacttgtatgatgggataatatgaatttgtcttaaaattcatagtgaacttttaaattaatttttaatgtactaatgtaaaataaaatgtcttttagctaaagtctcttctgtatcataaatcatagaaaaatgacaaaattatttttaaaatttctttcccgggaggtttttaagataatacattcctttgaaaggagtttgtgagtcagaaaagctggaaaataaaaaggtaactgtactgatttctttacattctaatccaagtataccatggttttcttgatcagattgagtgagtctctgaactgttgatagaaccttcttcaggaaagccccatttctctagaatataccaattgcccctctggaacttttccttaaaactcatccagtggttataattatatagttacatgtgtgcttgtttcatgtgtatctcccccactggactaatctgctacatgagggcagggaccatgtctgtcttgttcaccttgtactgagaatacatttgtggtccatcaaaaaattgaggaggcaggccgggcgtggtggctcatgcttgtaatcccagcactttgggacctgggcggattacctgaggtcaggagttcgagaccagcctggccaacatggtgaaaccttgtctctactaaaaatacaaaaatcagccagctgtggtggcacatgcctgtagtcccagctacttgggaggctgaaacaggagaattgcttgaacccaggaggtggaggctgcagtgacccaaaatggtggcattgcactctagcctgggcgacagagtgagactccatctcaaaaaaaaaaaaaaaaaaaattgagaaggggagtactttattcccattatcatattttcacatcacctttcagttgggttacttttcagatgtctgctctcatttgaagtttttttttgtttgtttgtttcctattagctttaatctaagatagtattttgttacctactcttaatttctaggtaacaccttagagcttcttaagtgacaatcctatcttcttttctctaaaagtaggcttctgcttatcagaccatatgtcttagtttttaatttggaaaaaggtttttgttttgtttttttgtttgtggttttttgtttatttgtttgtttttttgagacacagtctcactgtgtcacccaggctggagtgcagtggcccgatctctgcccactgcaacctctgcctcctgggttcaagtgattcaagagaatttaaggggacactgattcatcctgttctataaaaggcacactaaaattttgtataccatgctcacctatcattattagaaacttacctgattaaatgattaggcttttattgttcttgttgatattctttacaatcatgactatgatatactcattaatgtttttaagaattccgatgagtactgtttgcatgtgttgtagaaagtgtctcattataatcctttcctttatacatctagtcagtactgagtttgatgcaaagatcctatattgaggaggtgtttggggatttatatgagaagggttggatgttgctatctaaaataaatagagtggagaagactggtttattacttcatttaaaatagctgagttcagctattgtacctgctaaggtgttttgggataaaaatacataagtcactcattggaaatgccaatataatgctgatccaaatctccccccaaataagatgattacttgattttttttttttccttgaaggaattttctcttgtgtatatatgctaaggctgtgagtcaggagtttttggcattacttctctattagctcctagtgaggaagttcagccaggggttgaagtgattactaaatcctgaggacttcccaatatctgtttttaagagtgaactaatattgtgacttctgagaactttgaaactcatcctttgtcactaccacaattctgagatccacacacttgacttttgttttgttcaatttcaaataaagcccttaggtcatatggtttggccagtgacattatataggaaaagcagatttaattccttattagcgtcatgttccattttaatagtcaggagaacattctaaatcctatttatatactgttcttacaccagtcttgatctttggttctttgcatcatttctagcagcaacatttctaattattagaaatttctaataattggaaattaatcaaggacctaattatttctgtcttcatctttgggtctctaattgcaaatgcagtattgggattgtgaatcctcagaagcttttagctttgaaaacatgaaggatcttgtcacagtgatttttggtgaggttgttcatttagggtaagtaaatatcttcccacttcactttttcccctctgctccctgcttccaagctgtttacttatacagcaaggaagtgaagcacaagttacccttggaaagcagggttgtccgtcgctcaaagctgtactgtattgccttagagacactgagaacactagtactggctggaaagttgtgcctaatctgtttacatctgctttggattgttctttggttagccaaaaaagaagtcaagttcattgctctaaagtggtagaccaaataagaaaattgcctgttgcagttgccctgatttataaattaatgccgcccgttttgctcttttcccttaccacatagacatatccagttgatgatatacttatttttagggatatcagttatcactaccttatatatccccaggctcctgatctcacctccaacaaagaattccaagtctcaaaattgatagtaagctctggtatttaagccttcctagaagacagtcatatggttcaaattaaagtctcctgctctgtattaagagaaagggatttaagttgccatttcagcctgcggacaaatgctaaccaactagggtgttgggggttggaaagcaacttaacaaattatattgagagccacttgcgagtggagaaataaatgaccatggccacatgaagagaccaacttcgctccactcatatggcttctgttgtgtaggtgtgcgtatccatcttaaccagcttcttctgtttctccctgttcttccgtaactctttagaatattcatcattttaatgttgactctgtaggtcatacatctttcccattgccagtaaataagcagtaagggatatcaagtattttatcggcatcagtacctgagaattacataaaactaactgctcagtgtttttgttcttattgttcaagatgatgtcttaaagtctttatacttaaaataaaaattttagttatagaataatgtaagcatactatagaaaatttaaacagcaacaaaaccgttttaaatattcaagctgcaatcccacctctgaaaccattgttaacattttgaatgcattttcttttgtctttttactatgcatgtttttcatacttataatcagtgtatttacaattttatatttcccatgttgctccatatagtcatcattttttttttttgagacagagtctggctctgtcttgcccaggctggagttcagtgccaccatctcgggtcactgcagcctccgcctcccgggttcaagcagttctcctgtctcagcctcccaagtagctgggactacaggcatgtgccaccacacccagctaattttgtatttttagtagagatggtgtttcaccgtgttgaccaggctggtctcgaactcctgacctcaggtgatccacctgcctcggcctcccaaagtgctgggattacaggcatgagccactgcacctggcctcatcatttttaatgagtgcacatcaagtagatgtaccataatttacctgatctaccccatattgtttttgttttgttttgttttgttttaaaagacagggtttcgctctgtcacccaggttggagtgcagtggcatgatcatggttcactgcaccttgaactcctgggctccagggatcctctggcctcagcctcccaagtagctggaactacaggtgtgcgccgcttcaccaggcaccatattgttttatgatctcaccaattcttggtattagcacaatcctcactttttctttggcatttattactgcattctaaaacttcaaagtgtgtttacttaaccttttgaacgtacagggaatcctttctttgccttaagtttctgtgttttttttgttgttgttgttcttgtttttcacttacattgaagttgtcattcttctggattttttttcctttatatttcaccagcatttggcctgctagcactcttcatcttgagccatgtgaactaaacttcagcttatggtagtctagtttactttatgtcttctggaatccagctagtggtaatgatcccaggccttgtccctttctctttcccaggctgacttgagctggagcagtacagcactccggtgttccttagagcgatatgagctctggaatggtgaaagaagattgttaccaaatacaaagtgcctgtggttttggggagatgatgaggctctgtgtgtttactggctgcttacctttgggatttgaataacttaaagattataatcagaaaaaaaatagattcttaaaaaaaaatggggagagttaagattatctgaaagattactaaaactatgtcaactttcagttatacaggtttttaaaaatattatctaggtttttttttcttcttttctggctatgttttttcatttgatagtttacatattgaaggaaaagaaggaaaacctaattttttttagtgttcttcgttaacagctcttgttagaactaaggaagcaagtgatattatagacaaaaatgaatttttaaattatatgtagtgtatactagctttgtctcttactaatatgggttactgagaaatagttattagtgtgggagtaatactaatattttcaatcatgtgactaataagcatatcactcacacctaattgccattttagcattaatgattatacctatcactaaaatatttactcttcctttaaaattatatttaatgataactggaaacttcatcattgtatatattcttcctagattacagtttttcttcatatatgaaaattgctattttcaacaaaaactttagttgagatctctgtcttaccaagtagttcccagttcctacactctgagttctgatacattcatttcctatttcaaactgtatcgctcttttcttccctttctcccaccctctctgttcttagttagtcagtgagttgttttaagatatttattgagtgctttctcttcctgtcagcactgtgctaggccctaggaaatcagtggtgagaaaaacctctgccctcaaaagccctaatgattgtggagcttagatcccagagcagtggttccaagtggcgagaaatagcagtggaggaggaaaaggagctattcttgtctcttttgtctttcatttattatgaaatattatgtttatacataaattttctttaagcatctgtgtatactttagtgaatcactagaagcaaatacctgtgtagtaattggcactcaggtcaaaaaactagaaaatttcatcagccaggctgtacacctcatcacaaccatatccttcccccaagagaaaaaaaattttttttgtacttttgtgttaatcacttatgtgctctactttataggtgtttttttttttcttttagtagttttgccactgatgtaatgcattacttaggagttttgctccaagggatgccatttatactgaatataatgtgtagtgggtccatccttaaacaatatagttttgcttgttttgaatgatacatgaatagaatcatattgattatattattttttgtctgtttcatccaacagtctgtgagatttatccatgttgtttgtatagctgcgatttattcatttttatttctatatagtattccatgatatgaatataccacaagttatttttccattgtacctattaatagctattttaaaagcagaagcccctattgctttcagtttggggcacttactaacagctgcaacgaacattcctaaacatttatcctggtatactcttaaacattagtgtgtattcttaaacatttaagagtgtaaactgagaagtgaaattgctgggtcatatggtgtgtgtttttaggttttatttggtaatgctgaactgtttccagtaggtgtgagagttccacttgctccatgtcctctccagtgcttgttattatctactcttaaatttttgcccatctggcaactgtgtaatgattatcttgttgtggttttaatttttactgtttctctttaataatgagattgagcttctttttgtgtctcttggcctttttttgtcaattgtcaatagtcttttgctcatttttctactggattctctattggtcttattgatttataggagtttgtttctttttgatagtctggatacaagtcctttgttttttttgtttgtttgttttttgttttttgatgattgattggttggttggttgttgagatagggtctcactccatcacccaggctgcagtgcagtggcgtgatcacagcccacagcagtctcggcttcctaggctcaggcaatcctcttgcctcagcctctcgagtagctgggaccacaggcatacaccaccatgcctggctaatttatatttagtttttgtgaagacgaggtctccctgtatttgcccaggctggtcttaaactactgagctcaagcaatcctcctgtcttggcctcccagaatgctgggattacaggagtaagccaccacgtccagccgagtcctttattttataagttacaaatatcctccctcactttgtggtttctcactttctgtttaacgtgtgtataaattttggcataattctaatgtaacgaagtttaccacttttccctttatgattagcactttttgtttcttgtttgagaaattcttccatcccctgaggccgtaaagatacctgctttttttttttttttttaaataaaaacgtgatagttttacctttcacattagggctataatccacctggaattaatttggggatagagtgtgaggatggcagcctctgtaatttttttccatatgaataacgagttgttcctgtgccactttttgagaaatttatccttttcccattgatatacagtgtctaccattcttttctatgcatgtttttaaaagaaacttgacgcagtattcctgaagcattatgtgtctttgggaattaacataagcagagcaaagggtggcagtcaataataaaatgaaaaacagtaaactgtaataactaaggaatttgcaagttttttgtttttttgagacagtgttttgctcttgtcacccaggctagagtgcagggtgcaatttcgactctggtgcaaccctccgcctcctgggttcaagcaattctcctgcctcagcctcccgagtagctgggatttcaggcacctgccaccacacctggctaattttttatttttagtagagacggggttttgccgtgttggccaggctggtcttaaactcctgacctcaagtgatccgccagccttggcctcccaaagttctgggattacaggtgtgagccactgtgcctggcaaatttttaaatttcaataaaaataattatgggatgtacgtgaacttaaatataaacacatacatgatgctgaaagcacaatgtggggctggattttgagggcactgagaactggcgttataggctgcatctgattcatactaatttttctttaacctttatacttgggaatgttacttttgaacctcacgtctcaggcataaaacaaaaataatgctcatctcaatgaggtaataaatacaaggtgctgtagcgcagcactcaacagaaggtcctttgaaaaacaactgtttaatactgcaaagtgcagcacaaataggaaaactgttgcactggagagatgagtcaaggacagtccagttccaagtctttctgggatacatggctccctccagggctcttgccactcacctgcatggccacgacgttcgtttctaagtactctgaatatatttgtatataacttaggattagtatctgttggttgtcatcaatcttggtaagaaatgcctaattttattcacagcttgacattgtagataactctgaatggatctggattatatttgtagtccatttctgtgatgtagcctgtctttacaacaaataaacaaaaattctgaggggaaaatgataccatttctcatcgagaataattatgtcatcatttgttttccctcagatcaaagttacataacacttggatgagattacatggatgctgtaagccacctttttctgcttttctgctctctcggcttccttgttacattttcctgactttcttcctttagccgcgctttctctctcctttttgctgcatcctctttctgttctcgcacctagggaataggaagtacctctgggtgttttcgaagccttaattctcatccttcccttttctctactttttctttcaaaaatattttatccttttactactataattcagtttctcagaatatcttcacttaaatttctgatcaccttctcaaactcaggacataaagaaaaagtaattttttttcttcccaaaccaacttctgctttccttaagtctgtcatctgctcagggccatattctctacttctccttctttttcatcccatatattctgtttgttatcaagtactgtccgctcctttcagaacatcttttgaattgtttttttcattttcaatatctcatctgatcacagccttcaatattcacctcacacctaacctaatcttgctttctagtttattttaccacttcacctgcctgctcagaagtcctagcaactccttattgcctgtaagtgtggctctcaaacctcttcagaaagaactgtgttttactggtacctttatattcacaccaaaagcataagtgacaaaaggaaatacagataagttggacctcatcaacatttaaaacttttgtgcatcaaaggacatcatcaagataatgaaagtccacagaatgggagaaaatatttgcaaatcatatatctaataagagatttgtatccagaatgtataaagaacactcacaactcaataataaaaagataaccaattttaaactgcacaaaagatttgaatagacatttctccaaagcagatatacaaatggctgaaaagcacatgaaaagatgctcaatattattagccatcagggaaatataaatgaaaaccactgtaagatatcatttcacatccactgggacagctgaattgacaataataagtaataataataaagacaataagtgttggcaaagatgtggagaaattggaatccttgtacgttgctggtagggatgtataatggtacggccactttggatagcagtttggatacttcctaaaaagttaagcagagttaccatatgacccagcagttccactcccaggtatatatccaagagaaatgaaaccatatggccacacagaaactcacataaatgttcatagcagcattatttttagtcgctgcaaagtggaaacaacctgaatgttcaacagatgatgaatggataaataaaatgtggaatgtccataccatggatgttattcagcagtaaaatagactcaagtgctgacataggcaacaacatggatgaacctccaaaatattatgctcagtgaaagaagccagacactaaagcttatatattgtatgattccatttatgtgaaatgtccaaaattgacaagtctcatagagacagaaagtagaaagcctagggctgggccattggtgaaagacttgaagggtgttggggagtaactcctaattagcacagggtttctttttggggtgatgaaaatgttctaaaatttcttctttggttttttcactgccttttccttacaaggtgaaaaatgttctaaaactgattgtggtcatcgtcgcacaactctgtgaatgcgctaaaagccgctgggcattacactttcaatgcgtgaattgtatgggatatggaatacaagaaatatgttatggccaggtgcagcggctcatgcctgtaatcccagcgcttcggaaggccgaggtgggaggatcatgtgagctcaggagttcgagaccagcctgggcaacacagcaagaccctgtctctattttattctatgtt

SEQ ID NO: 15808 - DNA, 63220 bp, Homo sapiens
gttgctatcaagatcatagataagacccagctggatgaagaaaacttgaagaagattttccgggaagttcaaattatgaagatgctttgccacccccatatcatcaggctctaccaggtaggatcattagtgtatagcagatagctgcaaagaacccagaatattgtatgtatggctccctttgaagaaatgtgggtgggtgaacatctgtgactttttttgtttctatgttaatcctgctatctttcctacccttctgtttacgcgctcagcacttagtatcctcaagtttcccctggccatttactagtacgttttccttacccaggtaggtctttttaatttgttctttaaaatttgatgccattcttagcaacaactacacaaaatgttaattcagaagatgatgagaatttattttatttagttcagagttctaacacaggatgggaaactcaaaaagaagagaatttagagaggtgaaaagttagagatgaatataacatttttttaatagcattatttgaatactagtttctgtgatcatgttataaattgttatggcaaaggactgcttcttggatcaatcaaaacctacctcttttctattctaataggattgtagacttagttttccaaggtagtaattattttgataatcaagagaccagatcaagtgaccagatctctccaataggagagatttctattttagttttttttttttttggtcttcccaagaaacatgcatatttcatgccatcatcaaaatgattccctagcataactacaaaagcagtaaatctgatggctggaatttcaagcgggataggaggagaggaccttgccttagcaggctggtgaaagagatattttgggagaggtggggcttcgggatgcttctcaaattgcaatgtgttggcagccgagaactttgcctctgcataggcccaactctacttgctgctttctgccagaacagccatctcttagttctgaaggacgtggccacccacttggttattttgctgctgttagtctgcagtaaatggttactggcccagacataggaccatgtgtaaaagtggagaaagtacacccaaggctctatgggcaagctttcgtagcctcttagttttatggaaaagaaaacatgttgtgatattaacatgtgtggttaaaactacagcgttagagctcttccctggcatcagctgctcacataatgaaattaggtcaacaggagcagacctgttgaaatttatcagcctaaattatgttgaacaacgcctaccttctgccccacaagcaaacttatgaaagcttcctggtgctgcctgaagacctatatctgtgagctcacaggtgtctaacctcagcttccttcctatcctgatgggctgaataaatttcttgaccttaccttttaaaataaatcatctttaaataattgtggggcttaggctgacctttctcaagaggttgacttatagctattacccttgtaactgaattctgcaagtttgcctgtcttacccaagattagcctatgaggatttccacaggtccagtgctagctttgagcagtgccttctttcaagctttaattttgctttctggcagctgggttttttaaattttatttatttatttatttatttatttttgagacgaagtctcactctgttgcccgggctggagtgcagtggcatgatctctgctcactgcagcctgcgcctcctgggttcaagtgattctactgcctcagccttccaagtagctgggatcacaggcatgtgccaccacgcccagctaatttttgtatttttagtagaaacggggtttcactgtgttggccaggctggtctcgaactcctaatctcaagtgatccacccacctcggcctcccaaagtgctgggattacaggcgtgagccactgcgcctggccggaactgaatttttaattgtatttagttttaattaatttaagtgtaaaactaaaaataattttaaaaagaattgttgaaatgatagtattttggatatattggggtaaataaaaagtagtattagaattatcttcaccttttcctttttcctttttaaatgtggctactagaaaagttaaaataatatatgcagttcatattatatttctattggacagcactgttgtagaaagatatacaataagcagagaacagtgttcctctggggattgagatggaggagattgggaagaggaaagcctttggtcttttgttttataatgagtgtatgtaatcattattacttttaaaaatgtttgatggaaaatgtaaaaaggaagaaaggactgacaacatactacaatgaattttaaaaaggagcaacaaagggaccaagacaaaacacaaatcacttacgttactttaaaaggttgagtattttaaattactgttctctttttttcaaataaatgggcagtggaaaggaaagttgtcatttctataaaaaaaagaaagacatatgtgatttctgtggcgttcttatgtgactcccattattttccccaaaggcttctttttgctttagtttttttttttttgatttgatagggcatttttgtgcttcagatgattgatgttgaatctgaagtttaagttttggttcttgacaacttctttgcctctcagttttatggagcttaagagattgcagagacctcatggaacatcaaaaagcctatctctctcaagcaataaatgtttcctacttttaagaacttggaggaatatctaattttccctttcttcttaataacatttatatttgtttccccaaaaatgttttaaattttctttaatctatagtggttattaatatttcaaatgagaaaagaggagtcattagtttatcttcctgtatcagcctgtcatttgtgtcactgtctgtcactttcctgcctttgcaccaggttatggagacagaacggatgatttatctggtgacagaatatgctagtggaggggaaatatttggtaagtacatttattgcattctttaaacagctattgagcacactatggcaaacctaaaatagctgttcagtgcctttgtcacttgagcagcagtcacttgatgctgttcttcaatcctgccattttctatcaacaaaggcattttaatttgttttgattaatctagtaaaatccctttaacacatttgtttccttagcaaaggtgttttgtttatttcagtcaggcgctgacagttgagattaaagatctccaaaaacaagcatcctttctgaacgtgggacttagggtctttcctgtttgcaggttttaattgaggttaccaagtgcgacagaactcacacaagtgtgtgggcctctgttgtgtcagaaagagccacttagagcacataatctcacccgagtgcgttccttaaactttgtttaaatataacatgtaactatattatttaccatgtgttcacagttcccctcagtaattcttgtaattttgggggttctgccttcagtagctatattttcctctcacacttagctttagcacaatgtcagaaataagcaagagactttgttactgacaaatctgatttttaagatgctaaaaactgacaaaacgattttttttctaacagtgataaatggagccaagtagagttaaagggtaaacttccaaatctaaattgatgtgtcttttattttttcttttggcaactaactacagagaaaagtttctttatatactttatttgtctaatttcctcattttaaaaaaaatttatcaatatgaacacttgctagtttaaaattttttaatttttattttaaacatttgctccttcctgcacgataaaatgtatttaaaagcatagaatcacttttaaaatgaatcttcttattaatgactagtcagttgtggctgcatggatgtgtgtgtgtgtgtgtttgtgtttttaaagtttccctagcgatctagtgtttttttgtgtgtcaaagtatctttagggtaagtgctagtcctttttaaaagaggtatcattatttcttaattttatatttaattggctttgtatatgtgattagttaatgtcaaagctaatggtgatagaaatttatactcaatatagtatgggaggggatactttattttaaagaaatgaaagcattacaagatttgaaggatagcattgtttgtcaagaaggtatagtaggccttcactatgtatgataattatatgccaatcatgtgccttggagatgctgactcaattaagacactggttttcctttccgtggagaaatctggtggaaaacagacagggaaatcaacatattactttgaagatgagaatggaaactgtaaaactctgtatagtagagaacagtagtgcagatggcagtttggttaactcttggagatcagggaaatcttcctggagggcatggttatatggaaatttatgaaccagaaaatgaaagcacaagagagaatatttggagagagagaaatagcagtcatgttattgggagactatactatggtctgacattccaggcacatgttatgataaacctgccttaattaagatcacaaatgtatacaaaggcaaatagaaaactttcattatctagataaggttttttctttggacaaggtattgctctgctgccctggctggaatgcagtggtgcaatcctagctcactgcagcctcgaactcctgggctcaagtgatcctcctgcctcagccatctgagtagctgatactatagctgtgcactagcatacctggctaatttttaaatttttagtagagacgggggtctcactatattgttcaggctggaagatacctttttacaagttttattctataaaaagtcaaacatctcccaaatccttgagctgcctgttaggtattttatttcatagaacgacatttattggtggggaaacaatggtaatttggggagaaaaaagatcatgtcatcttaatgtttgtaataaaaaaagacccaaacacagggcacatcaatctaccttactctttaagaaagcagattttatttatttatttatttatttatttatttatttatttatttattcttttttgagctagggtcttggctctgttgaccaggtgaagtgcagtaacgggatcacagctcagtgcacccccagcttcctgggctcaagtaatcctcctgccttagcttcctgagtagctgggactgtaggtatacaccaccatgccaggctaatttttaaatttttatagcgattaggtctcattatgttgcccaggctggttgtgaactcctgggctgtagcaatcctcctgccttggcctcccaaagtgttgggattataggcatgagctactgcacccagcaggaagcagtattagagagatccgtttcttggtcctggacttcatgtgaatgtacctcaagggatgaacaaacagaataccacttctgataatgttattttaaaaacaaaatattttaggttggtgaaaaagtaattgtggcttttgtcattgaaagtaatggcaaaaaccgcaattacttttgcaccaacctataattatatattgtaacacatattatgtaatatataacaatagaatttgaaatgttattattgatactattaagtaatattattataaaagatccagatgtggaagaaaatagtgtattacctaaagaaattattgagactgcacagggatagaactgtctcatgagctctgatttttaaaaatgtctgtgtaaaaaagatgaaaggggcttagtcaagaaaacctgggctttggatgtatttagacctaggtttgaatcagatctctgtcacctatttgcccttttacttagagcaaattactagatgattctggtgcacaggttccaggtctgtataaggtaagatctagaatatttgtattatagttgtgaagattaaatgagatcgcatatatagagctctagcacagtgcttccttacgccttcatgtgagagagagatcaacttctgccgtcaaggtgtgaggagctctgctgacctgccttgcttgctgaaacaagtgaaaactattaaagaaaacaaaacccagtcatttaaagtctctggaaatcgtcctaagagtaagcagaaaatgaaggaacattattcaagaacatctgtgcaaattcggtaagaaacaaagtctggtcagcaaggtggaaattcccgtccaggctactgcagccaagaacgcagggcttccttctgtcaaaagacaaaattgcaagtttagtttgatgatcccagttggctttatttgcgattctagaatcggacaacatttcatttcatagaataagtgttccagtaagttgagcagaagagtttggcttatggacagaagggcttaagaagtctgaacagtgtattggttacttttaaacagaacaatagaaaattaaccagttaacatcaggttacttcgggctaccttttttagtaaggattaaagcagagggaacttcatcattgtgccagttaaagattttagactgggctgtttgggaaattggctgttatctctttctcctgatttctcaggtcagataacaacctagttttcgctttggaactttagcatgagtgactccattttgatatttagtttggtctgttggtgcctagtgcagaagtttattcgaaaacaatggtctcctgtaatttttatttgtcacttctcctcaattctctccagcatctgaatagcagctttcttcccaggaggatttggacatcagcaattctcattctgccccgagctgcctattgctgagtcctggagaagtgcagttaagagatgggggccccttcttctactcagcccccacttgtggaacttgatcaggtatgccgagaatactaggacccagatcactcttgccttgggtattaagacagtggtttcactgtcttttgctgctaggagaggcaagctgagaggaccccaggctgctgtcctcccccgctctccatccaccaaactctcagttcctagagtgggagcgtcactcagagaagtttgctgttgtccccaaccccagctccagagccctaactctgagatttttacctgtggagaaaaacaaaccataaaacagctcctaatttcttcccaaaggaactgacttcatttgcaacagggagtgaagaagttcaaacctgattgtactctcaagaacagtagagggaaaagaaaaaagaaaaagaacagtggaggttgtggtaaaggacatttgagaagagattcatgaaacaggccaaatggtaggtttgctagttcgcagggggagaaccaatgaattaatttagaaagagcttctctgggattagaatgaaaataaatcactggctgggtgcacacctgtaattctagctattcaggcaggaggatggctcgagcctaggagttggaggtcagcataggcaacatagggagaccctgtcttaaataaaaacaaaaataaaacaaaaaaacactgatggcaaaaattatttcttcaaaggaaccagaatttgattgtattgtttgtagaccaatttgtgccccagggcattattcaaaacaaaagggcaatcagccagcaactagtggagtttaacggctgagtatggtcagtaaatgagaggaagaaagtcctagcaaaaacactgtgatcccaaggtaactaactgtaggcataccgaagctgcctgttccagaggaatcacattagaggctgaacactgtaaatatggagaaataaacttcactagaagaatctagcttttagctgggcatggtggcatgcgcctgtagtcatagctccttaggttattgatacgagatctttctaactgtgggcattttacagctataaatttctctctaagcatgctttggctgcatatcatgagttttagtatgccgtattttcattttcattcatttgaaagtattttctgaattcacttttgatgtcttgtttcattatttatttattagtgtgttgtttaattttcacatatttgtgaatttcccgaatgtttcctactcttgatttccaatttcattccattatagttggttgtttttctatcctctatttcataatttctgctataatatttgttatttccttctttctgcttgcttcagttttagtttgttcttcctcttctagtgtcttgaagccaagcagaaagaaggaaataaagattatagcagaaattatgaaatagagaatagaaaaacaatagaggatatcagtgaaaccaaaagatagttctttgaaaaaatcgacaacattgacagatctttagctagattgacgagagagagaagagaaaaagagaagactgaaatgactagaatcagaagtgaaagaaaggaacattactacagtcccttaagaaacaaaaatgggctgggcatggtgactcacgcctataatcccagcactttggtatgctgaggtgggaggattgctttagcccaggagttcagtaccagcatggacaacatagtgagacctcatttctactaaacataaaaaattagccggatgtggtagcatgagcctgtggtcccagctacttaggaggctgaggcaggaggatcacttgagcccaggatgtcaaggctgcagtgagccatgattgtgccaatgcatttcagcctgggcaacagagcaagaccctgtcttaaaaaaaaataaaaatgattataaaggaatattatgaacaactatacatcaacaaatcagctgggcttggtggctcatgcctataatcctagcactttggggggctgaggtgagtggattgcttgacctcaggagttcaagaccagcctgggcaacatggtgaaacaccatctctacaaaaaaaaatagaaaaattagccatgcatggtggtgcacacctgtagtcccagctactcgagaggctgaagtgggaggatcacctgagcctaggaggtggaggttgcagtgagctatgattgcaccactgcactccagtctgggcaacagagtgagaccctgtctcaaaaaaaaaaaaaaagtcagcttagatgaaatggacaaattcctagaaagataccaactgttgaaacaactgacttaagaagaaatagaggccaggcacggtggctcatgcctgtaatcccagcactttgggaggctgaggtgggcagatcacgaggtcaggagatgagaccatcctggctaacacggtgaaaccccgtctctactaaaaatacaaaaaattagctgggcaaggtggtgggcacctgtagtcccagctacttgggaggctgaggcaggagaatggcgtgaacctgggaggcggaacttgcagtgagccgagatcgtgccactgcactccagcctggacaaaagagcaagactctgtctcaaaaaaaaaaaaaatacatacatacatacatacatacatacatacatacatatatatatatatatttccctagctaaagtaaaaaatggtgttctggttgcaaattgatagtctttacttcatttgacctctttgtagcatctgaattcttgactgtttccttctaaagctcttagttttgacttccacaaatgttcaacttctgattcttctattgttcggactgttccttcttagtatcttttgctgggcctcctttctctgactgctagaacatgttgacatgttgtagcatattctctgactttatatatatatataatatataaataataattatatataaaatatataaataattatatattgtatataaataataatttgtatataatatattatatataaataataatttatatataatatattatatataaataataatttatatattatatatatatttttttgagacgaagtctcactctgtggccatgctggagtgcagtggcgcaatctcggctcactgcaagctccacgtcccaggttcagaccattctgcctcagtctcccaagtagctgggactacaggcactcgccactatgcccggctaattttttgtatttttagtagagatgggttttcaccatgttagccaggatggtcttgatctcctgaccttgtgatctgcccgcctcagcctcccaaagtgctgggattacaggcgtgagccaacgctcctggcctggctagggaaatattaataaaatggcagaggtggagacagatgttaaagaagtggaggcattgggtgctattttgagaagcattgctctgaaggaaagaagggagaagacagtagtttgtacaggaagcaaggttgttgggagagagttctccacggatatctcacatttcttcatgtttcatgagtaaggcactgactgcctttgttctagactgttttctcaaggatgtttatatagtgagcacccttgaaagacagagatagtatctccctccacagctcaaagatctgtttattgcccagtgtgaaagattccctaagctccaagctcagggttcctctcctataatggacccgactgtgtgtgtaggcgtcatctggtcccctttgcagtgccctgtgaaaattagggcttggggaactgaagcaaatatgttgatgttcatgctgcttgctgtgccgtaagtgacaaagtcttttgtctctgacagaggggtttcctatcttctgccatcacccatgtaattgtggcaggttgagttattagcttgcagaaatggtgagatctcagaccctcttgatacttgacaggaaataaggaggggtttgttttattttgattcgtttaaatatgagacttgattacaggttgaggttgaagatgcagtagtggggaagatgagtttgaaaataattgatatggaaaacaatctctaaagcaagatcaatgaggaactgagggatgagcataattgcaagaaattagccttgcacatgaagaaggatagaagataaaggatgcatgtgggtgtaggcaattttttaggtagaagaatgtgaaaaagatgtttcatgcttttcatataattttctattgagagtagcagattatgttatcagatgaattaagggtgagagggtagagacctggatcagcatggagaaagtgaaattagctgcagggaggaatgagagagagggcaattaagaatagctaaataagttgattaaaggccttagagataggaaacagttaacttgttattccattatacagaattgagtgatttttttcccctaccaccaatgctcaattacctgtgtgtaaattgaataagacagacaattggactgatcctgtttagagtttacaggacatgtgcaaatgaagaggcaacaggtgacaagggttttgaggccactagcaataatgtaattaaagtgtgggcttttgggcttaggctgaagtgggttgggaaggcaagtgagaccaggatgactgatcttaaataagaatttttaaagctggctgggcatggtggatcatacctctaatcccagcactttgggaggcccaggcaggcagatcactggagcccaggagtttgaaaccagcctgggcaacatggagaaattctctgttatttaaaaaaaaaaaaaaaaaaaaaaaagaattcatgaagctacaggtctagatgaagttgaaaagcaagtgtgttagtgtgttgggcatatgaaggttggagagatgaaagtctaaaactacactgcccaacacgacagccactgtccacatgttgctgttgtgctcacgcctgtaatcccagcactttgggaggctgaggcgggcggatcacgaggtcaggagattgagaacatcctggctaacatggtgaaaccctgtctctactaaaaatacaaaaaatgagccaggtgtggtggcggacgcctgtagtcccagctactcaggaggctgaggcaggagaatgttgtgaacccgggaggcggagcttgcagtgagtcgagatccagccactgcactccagcctacgggacagagcgagactccgtctcaaaaaaaaaaaagaaaaaagaaatgtagctagtgcccctgaggaactgagttttgaatttaatttacatttaaatttaaaaactgaggtattatgaaaagttttaggccagctgtgagagttagccaactacagactaagagagcatagtctccaagatcacccctcactctgctgtcacctacaagttcaggaaattcccaaaaccggttcagtttgataaatagctagaaggattcacaaaattcactgaaagctaatatactcccggtttggtttaatacaggtaaaggatacagattaaaatcagccagggaaggaagtgcagagtccaggagaagtacgaaatgcagaacttttgttgtcctttccatgtggatacaagatatgttacactcctggtattgatgtgttacattgtgtacagagcagtacccatcagggaagctcagcccagcctctgtgttcagtgtttttattttacataagcctgattgattgattgattgattgctcacatgattgatctgtgtgtctcggtcaactgatgctcgtgacccaaagcccacacgtcaagtcacgctgttgtgcagccaacaatgtatatccagcctctaccctgagactatatgggtgtggcgaatcccagcctaaatcatgttattagactctctggcatgacccaaggctcccagacagagacactccgagcagacataacattccaagaacccagagactgcttcccagaagccaagggaaggccaggccttctctttgggtaaggccaagttcttcactctgcagagtctaaaatatttttctattaaacgcaactcttattttgataaaactacattacaccttggctatagacaacttagtattttagttgtgatacgcttataaagtataaaatacacagtggattttgaagacttactatgaaaaaagaaggtaccctatctcattgctattatttttattgattacattctgaaatgatcttttgatgtatttggttaaagtaagttactgattttcaaaatgagtgctttttttttttacttttaaatgtgattacaagaaaatctgaaattatataaatggcacacattgtattttatttgatagtgctaatttagaaggttaagataagagagggggaagtttagaatttcagagttaaaataatgtcaagcaaagacaagttcaagatgtggccataggaatagttgctatacattggtagagttctaggtcaccggagagaaagaaggctaaaggaaccatgaagcaaactgtcaaataagttatcctcattgatgttcacattccctaggtgatggcagaatttgagtggagggcgcaatagactacaaactaggtttcggtgagtgtctttgatgaatgtgaaggcaagagaggcagaaagggagtataccagctgcccaaacatatggcgtagtattgttagtggagaccttgaagaggttacattaattcctaatccctggtggaatattgtccctttttacctcaagaggcctgtaaaggaattgctagtcttagaggagttggttggaaaagtgattatcaatgggaggtgttggccccgatgtaaaagccctgctgcccttctttgccctctttgtccctccttaacttttgtgacccatctcaaatgttattccccctgtgaactctgctctgattttgccaaatagctaattacctttttttcttcactttgaacatacctctcctatagcactttttgaagtaattttttttttcatttctaagtttgtcttttactggtaatttagactctggtccatttctttttcctttgactattttccaaggggcttgattgaatccatgaatgtggtgcccacagatagagagggaagactatatatgctgaattcaatcacttatcaccacctccataactaccaatctggtctaagccaccatcatgtcttgctaagatcactgcagtagcctttaaatagtctctctgaatctgccctgacttcccccccgattatagctagaaggattcttttaaaattcaagtgggaccttaccactgagctacttctgttggctttcccatctatttggaataaatttataattcctactatagcctataagattatataatttggtctcctgctgtctctcaccacagctcctagcactctcctcctcacatcggcatctttctttttcattaaacccttcgctgtgctcccgctttaagaccatatattccatttcttcttcctgaattactcttttcctacatatccacatggctgtctctcctgtttcttgccagtctcttatcaaatgttatctcattagagaggtgtttgctcaccatgctgtctaaaatctcattcttcctactggcccattgctctgtagtctctgtcttgctttacttttctttttggtttttatcatgaactgacatatatttatttgtttttttactgtcttgagtcaataaaatttacgtgccattaaagactttgtcatttttgtttcctaccaaatcttcaatactcaaaatagtgcctacagggaatgcatgttccataaatatttattgataagttgaataaaatactaagtgaatgaaagaacatcactggattgctgattatggcgtttaagttttattcatctgtgtcttccttgtttaatgtagtgtctaacatatagtaggcactcagtaaatgtatttcattgtgtcataatgaaatataactaagtcaagcatggaatttgcatgttatttaataacatcttagttaaatgagtttttgacatggggaaagcaccttttttgggtaactgtatagagaaagacatattgaagattatgaattctaagcagtgtaataaatagacttcagtaattggttatttcatgaatatttactactcattcaattgacttatccagtttatttttgcatactattcagccttatattatgaaggagcagtgatgacagtgtgggtttatttaatgttacaaacagaattgagaaactggttagttttgtaaaccactaaatttataatttaaaacttccacactctgatatctttagatatatatccccaaacttcctatttgagaccatgaagtcataaatccagcactttatcaagcaaaatttcctgaataccaggcagaactcatgggcatttaaaacaaattactaatttaagaggagtctgttgaaatgtgtatgatttattatgaacattctcagtgtcttaaaaataatatttcttaatggtgccaacatgtatggaaccctgaacttctcacaaagccattcatttatgccataggtcactcaaaaactattaggacagaggatcagaaagactaacttgcataaccattgtgtacaagatactgtgttaagtgtttcacataggttattttatcttgtgactgcctggaagttcaagaatacaacacatttgtttgaacactactatgtactggtttgttgtggctttttttttttttttacatgtttttatttaatccgcagcatcctttatgtcttcacaactaaactaccattttcccactagtttatttactcctttgattattaaaaaaggtattttcggccaggcgcggtggctcacgcctgtaatcccagcactttgggaggctgaggcgggcggatcacgaggtcaggagattgagaccatcctggctaacatggtgaaagcccgtctctaccgaaaatacaaaaaattagccgagcatggtggtgggcacctgtggtcccaactacttgggaggctgaggcaggaaaatggcctgaacccaggaggcggagcttgcagtgagccgagattgcgccactgcactccagcctgggggacagagcgaggctccgtctcaaaaaaatcaaaacaaaacaaacaaacaaacaaacaaaaacttagctattttctaagggtctcctaacaagcaagtaaccatgctactgaactttagtcactctgaatcaaaataattgacttgtatttatttccctaattaatttcccatttattattattcattttttgttctgttttcttaatatcagatatgactaacatttattttatttatttatccttttttttttttaatgcccccaccaggagtgtgcaagtggagagatgcatggatgaaggaggggagctggcgggggtgggtctgtgaccagcatttatattgtaactggccaagatgtatgaggaagccacctgtgctttgacctcactttacactaaaacattcatttatagtctgatcatccagtcatttctaccatgacataaaaataagagccccagagaacaaatcaaattatttttgctgtattgagtatatataaatcccaaagggccaggcatggtggctcacttctgtaatcccagcactttgggaggctgagatgggcagatcacttgagatcaggagttcaagaccagcctggccaacatgttgaaaccccgtctttactaaaaaatacaaaaattagctgggcgtggtgacacacgcctatagtcccacctactcgggaggctgaggtacaagaatcacttgaatatgggaggcagaggttgcagtgagccaagatcgcaccactgcactccagcctgggtgacagagtgagactctgtctcaaaaaaaaaaaaaaaacaaaaaaaccttaaaggaatatttttgcctggctcctacattaacatttactttctctgaaaatcataaccctgtgtttgttattatccagtgtctacaaacagcccagcttctatagttaggtaaagtaaattcaatatcagttgttctttcataatcaaaacagaagtctacaatgccattcttacatacaacagcattgacagtaattccttactatcatgtaatagccagggcatgtttagctttctgcagatgtttcaaaacatcttcttatagtttgtacaaattacgatgcaagaaatccatacatccattgagttgaaaaatgtctaaattttttataatctaaatttttaaataatctgtgacaacctcatctcttccctacaaacatttactttttttctatgctatctatttatgtaagaaactggattgtcttaaaaaatgtcctacatttggaatttggctgatcatatatttattgtgtcattcaacatgttcctgtagttcagtgtttcttggaaagtggaagttatatttaggaatttgcttagttcagtttttggaggggaagcaggagtgctccatagttttttattgcatcacttcaagagttgtataatatctgattttcccacttttagtgatacttagaataatcttcaggtatagttattgttcaccaaattgatcctttataaagtttcccatcagtcttttacgtaatgttttatctactcctgtcatttagttgcctagctatttcattagaagttgcaaggccgggcttggtggctcacacctgtaatcccagcactttgggaggccgaggcaggtggatcacgaggtcaggattttcagaccagcctgaccaacatggtgaaaccttgtctttattgaaaatacaaaaattaaccagccatggtgatgcacacctgtagtcccagctacttgggaggctgaggcaggagaattgcttgaacccaggaggcggaggttgcagtgagctgagtccgcgccattgcactacagcctgggtgacagagtgagacttgtcttaaaaacaaaacaaaacaaaaaagaagttgcaaaatggtgattatttgaattctctcattcattcaacatttatgagttattcttcttctgtaaagaactttgccttataaactacttagaaattatagtaatgacaagataaatgcttgattctttcttttccttatgtatcagtttttagaataatgaattggttctctgcaatctccagtggagactaaggaagttggttttctattttgtaacataattatgcaattatggattttagtatattttatgtgcttcagtccattaagtcattcttcttttgaaactgaaattattccacttagccagtgggagcctggagcctcttcaggctgactcctgtgtccttttgatgtgagctcaatagtctttgatatttttgttgcttttaggcaagatgtcctatgcttatcttgaacatttcctgtaccagacatggaatcaaacatttctcctaggaattctggtttggtctcctctcctctcctctcctctcctctcctctcctctcctcccctcccctctcctctcctctcctcccctctcctctcctcccctcccctcccctcccctcccctcccctcccctcccctccccttccgtcccgtccccttcttttcattttccttttctttttctctccttctcttctcctctcctctcctctcctctcctcccctcccctcccctcccgtcccgtccccttcttttcattttccttttctttttctctccttctcctctcctctcctctcctcccctcccctcccctcccctcccctcccctcccgtccccttcttttccttttccttttctttttctctccttctcttctcctctcctctcctctcctctcctctcctctcctctcctctcttctcccctcttctcccttcccctcccctcccctcccctcccctcccctcccctctagatagagtctcactctgttgcccaggcgggagtgcagtggtgtgaactcagctcactgcagcctccgcctcccaggttcaagtgattctcctgcctcagcctcccgagtagctgggactacaggcacacgccaccatgcccagctaatttttgtatttttagttgagacggggtttcaccatgttggccaagctggtcttgaactcctggcctcaagtgatccacttgtctcagcctcccagagcactgggattacaggcgtgagccaccgtgcccagccaactctggtttctttaaatggaaaatagcatttaaagaccagaatttgggcctcagggatgctcgttagtgctactgggttattattgcttagaggaggggacagagctatgaaatatatatttttaatggagaggaaaatgaaacaagtttatactaacactccaattaaaatgtaagatttcagcatttttacttcttaaatattatatctttagttctcttttcccttatgttgaaaattgtggttccagatgacgttaacatagtcacttttttgatatgagtgaggggagagactgattgattgaaaacaataccagtagtattacaaataataaggagacttgtggttctttttgttcttaggatatatcccatgaagaattgtcttagtctatttgggctgctctagcagaatacttttaactttatgtatagttaggtattatgtaccgtaatctactgattttttacaggttgctttcaatttttagaaatgttcttctatttgattcaattctgaattgtttcagttatgtaagacattacttgtttccaaagttaaagctacaaaacaaggtgcattcatatgtctggcttccacaccttttccgtaagtaaccatttatttaacattattccttttggcaaatctaaataaatatatgcatatacatacacatgcatatttgtattttcccttccttcctacacaaacagaaacacactctacatatttttctacgtcttgcagtgcttcatggatataaacccatccatggaccaaaaatccatgggctaggagggaagacacacaagataagaaattactgtaatataattgtttgctgatgtcatagaggcagatagattaaatgtcattagacacaaattatggagcagtttttctagggcgggtgagtaggttagggttagcttcagagaaatgacctttaagctggactttaaaggataaccttgaattccaaagttcagctggggatggggatgagaataggagacaggcattccagcaagaagtaaaaccctgagcaaagtgtacagcatgttggtgaaacagcaagtacacatgcaggtgaactatgtttatgaattagaactatatattgtaggctgtgagattttgttgaaaagttctaagttaaatgaatgacacgaccaaagaaatgtgttagaataactggtaacaatgtaaaggatgatgggcagaaagggaaacctgaaggatagagaagaggaggcatactctttaaatgtaagtcgaaaatttagcgtattttgtaagtaattggatgttaagagtgaggaagaaagaggagttgaagatgattccaaagtttctttcatggacatctagatgatggtaatagggattcaggaggagaactaggttacagcaggaagataaagagaacgttagttcaggccaggtgctgtggctcacgcctgtaatcccagaactttgggaggctgaggtaggtgcattacttgaggtaaagagtttgagaccagcctgaccaacatggtgaaactccgtctctattaaaaatacaaaaattagctgggcatggtggcacctgttgtcccagtgacttgggaggctgagataggagaatcacttgaacctgggaggcagaggttgtgatgagccgagatcacaccaccccgcttcagcctggatgacaaagtgagtctctgtctcaaaaatgcaaacaaacaaagagaacgctagttcagtttggtccatgttaaatttagatatctttcaaatttttttaaattataaaaataaagatgggatctcactatgttgcccaggctgatcttgaactcctggactcaagtgatcctcccttcttggcctcccagtgtgctgggatcacaggtgtgagccaccacacctggcctaaatttagatatatttatgatacctagatgaagtttttcagtagacatttgaaaacaggagtttggagctcaggaggttagatgactagaaacagtgaatttggaagccattagccttatgtattggcattagttaccatctcatgctacataaaattccctggagacatgtacttgagctgttccctttggaagactagttagagctaggattgcaacattttgatagtcaatattttaacaaatcgaaaggtacctctgttgacttggagcatgcaggttatactaggatctgattagaacctctgttacaggattagcaaaccaagtattgctaataccttggtgtagcatgagaaacattggtactatatgagaaaacttgaataacatttttgaaaggccttttgtaatatatgagattctatttcaaagcctacctgggtttatgcttagtctagaaatactttttaagaagccataagaaaacaaatccttccttatacattactgtgaatggacttgatatgaaaaggatggcatgttttttatgaagacaacttaaaaagtgtgtagtttacaaaccttgtttaatagcaaaatgaagagtaaaaaaagtgtttttgtaaaagcttatagtctcttctctcattggtattccttgagttaatttataataataaattaataagtattaataatcaatataattaataataatttatcattattaataatagtttaaagatagggtcttgccctgttgcccaggctggagtgcagtggcatgctcatagctcactgcagcctcgaactcctgggttcaagtgatcctcctgcctcagcctctcaacagattaccaggtgcataccaccatgcctggctgattttgtttgtttgttttctgagactgggtctcactctgtcgcccaggctggagtgcagtggcacgatctcggcttactgcaaactctgctttccaggttcaagcgattctcctgcctcagcctcccgaatagctgggactataggcatgcgccaccacacccggctaattttttttttgtattttgagtagaaatgaggtttcaccatgttggccaggctggtcttgaactcctgacctcaggtaatccacctacctctgcctcccaaagtgctgggattatagaggtgagccaccgcgcccggcctatgcctggctgatttttaaattttttgtagcaatggggtcttgctttgctgttcaggctggtctttaagtgcggggattataggtgtgaaccaccatgcctggcctaatctataattattaagtatccatcataggcagagtactattttatgtgtaataaggaggcatagaaaaaaatagttctagttccacattttcaaaactaaagcatatcctgtgataatgtgtttcacgaagaaattgtgttgtctcaaaactctcagggaaaaagtttagtttatttggaagagacagaagaaaatttagtatactttttgcttgtatgccaagtacagacttggatatatgaagacaggtcatatatgttagtgtgcctttttagattagttgggaagactcttgaattcattgaggtgagcaatagcatttagcattcattttgctaataaaatctaaggttcaggaaatagttttaataaacagggataggaatgtattcaatcatcttttgttcttttaataaatacttattaagtgcttaatatgcgtcagataccgttcattgtactagacacagtattgaacaaaatggcaagaatgcctgccctcatggagcttgttttctagtggagaagacagatagtacaccaactaagtagggtagaatgtgtcatttgttagaaaatgataaagtgcgtaggggaagtgaatatgaaattgaaatatcaggaggtaagctgacaatagagataggaaagacctctctgagaaggttatacttttgtaaaagatcatgcagctatttggggaggagcattccaagtagaaagaatagaaagaacaaaggccctgtggcaggagtatttctgctgtgtttgagaaatagcaaggtggcatatgtgattatagtagaacaaaagagccagtgaaagaaggtaaggtcaaaggtcatgagctgggaacccatccggaggttttgacagaaaaaaatgatgtgatcttatttaagatttaagagaattaccctgctacatagaaatgcagacttaattgtttgagtgtaggagtttgaggctacaatgagccatgattgggccactgcactccaacatgggcaacacagcaagaccttgtctcttgagagagagagagagagagaggaaggaagaaaagagaaaatgcaaacttatattcatataaaattctatacacaattgtttaattgttgatagcagctttctttgtaatagctaagaactggaaacaaccaaaatgtccttcagtaggtgaatggataaggaaactcttgtacatctattccatgctgtactactcagcagtaaaaaggagcaaatggggccaggtgcagtggctcacgcctgtaatcccagcactttggggggctgaggcgggtggagcacgaggtcaggagtttgagaccagcctggccaatatggtgaaaccctgtctctactaaaaatgcaaaaattagccgggtgtggtggcgcacgcctgtagtcccagctacttgggaggctgaggcaggagaatcacttgaacccaggaggtggaggttgcagtgagccaagattgcaccactgcactccatcctgggtgacagtgagactctgcctcaaaaaagaaaaaaaaaaaaaaaaggagcaaggttaatagacacatcaacttggatggatcttaaggacattatggtgactaaaaatatcaggccagtcatggtggtttatgcctgtaatcccaacactttggaaggcctaggcaggaatatcacttgagcccatgagtttgagaccagcttggtcaacttggtgaaaccctacctctaaataattagctaggcatggtggcagatgcttgtagtcctagctgcttgggaggctgaggtgggaggaggtcaaggctgcagtgagccgtgatcttgccactgcagtccagcttgaatgactctttctcaaaaaacaaacaaacaaaaacaagaaaataaaaaagccaatctcaaaaggtcgccgactgtatgattctgtttatatagtgttcttaaaatgatgaaattacataaatgggaaacagattagtggtttctaggagttagggatggtggggcatagaggaacaagcatgactgtgtaggggtagtgcaacggagatctttgtggtggtgaaatatttttgtatctttttttgatacaaaaaattgaacaggggaaaggcaagatccgtttacacatgcaggcatatatgtgagagtactcagtaatgactgagtccgaatagttgtaattgctattgtagtaattgcagttgttgttccacaaatctacacatgtgataaagtgacatagaactatacatacgcattgtacccatgtcaaattctgggttttgatatcgttctataattatataagatttaaccattggcggaaactgggcgaagggtacacgggacctctctgcactgtctttgcaacttcctgtgaatctataattatctcaaaataaaaagtttttaaaaaaagattactaccttggctgctcttttgaggagtaatcctaggaggttattgcagaaatctaggagtgaggtagttgctgttaaatgaggctggtggcactagagtggagtgaaggcaggggtgagaaatagttggattctgaatatgatttgaacgtagagttaatagaatttgctgatggataggatgcagggtgtgagagaaagagaagaatgaaagatgccataaaagtttttggcctggtcaatggaggagcaaagaaaagagatagtaacaagaagcagcaacaagtcaagaagcccggtaagaggtagttggattcttggcaagaaagacaaaatgacaaaccctcttcctctagtcagtggcagccacgcctgggagttagaggacaataggatattaaagtgactgcactcttattaacctgcttagggggagctgagttatcttggcctcgccctgcttttttggaaagaagcgtttgtttgataaacaggaagtcgtttccatgggtgtaggaagaagaaatgatagaactgagtggcaaagcaaagaactactagctgtggttagtttggaattggcagaagttttttcaggtagtcacctaagatgaagatgagcacacatactgccttttcccttttctaggctgggttcattcttcactgaaatgtggtatttctgcctattgcttgtcctgctgtcagggtatgttcattttcagctagtgttttgcatcaactatgagttgtagacttagcagacaaatggagacactgtctgtttagagtggaaaagtgacttattttaagaaatgttggctccgcaccactatcccattagtggcatacctctgacactccattgaagctggcctagggaaggtaagactggcttctgtgtatttttgctctttgaaaggtcagaacctaaatgtaccacaagatattttcttcctgagtaagattgggacaaaattacaaacagtgaattctgaagcaaacttacgtgctggtgctctaatactttagaaaattcaaaatcgatttcctgtacttctaacaatattactcttcgtcgggtatgtaaatctcttagtgtcacttacttcttttcattttgcaaggaagggcagaccaaaaagattaaagaagaccaatgccaagtcatggtcatgggaaagtgagaaagagaatttaaaagtactttttacttttttttactttgttttactttttacttttgaaaagcacttgaaacaggagaaccattttttttccttttaaccgagagtcacctcatccctgtctgggtacatgtttggagtgaaattgtggtcaaagaaaactttaaatttgtcccagacctataatggcaactaaatagataagtagttgattgatggtgaaaaaagcttagtgtgatggacttgactttatgcagcaggtgtctacttgaggtttgtttagattggtgggggtggggagggggcaggactctagctaggggcatggctgcagtgtggatgattgggatgaggatatgggtagtatttgtgtctcagtatttaggagaggtagttcactgaattgcctggaagaagcagaacaactctggagttccttgcaattggagtttatcctgacaaggttcaacgtacattttactttgcgtattgagtggattcaggagccatttggtttcatttgccttctgaaagtactgcagtatttgtaaaaatgctgtgactatgtgttaagtccaggctggtctacagctctggatttcttcactgaaagttaaatatcacatttgaacttgaagaatgtttgctgcctgcctctagagcatatacgaatataaagcagctatttgtcagcaggcagctgaaaggcgattttcagcagggagtgaaaaccactgcaggctgctggcttcctggcacacccactagacctcgtaggtttacagtgaaagcaaaccaatgggagtaggggttggggggataagatgggcaaaaatcagggcagaggctgaggtctgaatgcgattgagccactggaaggagcttgcatgtgaagagcacagtgctcccaaagagaagaaaacttgaaccctaaacacaatggctaggagcaaatatctaatgtgaacactttaaaaaaaaaaagtgatttgttccgtaagtgtatttagagtccaggggaaaaaaaaaagtgatttgtttatcttctttgtatctataactataggggtactgaaggtaactttggggaaagtattatagtttaagctgtactacccagtgcgctgttacagctaccttttaaccagaaccattaacagtgacaatcgatgtgtagaaaatcacctttaagctctgcagaatcctgaaggactttgtgctctattgactagatgtttaagtattccctatatagtattcagtggaccttttcaaaaatgtcttttgcaacatctttgaaagtgaaagttttaacgtatgatactcttaatcagagtacacgtttattcccaaatattctgttctttctttgggtatagcatgcaacagagtttacttgtatttagaagatcaagaggtgggggtattggcaggataaatgatttgtccagggacaactgatgtgtcactgtagagataaaacagaactaggctgcattccagcagcttctggcccgtataacagttttgagaactttccaatcactttaggaaaacaaggtacttagaaatttataaagactttcttaataaaagaaatcacttattttggaaattgtgaaattaatcattctgcagcatttaagaagcactttgatgtgttctggtaattagtatttactgccagacaaatgtctcttgggcattttaattaatgggtagcttggccaaatgagcttctgatggtaaaccttcataagggtttatttttatgtttctcaagaatagctgtctcttcaaagctctttaattagacaaggtttagcaactaaaacatattattagaataattaggccttgggttaagagaaatagggggtcagaggagcaggtactgttagaaaatggcctcttaaaacatagcattctacctctgatggatggccagttctttcacagcttctgttaagttactctccctagtttggacttcgtgttgtttaaagttcatagcagacctcaccggaagcctaaacacacccgagtgggagcttacttatccccacctctgacctcccagggaaagcttgattctagtccttttaactgctaagtggaagacttcttattttctcctttttcttctattaaatcgataatcttggctataacaatgacttgtatttttgagggagatgcttcaaaagccttgtgtgtggcgaacaaaaattacaataattcctttgaggatctttcttaatgatttatattatctacatataagatatgttcttaaagtgactacagtatttgcattccagaatgttatatttcttgtggtcagaatgcagtttgaattattttgcaatctgctctgtagatgggctggcatctaactccccttcttcaaccttctcccctaccatttcttgccacaagcgctcagtcttggcagttattgctagtaaatatgtgctaccctgaacttcctctttgtggtgaaggaaagatacacctgactggtcctgtgagggagtgagatgtcaccaaaacaattgtgtattctaccaaaactgttgataaatcacaatatatttatctatattccctcatttttcactttcctactgtctcaggatgcttaggatggcaaatatgtccttttcccagctagatcagttgattaaaggacagtgctcatgagactattagacatttctaacagaacaactgtatcatagctgacatttctaatcccactagctgtcatgacctatatgtgttgttggtttgataaagaactgagtcaaagatatgtatgttgttggtttggtataaacctactgctattattagaaagttcttaaagaacctgctaatccatcaaatcatttttgaatattgaggatagcctgctttatagtattatgattttatcacatgtaaattcttttgatataccttagttaacaacatggccaatgaaatgattttatttgagttggtagaaacttcacttggtttttgattgatgttatctgtaaaaattatcattttgtaagaaccatttggtgagccccataaatgcagatataaagatgtaggtatatcgctatgcactccagagaacagttaccgagtaagtgtgtttttatgtcaaatcgaagaactttgagaaagcagaaagatagtaacctaaacagagtgctctgtcgaggagttttctccccctagcagtgacgaatttctgtccaccctttccttaaatgatttaatattggggccttgcttttttacctcctctttaacacaggaaatatttctgatacttatcttcatgtgtgtgtttgctcatgtctgtgcagtcttctgcagtgaggatatgaaaagaaaggtagtgagttctatgacccttgaaaaacaccagaactctcttttcctaatgaaagtacaagtgtgttcttatgcatacttttgtataacaggatttatacttaaaatagtttggatacttattactaatgaattttgatagatgcaaaccaggactatcaatgtgttgttctctcattgctcattttgcctctttaactcactcgagagggccccttgtagccctccttaagtctaccttttgaaattacacaagtgtccaaaatgaaaactgactgtattcttcttcaacacagaccacctggtggcccatggtagaatggcagaaaaggaggcacgtcggaagttcaaacagatcgtcacagctgtctatttttgtcactgtcggaacattgttcatcgtgatttaaaagctgaaaatttacttctggatgccaatctgaatatcaaaatagcaggtgagaactgtactgaggatgtcagatagggacaaaggagcttttccttggggttctataagcaagggattatctgtttccatctcttcagaaagaactattgtgaaagtaaggacaatttaagatgaaaaaaaaaatagcctgaaaattgataaactttaaaagtacttcccctcccctgccctttttttttttttttcgagactgagtctcattgtcgcccaggctggagtgcagtggtgcagtcttgactcactgcagcctccatctcccaggttcaagcgattctcctgcctcagcctcccaagtagctaggattacaggtgcgcatcaccacgcctggctaatttttatacttttagtagagttggggttttgccatgttgggcaggctggtcttgaactcctgacctcaagtgatctgcctgccttggtctcccaaagtgctgggattacaggcgtgagccaccacacccggcctgtttatttttaatgtagtatcagctggaactaggctggggagaaagaagggaaaggtgatatttaaaatactattactttggttaacgggtccttttttacataagaaataaaatatgtaataaagtggaaaggaaaactactaaaattgtataccctctcaccttcacttgagaaggttgatttatgtcactgctgacacagagcatacttattctaaaggctgtaattgtatgataatttaggaaaaatagatcttagagtggcttataggcagtccagctttttgtcttctcaaattttactagtctgcttatctgacagtgccttgagagcacttttcactgccttgatctgttcatgcttaattttagtaaactatcagcattttgcctaatgaatacagactcaccatttactaataaaattaagtgactgcaatctatagagaaactgtaaatatgaaaataagccatttatgtttgccgacactttccggtatagcatcgtgtatccccggtctcccagataaaaggaaggacatctcatatagaaaactaaaatatagctagaatgtaattgtctagaaaaggcaaggtataaagcagttctaaggattttcttccttagtagaggtgggatttgagagtttggatttttatcataggtcaaagttacctaagggtacctttgcagggtcacaattcttctgagagttgcttttgtgtagataagcctgttcacttttacatcctggagcatcacctagctttttatatatctgaaactgacagctacacttttgtttagaactttcatatcatttataagttctttcactcctgcactagcttattacagagtacacaggaattaaaggctttctttatcttatataaaatcatgtttttcctttgctctcatgtcggttttattttctccaaagctctatagatactggtagttcccacaaaggtgtgtggcatggaaaagcctggcaatttcaaaccttcttttgtaattatttgttgtagcttcaattaaattaatactaataatacctactaaacttcacaacccttaaaactgtaataaaagattgattagtgtcttattattactataacaaattaccacaaacttaatgacttggaaaaacacagatttgttagcctgtagttctggaggtcagaagtccaagctgggtctcacagggtgaaagttaaaacagcagcaagggctgttcctcctggaggctctgaaggaaaaatgtgtccttgccttttttagcttctaaaggtcacctgcattctttagctcagccccttccttccttcactccaacctgtggcttccattgtcacatctcctactcctaattccgaccctcctgcttccctcttgcaaggacctttgtcattacattgggctgtctcagataatccaggatcatctctctcccacccccacctttttttgtttttgttttcgagacagggcctcattctgttgcccaggcaggagggcagtggcgtgatctcagctcactgcaacctcaacttcctgagtatctggaactacaggtgcgcgcttctatgcccagctaacttttgtatttttagtagagatggggttttaccatgttggccgtgctggtctcgaactcctggtctccagcgatccacccaccttggcctcccaaagtgctgggagccaccgtgtctgtcctcatctccccattttaagatctttaatcatgttaatacaagtcctttttaccatgtatggtaacacattcacaagtatgggggattgggatatagatgtatttgggggccattattcaacatgccacagatgtcactgtaaggctctttggattatagattagggtagtgaattaaaagaaggccctctggacacgcaccacccactctgcactgaccagcccacctggatagcagaggacacccccagcccccaccaagcattgaagacatagtttatttcctcatatcctttctccttgggtgtagttggggtggggaaggagggaagactggggtcatctccattccttgggctctgtgcccgagtccatggtgcaccactgtgctgcgagctgtggggcctgctgcagtgggagtgtgtggaacaccttgaccaaaggggagctttgtcttgtgtgttttgaaaaaggcttaatgaagagaatgttgttcattcttagtagtatagtttgcaattcttaatgacaaatagtaagtttcagtagaaaacaaaacaaaacaaaaagaaggccttctttatattctctagttttattttccgtccgctgacccaagattaaaaattttcttaatgctcccttggttcttgattttgaatttaggatgattttgatttagttaaagaaatttcttttttttctttttttttttttgagatggagtctcacactgttgcccaggctggagtgcagtggcatgatctccgctcactgcaacctctgcctcccccaggttcaagcgattctcctacctcagcctcccgtgtagctgggattacaggcatgcgccaccacgttctgctaattttttgtatttttagcagagacgagttttactatgctggccaggctagtcttgaactcctgacctcaggagttcaagatcctgatccacccgcctcagcctcccaaagtgctgggattataggcgtgagccaccacgcccggctgttaaggaaattttatatcctttagtttttacattgagaaactcagagtaaaaacagagattattgataattgaagttggaaactctactgaaatatttggtaaggagatttttaaagacttttctgttgttgttgttgttaatagttaaaacaaattcaaggagtcacaatgagagtgtctacctgctgatatataattacagactccggggtgctggcagccagccttgggctctctctgtgttaacacatatactttggcaagatttttaagttcattaacccaaagcgtacatttttattatttgttttaagagcaaaacagaaaaataaatgagcacctctagttttgcggcctgctacaatacctaacattagctttgctcatgcagtctttctcttatatgccatcgttactcagtttctcagtcattgcctgaacctcctttcttgcacataaattaaatagaattatcattctcacctcccagttcttttttgaacttaatggactagtgggagaaatgcttctagttgaagccaactagaacatgactaattttggagaggtaggttggatgtttttgacaggataaggtcagataggtaacgaaatcaactttaattctaaaagccaaaagtaactttcagattcctgatcttttcaatggcctcccttttggtaaagtatcttaaatgtcagtaagaagaaactactatatatgaaagaaacatgcaagagagaaaaagggttttttggttttattttaagaagttagtcttggctgggcgcagtggctcatgcctgtaatcccagcactttgggaggccaaggtgggtggatcacctgaggtcaggagtttgagaccagcctggccaacgtggtgaaaaccggtctctacaaaagttcacaaattagctgggcatgatggcgggtgcctgtaatcccagctactcacgaggctgaggcagaagaatcacttgaacccaggaggcagaggttgcagtgagctgagatcacgccattgcactccaacctgggtgagagagcgagactccatctcaaaaaaaaaaaaaaaaaaaaaaaaaaagagaaaagaaaaggagaaattagtcgtaagcagctcatctttaaaataatcgtatatgttatagtaccaaaataacttggaactaataaaactcagattaggaagtataaaagattcatgttttctgtatgccattgtttaagtgattttaatgaaaataatcatgcatccagtttcgtgtagaagatgaataaattggtctgtggatatttgtgtttacattaatttatttttacattttgtattaatgtggtgatttacatttgatactgtttgtttgttttgtagagacagaatctcactatgttgcctaggctggtctcaaactcctggcctcaagcgattctcctgccttggcctcataaagtgctgggattataggtgtgagccaccatgcccgccccttcccccttcttttttaagaaactgggttaccttctgttgaccaggctgcagtggcataatcatggctcactgcaacctcagcctcctgggctcaagtgatcctcctgcctcagcctcccaagtagctgggactacaggcatgttccaccacacctcgctaattttaaacattttttgtcactatgttcctcagcctggtctcaaactcttggcctcaaccagtcctccctccttaacctcccaaagtgttagaattatgggcatgagccaccgtgcctggcctacatttgatatttgatactgtaaaaagctagctatcacaactgtccatactagttctcttcgagagaataagtgttccctggatagatagatattagttatagatattataagttataattatagtataagttatatcttcagtcataaatactataagattcagctgagcaaggtggcatgcatctgtagtcccagctagttgagatcaaggctaaggcaggagtcttacttggacttaggagtttgagtctagcctcatagtgataccttgtctactgaaaaaaaaaaaagattgaaccattgttccactgtttatgattttttttgtgcttaattcttatttatgaatttttgttctagttctgtttctagagagaataaagcccaggtgaataactttgttttctttctggttttagaattattagtaacaaatccgtgttcttaatggcagtagcaaacctgtcttctgtagaatttttaaagagatgtttctgtcattagtaatacagaagaagccttgatcattttcagaataaagaattttacgacagggagaggtggctcatgcccgtaatctcagcactttgtgaagccgaagtgggaagatcacttgaggccaggattttgagacctggggcaacatagtgagattccatctcttttttattaagaagaaaaaagaaaaaaaaagaattttatttctaaaggcagttaccaagtctagaactaagaatttgtggaggtaatctagaatcttacttgttaacgaagcctccttgcataatggcacagaagagaaaaaagaagcgtgaaacgtgactccagccctaaagaactgaggctatatgggcagcaaacattagatctttgaaaagttggtaacaccaaaattatgctttgcatatatataatgtacttcacaaagcatttttacatgtatcacctaattttattggcatgcaaatatatcttattaaaaaagtaaaatctcttcatcttctggcacttttaactctccaaaacttctgaatttcttgtaaagagcacccaggcaaggtatagagaaccccaatgctgggaaaagagtaggattcttggcctccgacttttaacttttcttgcctgagatgtgtaaggatccacagaagagcagttgaaggactgacgaggcacaacacagctcactcagcatggagccggcatcgctggatgatagtatccttaacagctaccaaattatagttggatacaatagaagagatgttacaaggcatgtcatgactcattatcacattaattgtacagtctaattagcataggagttcagaggatgatagaagtactgtagtttgtaagattccacaagattgtcagttccacaaggactgtaaccatgtcctgtttattgtcacactcccactggctcatacatgcctgttctgtagcaggtgctccccagctttgtcgaactgaagttcaggcggtactgataaaggacataaatattgtattgaggacatggcatttgaggtgcgtccagtgtcatgtgattggatgatcaggtgtagaggagagaattccagcaagtgttaataaggcacctgtcagttgcagacactgatacaggcacgggggtacagcagtcagtaagataaccccttggaacttatattctaatggggataaatagacagtaaacacaaataagctctcatagggctgtgacaaagataaactcgagtaacatggcagaatgatttgtgcgagaggtactgcttttagccaggatcttcaaaacattccacgcagaaagaagaacaatgcaaaggcctgagagagataaattcaacatagaagaaaggggtagaagaaagtccagcatggctggagataatgaataaaatggggattggaagaagttggggtgagagagatggcaaaggccagttgcacgtggttaggatgtgggatttcatttaggttccagtgggcactgagttggagcagcgtgggcagcagtagaatgcacaaggtctatttgaaaaaaaaaaaaaaagggtgagcagctcagtggaagggaaggctaaaggagaggagtctccccgagaaggcaggagcagtagatgtttatattagattgaaatcatttgaatataagatataaggcttaattaatccaattcagtatggagacggcaaaaagctggaagctgagggaagggaagggcctcctggtaataggaaggccagttaaaggctgtgaatggtaaaatcccgcatgagggtgatggtggcagtaaacatgcaaaggaagaaaacggcaacaaattcaagagagaaagcaagcgagaatttctaggaccagataaccaatcatatgtcttgaccaggaagagggaattttgaaagatatgtttagaaataaagaaatgaaattttcttactgatggattatattaagctatcaaaaaaatggtgttttgaaaatggttaatgtattgctattcgaaagtaattttaatgtccttgtccccaaagattaagtagcaaggtgtctatatttaaaatagattgcctgagaaaaaactgaaatgtagctggcttactccctgaagaaaagttctttcaaatgcttagacgttataagaatgttctgaaaattgtggaaacattttttttaaacctaaggaagttggaaacttttgtctttaaatgtcgactcccagaatggtctccatgagatagtttccactctcgtgttattgttttagttggcaatcagtagacagcaaagatcagaaatgcaactatagaaaggccaatatcctggaaagaattttcagagcatggatttaaggtaccatggaaaattttgaccttaatgcagtgagagctagaccattttattattttttagggagaaattaaaacatttcctaactcaattgacctttcacccttagtatgaatatactgagataccatcatatagaaaagaaaggttggaaaccttggatttttgagtacccttccacagtgtgttgactgacagtgcctctgactggtcacaggaagtagttatgcaatactcattatatcaatctaaattgtatttcatgattctaatgccctctttttaggctatcattcattgcacctcccaggttgacatgtccagtgaattgagaccagagaggcctttgtgtttgtcctgaattcataatagagtctaggaattttaatagctagacctgtgttcttgccctgaaatggcatatgaccattaccaagaagcggctctaaataaccttcctgcacgttgacccttgggaaaagaaaatttgaaatattatctctcttgaatcctattcctgagactagaactttacaaatttgtattctacttaatgtcatatctatattttttaatattaagattattaacttagtttaacacagaaaaaacgttgatgttccaggaaggtgcaccctatttagcctacggtttctcgtatatcttggaacactgaagtgtaacacctgaggctgtgtaaacagaggccagcctgagaagctgagaatcaagaatttgatgctcaaccatagattcctcttactcacacttctagtttgtgcagagtgacttctctattacttttcctcagcctcaaggattttcatgccattatctattaattgcacgtcacttattttggggataattagaaaaagggggaatgagaggttgggaatagaaaaagggagagaagcaaagggcagaaaagaaatggaagcttttgctttgaggtcttgtgggggtgggggtggaaaaaaaagtgtaggagaagcctgagcccaaaagcttgcctcctccctctacagggaaagggagttgagcggagtgtaagagggtggatggcatgcgcttctgacctaccaaagcatctggaaatttcagactgctctttgtctctgagactgtgttgggcacagcattgaataaagtgtggatcaataagtatgtgaagtgctggatatgttaattcactggatttaatcattcctcagtgtatacatgtatcataacatgtacgatgtaccctgtaaatatatacaactattgtaatttgcccattaaaataaaacaaaatataaataaaacatgagcagtgatgattaaaagccaaagtttcatcttaatctgtataatatctagaacaaagaaaaataattttatcggcattttattgaagctgcagaaaatgacagctttgaaaaatctcaagcaacgtatggtttaaggaaattaggtgtacacttaagctatagtttgtttgtttctccctttcctttcctttcctttcctttcctttcctttcctttccttccttcttcttccttctttccttcctctcttgtcctctccttttctttctttcgttctttctctctcgctctctttcctctctctctctctctctttcccttcctcctttccttccttgcctccctccctcccttcctgtcgctcagactggagtgcagtggtgcagtcatagctcactgtaaccttgaactcatgggctcaggggatcctcccacctcagcctcccaagtagctgggactacaggtgttttgccaccatgcctggcgaatttttaaattttttgtggagatgggactcgttttgctgctcaggctggtcctgaacttttgagctcaagagatcttctcaccccacctacctaactgttgggattacaagcatgagctactgtgcccagcctcttacctgtagtttctagtttaagaagttttagaagaacattgatattctatccatttagagtagtgttttacttttattagtggctatagaaactataagaactatagaaaagttatagaaacttacagttcttataggaactctaagaacgtttatataagtctgcccaaggtcatgtgtcctcatgaggatcgtaagctcctcaaatgcaagttgatgttgggaagggactaacgaatcacccagagtgctccttcactctgattctgagggagtctttattgtgttgtgtgaagcgtgttggaagccaggtgtggtcgcacgcacctgtagtcccagctactcaagaggctgagatgggagggtcgcttgagccgcagaggttgaagctgcagtaagctatgattacaccattgctctctagcctaggcgacagagcgagaccctgtctcttaaaaaaaacaataaaattttttactttttgtagagatgaggtctcgctctgtcgcctagtttggtcttgaactcctgagctcaagtgatcttcctgcctcagcctcccaaagtgctaggattataggcatgagacactgtgcctgacctaaaaaaaaaatttttttttttttttggctcacacctgtaatcctagcactttgggaggccgaggcgggcggatcacgaggtcaggagatcgagaccatcctggctaacacggtgaaaccccgtctctactaaaaatacaaaaaattagccgggcgtggtggcaggcacctgtagtcccagctactcaggaggctgaggcaggagaatggcgtgaacccgggaggcaaagcttgcagtgagctgagattgcgccactgcactccagcctgggcgacagagcaagactctgtctcaaaaaaaaaaaaaaaatttgatgtgatattatagaaatttaaaattaaagcaatgtcaaaaagagtgaggctgactttttaggcaagcctttgcaaggtggcagaatattagtaaaggtccccattatatcagaatctggttgtcatttatgagttctgaaatataccttatcagttctcttaaaatcataagagagtgagtataatatttgtatcagttttcttagcatcaaaaagtacagtttgctagtggtaggcatgggtatttcatctagtctttttaaaatatcctgatttgagtggtctttggctcgtctttgcggaggttatacacagaccatccttaatttaccatctcaagtagtatacaggatcttttcccagccagtgacttctgaatcctcagagattttcagtgttccaagagattcatgtcatacaaagtgataatgacttttctattttttagaagttaataaatgaaataattacttaggtctttccgcccttcttaaatggaatagtttgagagcctctgagtataaatcgagtctacctgctggcagggcgctaatgagcatgcttatgacttggtcattccatttattgttcaagtagttggttatcataatagctttgaccagggtacagtttttcattgtattttattaagtttacatctattatggatcactggattatataaagcataaagaacactaatgttgaaattcaaattgatgaggataaaaatgataattctgtaatgcctcaagacaaccttcaccaaattcatgatttgtctttgtttggccatggttcttacacagcacatcaaattgtttctagggcctcaagaaacaaagtttaaaaatgttacattacatacatacacacaaaatatgtatataccacatgtatatacattttttacacacatatccgtatctatatctatctatctatattatatccagtttgatttattgggaataaagactatctacattcatagtatattatttgcaaagaagtgctaataagtaatgacccaatatttgttaatccatttcattatttaaaagcaaggcatgaaaataattcatttaatcaagtctggtttttaggttcaaacatgtaagtgttccaaatcctaggtcatgaaaagtattcatctgttttgtgtattataatctcagtatatttgtggcttccaaagccaggtgccgtggttcatgcttgtaatcccagcactttgggaggccaaggcgggaggatccctgcataccagcctgggcaacataataagaccccatctctatcccaccgcctgcccccccgccccatcaaaaagaaaaaatacacatacacacacacacacacacacacacacacacacacacatatatggcttcctactaaacatgatatatcaattttaaataaatactttttcttgaataattgaaataaatagtgtgggtcacttgtatgatgggataatatgaatttgtcttaaaattcatagtgaacttttaaattaatttttaatgtactaatgtaaaataaaatgtcttttagctaaagtctcttctgtatcataaatcatagaaaaatgacaaaattatttttaaaatttctttcccgggaggtttttaagataatacattcctttgaaaggagtttgtgagtcagaaaagctggaaaataaaaaggtaactgtactgatttctttacattctaatccaagtataccatggttttcttgatcagattgagtgagtctctgaactgttgatagaaccttcttcaggaaagccccatttctctagaatataccaattgcccctctggaacttttccttaaaactcatccagtggttataattatatagttacatgtgtgcttgtttcatgtgtatctcccccactggactaatctgctacatgagggcagggaccatgtctgtcttgttcaccttgtactgagaatacatttgtggtccatcaaaaaattgaggaggcaggccgggcgtggtggctcatgcttgtaatcccagcactttgggacctgggcggattacctgaggtcaggagttcgagaccagcctggccaacatggtgaaaccttgtctctactaaaaatacaaaaatcagccagctgtggtggcacatgcctgtagtcccagctacttgggaggctgaaacaggagaattgcttgaacccaggaggtggaggctgcagtgacccaaaatggtggcattgcactctagcctgggcgacagagtgagactccatctcaaaaaaaaaaaaaaaaaaaattgagaaggggagtactttattcccattatcatattttcacatcacctttcagttgggttacttttcagatgtctgctctcatttgaagtttttttttgtttgtttgtttcctattagctttaatctaagatagtattttgttacctactcttaatttctaggtaacaccttagagcttcttaagtgacaatcctatcttcttttctctaaaagtaggcttctgcttatcagaccatatgtcttagtttttaatttggaaaaaggtttttgttttgtttttttgtttgtggttttttgtttatttgtttgtttttttgagacacagtctcactgtgtcacccaggctggagtgcagtggcccgatctctgcccactgcaacctctgcctcctgggttcaagtgattcaagagaatttaaggggacactgattcatcctgttctataaaaggcacactaaaattttgtataccatgctcacctatcattattagaaacttacctgattaaatgattaggcttttattgttcttgttgatattctttacaatcatgactatgatatactcattaatgtttttaagaattccgatgagtactgtttgcatgtgttgtagaaagtgtctcattataatcctttcctttatacatctagtcagtactgagtttgatgcaaagatcctatattgaggaggtgtttggggatttatatgagaagggttggatgttgctatctaaaataaatagagtggagaagactggtttattacttcatttaaaatagctgagttcagctattgtacctgctaaggtgttttgggataaaaatacataagtcactcattggaaatgccaatataatgctgatccaaatctccccccaaataagatgattacttgattttttttttttccttgaaggaattttctcttgtgtatatatgctaaggctgtgagtcaggagtttttggcattacttctctattagctcctagtgaggaagttcagccaggggttgaagtgattactaaatcctgaggacttcccaatatctgtttttaagagtgaactaatattgtgacttctgagaactttgaaactcatcctttgtcactaccacaattctgagatccacacacttgacttttgttttgttcaatttcaaataaagcccttaggtcatatggtttggccagtgacattatataggaaaagcagatttaattccttattagcgtcatgttccattttaatagtcaggagaacattctaaatcctatttatatactgttcttacaccagtcttgatctttggttctttgcatcatttctagcagcaacatttctaattattagaaatttctaataattggaaattaatcaaggacctaattatttctgtcttcatctttgggtctctaattgcaaatgcagtattgggattgtgaatcctcagaagcttttagctttgaaaacatgaaggatcttgtcacagtgatttttggtgaggttgttcatttagggtaagtaaatatcttcccacttcactttttcccctctgctccctgcttccaagctgtttacttatacagcaaggaagtgaagcacaagttacccttggaaagcagggttgtccgtcgctcaaagctgtactgtattgccttagagacactgagaacactagtactggctggaaagttgtgcctaatctgtttacatctgctttggattgttctttggttagccaaaaaagaagtcaagttcattgctctaaagtggtagaccaaataagaaaattgcctgttgcagttgccctgatttataaattaatgccgcccgttttgctcttttcccttaccacatagacatatccagttgatgatatacttatttttagggatatcagttatcactaccttatatatccccaggctcctgatctcacctccaacaaagaattccaagtctcaaaattgatagtaagctctggtatttaagccttcctagaagacagtcatatggttcaaattaaagtctcctgctctgtattaagagaaagggatttaagttgccatttcagcctgcggacaaatgctaaccaactagggtgttgggggttggaaagcaacttaacaaattatattgagagccacttgcgagtggagaaataaatgaccatggccacatgaagagaccaacttcgctccactcatatggcttctgttgtgtaggtgtgcgtatccatcttaaccagcttcttctgtttctccctgttcttccgtaactctttagaatattcatcattttaatgttgactctgtaggtcatacatctttcccattgccagtaaataagcagtaagggatatcaagtattttatcggcatcagtacctgagaattacataaaactaactgctcagtgtttttgttcttattgttcaagatgatgtcttaaagtctttatacttaaaataaaaattttagttatagaataatgtaagcatactatagaaaatttaaacagcaacaaaaccgttttaaatattcaagctgcaatcccacctctgaaaccattgttaacattttgaatgcattttcttttgtctttttactatgcatgtttttcatacttataatcagtgtatttacaattttatatttcccatgttgctccatatagtcatcattttttttttttgagacagagtctggctctgtcttgcccaggctggagttcagtgccaccatctcgggtcactgcagcctccgcctcccgggttcaagcagttctcctgtctcagcctcccaagtagctgggactacaggcatgtgccaccacacccagctaattttgtatttttagtagagatggtgtttcaccgtgttgaccaggctggtctcgaactcctgacctcaggtgatccacctgcctcggcctcccaaagtgctgggattacaggcatgagccactgcacctggcctcatcatttttaatgagtgcacatcaagtagatgtaccataatttacctgatctaccccatattgtttttgttttgttttgttttgttttaaaagacagggtttcgctctgtcacccaggttggagtgcagtggcatgatcatggttcactgcaccttgaactcctgggctccagggatcctctggcctcagcctcccaagtagctggaactacaggtgtgcgccgcttcaccaggcaccatattgttttatgatctcaccaattcttggtattagcacaatcctcactttttctttggcatttattactgcattctaaaacttcaaagtgtgtttacttaaccttttgaacgtacagggaatcctttctttgccttaagtttctgtgttttttttgttgttgttgttcttgtttttcacttacattgaagttgtcattcttctggattttttttcctttatatttcaccagcatttggcctgctagcactcttcatcttgagccatgtgaactaaacttcagcttatggtagtctagtttactttatgtcttctggaatccagctagtggtaatgatcccaggccttgtccctttctctttcccaggctgacttgagctggagcagtacagcactccggtgttccttagagcgatatgagctctggaatggtgaaagaagattgttaccaaatacaaagtgcctgtggttttggggagatgatgaggctctgtgtgtttactggctgcttacctttgggatttgaataacttaaagattataatcagaaaaaaaatagattcttaaaaaaaaatggggagagttaagattatctgaaagattactaaaactatgtcaactttcagttatacaggtttttaaaaatattatctaggtttttttttcttcttttctggctatgttttttcatttgatagtttacatattgaaggaaaagaaggaaaacctaattttttttagtgttcttcgttaacagctcttgttagaactaaggaagcaagtgatattatagacaaaaatgaatttttaaattatatgtagtgtatactagctttgtctcttactaatatgggttactgagaaatagttattagtgtgggagtaatactaatattttcaatcatgtgactaataagcatatcactcacacctaattgccattttagcattaatgattatacctatcactaaaatatttactcttcctttaaaattatatttaatgataactggaaacttcatcattgtatatattcttcctagattacagtttttcttcatatatgaaaattgctattttcaacaaaaactttagttgagatctctgtcttaccaagtagttcccagttcctacactctgagttctgatacattcatttcctatttcaaactgtatcgctcttttcttccctttctcccaccctctctgttcttagttagtcagtgagttgttttaagatatttattgagtgctttctcttcctgtcagcactgtgctaggccctaggaaatcagtggtgagaaaaacctctgccctcaaaagccctaatgattgtggagcttagatcccagagcagtggttccaagtggcgagaaatagcagtggaggaggaaaaggagctattcttgtctcttttgtctttcatttattatgaaatattatgtttatacataaattttctttaagcatctgtgtatactttagtgaatcactagaagcaaatacctgtgtagtaattggcactcaggtcaaaaaactagaaaatttcatcagccaggctgtacacctcatcacaaccatatccttcccccaagagaaaaaaaattttttttgtacttttgtgttaatcacttatgtgctctactttataggtgtttttttttttcttttagtagttttgccactgatgtaatgcattacttaggagttttgctccaagggatgccatttatactgaatataatgtgtagtgggtccatccttaaacaatatagttttgcttgttttgaatgatacatgaatagaatcatattgattatattattttttgtctgtttcatccaacagtctgtgagatttatccatgttgtttgtatagctgcgatttattcatttttatttctatatagtattccatgatatgaatataccacaagttatttttccattgtacctattaatagctattttaaaagcagaagcccctattgctttcagtttggggcacttactaacagctgcaacgaacattcctaaacatttatcctggtatactcttaaacattagtgtgtattcttaaacatttaagagtgtaaactgagaagtgaaattgctgggtcatatggtgtgtgtttttaggttttatttggtaatgctgaactgtttccagtaggtgtgagagttccacttgctccatgtcctctccagtgcttgttattatctactcttaaatttttgcccatctggcaactgtgtaatgattatcttgttgtggttttaatttttactgtttctctttaataatgagattgagcttctttttgtgtctcttggcctttttttgtcaattgtcaatagtcttttgctcatttttctactggattctctattggtcttattgatttataggagtttgtttctttttgatagtctggatacaagtcctttgttttttttgtttgtttgttttttgttttttgatgattgattggttggttggttgttgagatagggtctcactccatcacccaggctgcagtgcagtggcgtgatcacagcccacagcagtctcggcttcctaggctcaggcaatcctcttgcctcagcctctcgagtagctgggaccacaggcatacaccaccatgcctggctaatttatatttagtttttgtgaagacgaggtctccctgtatttgcccaggctggtcttaaactactgagctcaagcaatcctcctgtcttggcctcccagaatgctgggattacaggagtaagccaccacgtccagccgagtcctttattttataagttacaaatatcctccctcactttgtggtttctcactttctgtttaacgtgtgtataaattttggcataattctaatgtaacgaagtttaccacttttccctttatgattagcactttttgtttcttgtttgagaaattcttccatcccctgaggccgtaaagatacctgctttttttttttttttttaaataaaaacgtgatagttttacctttcacattagggctataatccacctggaattaatttggggatagagtgtgaggatggcagcctctgtaatttttttccatatgaataacgagttgttcctgtgccactttttgagaaatttatccttttcccattgatatacagtgtctaccattcttttctatgcatgtttttaaaagaaacttgacgcagtattcctgaagcattatgtgtctttgggaattaacataagcagagcaaagggtggcagtcaataataaaatgaaaaacagtaaactgtaataactaaggaatttgcaagttttttgtttttttgagacagtgttttgctcttgtcacccaggctagagtgcagggtgcaatttcgactctggtgcaaccctccgcctcctgggttcaagcaattctcctgcctcagcctcccgagtagctgggatttcaggcacctgccaccacacctggctaattttttatttttagtagagacggggttttgccgtgttggccaggctggtcttaaactcctgacctcaagtgatccgccagccttggcctcccaaagttctgggattacaggtgtgagccactgtgcctggcaaatttttaaatttcaataaaaataattatgggatgtacgtgaacttaaatataaacacatacatgatgctgaaagcacaatgtggggctggattttgagggcactgagaactggcgttataggctgcatctgattcatactaatttttctttaacctttatacttgggaatgttacttttgaacctcacgtctcaggcataaaacaaaaataatgctcatctcaatgaggtaataaatacaaggtgctgtagcgcagcactcaacagaaggtcctttgaaaaacaactgtttaatactgcaaagtgcagcacaaataggaaaactgttgcactggagagatgagtcaaggacagtccagttccaagtctttctgggatacatggctccctccagggctcttgccactcacctgcatggccacgacgttcgtttctaagtactctgaatatatttgtatataacttaggattagtatctgttggttgtcatcaatcttggtaagaaatgcctaattttattcacagcttgacattgtagataactctgaatggatctggattatatttgtagtccatttctgtgatgtagcctgtctttacaacaaataaacaaaaattctgaggggaaaatgataccatttctcatcgagaataattatgtcatcatttgttttccctcagatcaaagttacataacacttggatgagattacatggatgctgtaagccacctttttctgcttttctgctctctcggcttccttgttacattttcctgactttcttcctttagccgcgctttctctctcctttttgctgcatcctctttctgttctcgcacctagggaataggaagtacctctgggtgttttcgaagccttaattctcatccttcccttttctctactttttctttcaaaaatattttatccttttactactataattcagtttctcagaatatcttcacttaaatttctgatcaccttctcaaactcaggacataaagaaaaagtaattttttttcttcccaaaccaacttctgctttccttaagtctgtcatctgctcagggccatattctctacttctccttctttttcatcccatatattctgtttgttatcaagtactgtccgctcctttcagaacatcttttgaattgtttttttcattttcaatatctcatctgatcacagccttcaatattcacctcacacctaacctaatcttgctttctagtttattttaccacttcacctgcctgctcagaagtcctagcaactccttattgcctgtaagtgtggctctcaaacctcttcagaaagaactgtgttttactggtacctttatattcacaccaaaagcataagtgacaaaaggaaatacagataagttggacctcatcaacatttaaaacttttgtgcatcaaaggacatcatcaagataatgaaagtccacagaatgggagaaaatatttgcaaatcatatatctaataagagatttgtatccagaatgtataaagaacactcacaactcaataataaaaagataaccaattttaaactgcacaaaagatttgaatagacatttctccaaagcagatatacaaatggctgaaaagcacatgaaaagatgctcaatattattagccatcagggaaatataaatgaaaaccactgtaagatatcatttcacatccactgggacagctgaattgacaataataagtaataataataaagacaataagtgttggcaaagatgtggagaaattggaatccttgtacgttgctggtagggatgtataatggtacggccactttggatagcagtttggatacttcctaaaaagttaagcagagttaccatatgacccagcagttccactcccaggtatatatccaagagaaatgaaaccatatggccacacagaaactcacataaatgttcatagcagcattatttttagtcgctgcaaagtggaaacaacctgaatgttcaacagatgatgaatggataaataaaatgtggaatgtccataccatggatgttattcagcagtaaaatagactcaagtgctgacataggcaacaacatggatgaacctccaaaatattatgctcagtgaaagaagccagacactaaagcttatatattgtatgattccatttatgtgaaatgtccaaaattgacaagtctcatagagacagaaagtagaaagcctagggctgggccattggtgaaagacttgaagggtgttggggagtaactcctaattagcacagggtttctttttggggtgatgaaaatgttctaaaatttcttctttggttttttcactgccttttccttacaaggtgaaaaatgttctaaaactgattgtggtcatcgtcgcacaactctgtgaatgcgctaaaagccgctgggcattacactttcaatgcgtgaattgtatgggatatggaatacaagaaatatgttatggccaggtgcagcggctcatgcctgtaatcccagcgcttcggaaggccgaggtgggaggatcatgtgagctcaggagttcgagaccagcctgggcaacacagcaagaccctgtctctattttattctatgttttaaaatttaaaaattaaaaagaaaaaagaataacattttataagaaaatattttatgagagacttataaaagagacattaagaatatgaagtaatatatttcgtattccttatctcaataatgctgtagggaaaaaacaattgaaataaaagcagtaaatgagtggagcatggagagtgtgtcatgagccaaaggttataataaattcataatcaagtttttttgtatctgaagtctaataaaatttttaaatgtggaggaaaaaaaaaggaaagaaaaaatagtaatggttcacaggatgaagtccaaggtcttcattctgtcatttgaagctgtattttatctggcatgatgctgctgtgcactctttatttcttgccatatgcccctacaaaccctttattgtacccagggcagtgtcttgcttgtcacttgaacttagcgagttaattctaagtgttctgcccttgctcgtgctccctcctgactgccattcagagcaccctttccaccttccttcattgcctctccagatcctggccattcaaccaagttctgcttcctttgagcctttccctagaactatgttttatgcctttggtttgttagaagatctaacacattgctattcccattggaagagttccataaatacatgttacataaagagtgaaggaaatggaggaacttacttagagacttataaaagagacattaagaataggaagctttagtaaataatgaaagatattgtgaattagagtagctccagagccaaaataagatgaaaaagcctattaaatagaaatggttttctaggttcaagttcagatcaaacttaagctctaaagcttttcttggcttggtgcagtggctgttgcttgtaatcccagcacttacgaaggcctagtcaggaggatcgcttgagcctaggagtttgagaccagcctggacaacatagcaagacccccatcactacaaaaaaattttttttaaatagctaggcatggtggtgtttgcctgaagtcccagctacttaggaggctgaggcaggaagatggcttgagcccaggaggtaaaggcttcagtgaactatgattgtgccactgcactcccatctgggaaacagagcaagactccatctccaaaaaaaaagtttttctttacctttttctttggcatttctgacttaagccagtgagaattcttcctcattcttttttactcattgcttgaatttgtgttatgagaatttttttcctccaacttggatgatctttcaattttttccagttgtctatacatgtagataactgaaaacagcaaagctcttagtgattctgttccatgtctatctgttccccacctccatttcctaccacacaccccagcattcccctagtacatcactaaactatcaacagaacctaaaatagactagtttgttttaactgtatttttctttccagtcctcttaaaatgtgcagcaaaatgtccccaaaggcaagcagctaagagaatgaagaggaggtattctcccatcacagttactcagtcccagaagtattgattggaaggcactgaattttcaaaatgacttccagatttagtacatggtaataatttgaggctttcccacacggataatttaaatgttcagaaaataagttatgttatagctgaatgggcagcaaattagacagaattttaacttacaagatgcatagcaatagtgaagattaatgtgaaatactagtaaagagccactggtagggaagagaagacagcgatatgctttcaatgaaaccgtcaatttataataatatgtatattgaaaagggagagtggatcagatcctgttaggtttggtacgttaaagaaagaattaggataccgcaggctcagtaattaaaggaatctgcccataattggggggtaaaaggtgtcttgtaggcagggaatagcaagattttgcttgaatgtacaccttagagttgggagtaacaatacttggaatgattatagaagacctctcgacaggtttctgagactagaggattttgtttggtgcataataggagatgagagcaagccagtagtatttggttgttgttgaatcttacagaaatcttgcatttggttattgggtctagctgttgaagccagctgtttggatgtaacatagtggaagcaggtgcttctgcagatgtggctctctctagttgtctggctgtaatatatcattcattctcatacactcatttctcatataaaatccttataactattagcagtctaagcctgcagacattgctgaagctggttccctttgatattgttttctttgtaacagtttcctgtttggtagataaaataacaagctcacactattaggtttgtgccttcacctccctggcaaagtaacatgctagaaaggttactaaacattagtggttcaaaatgagaagtctgtacattttatctgcttataggcgaatttaaactcaactggtttaaattcattgcttagcctgttgcatgctccattgaaaacacaaacaaaaaactccatgattcttctagccatgattcttctagagtttgttatccagtcattccagtgccagaatccatcaggcagaacagaatcattcgcatttctcctctgcactggagagaagaggaaggctgatcatggaaaaggacctggtgaaggttttttgcaaatctaaggatcttttttctgtcttttatttttgcaaacctaaggatcttccttctggataattcccagagacgtcaactttgctgaatctcagttgttgggatttttagcaacctgttcccactctcctaagaaaaaaatcttaatagtgaccagtgtgtgcagactttaatttgtaagtgaaagttacggtgtttcaaaagttgcaggttagttggtagagcattaaatgcagttttgttcatagtcaacattaagtgcccactgtgttaaacactgttagatactgtgaaagagagaagaataaggtaaggaactagagagagagggtagatctttacaagagaggatgtttttcaggagctagaagaatacattatttatgtattcaaataataaagggaaagaaagtacagacagagtagataggggacatttcttgtaggggatccaggaggacttcacagaagaagtattatttatttccattaatgaatgagagtattcatcttctcatagaagaagctataatgattctatttgtggtcctgactgccacaccccttatgatcattaagttaattttagaaccttgggagggacagctaggaggcagaggctctcgttgctggccagctgccattgtcagtttgagaagtctccagtagtcaggaggtgacaagaggattggcccagttattttattgcagtttaatttcgtgaccctttcttgagtctctgctatgtattagaaccactgtgtagagactaggataaataaaacggtatctcctccatttactaattaatggagggtataaacacacaatacaattaagtataatataaggcagaggctgggcgcagtggcttacgcctgtaatcccagcactttgggaggccgaggtgggctgatcacctgatgtcgggagttcgagaccagcctgaccaacatggagaaaccccgtctctactaaaaatacaaaaattagccaggcatggtgatgcatgcctgtaatcccagctacctgggaggctgaggcaggagaatctcttgaacctgggaggtggaggttgcggtgagccaagatcgcaccactgcactccagcctaggcaacaagagtgaaactctgtctcaaaaaaaaaaaaaaaataaataatatatatgtatatgtatatgacagaacagtaatgggatgtagaggcgtaaacaaaaggctgtggaagcacggaggaggaagccattgacatggtgttttctggtggaaatcagttaagccttcatacaggaagtaatatttgactgggccttgaaaatgagtgatactttaaagatggaaaagaaaggaaaaggcatggtacagagaggaaatagcatgtggaaggcatgtaaacacaggatgtgaatagtctagtgatgctagcatggccagggataaattggaaacataggatggagctgggttgtgaagggccttaaatgacaatgctgagatgaagactcttctgtaagtagaagggaggcagcccatgttttttgagcgaggaggtaacaggatctggtttgtgtaactttgtgctatgaatggatagcttaggggaaaatgaaataggaagtaagcaatagcatcagtcaagctagggatgataagagtatgaactgcagtggtagaaatggaaatagaaaagaggaggtggagtcaagacacatggagttgaagcagtaagagttttattaccaggttgaaatgggaaacgagggagaaaggacttgaagatgactccagtgtttctagtaacacaggtggtgatgtcactaatgagggtaaaagcactgaaagcgcaggtatgactttggaaaatggtgggtttgaggtgtttcttcccaagcaagtattggggattcatgccaagaacttaagagtggtaccagggccagacatataaatttggggtatttatatcaaatgctggtagaagtagcgagattaaaagagttagccctgagaaaacatagagcaaggagaggcagttaaaatcagcagagcctgctgaaaaacaccttctgtagaaggtagaaagaaggaaagcaaatagcaaaaggagagttgtcaacaagagtaaaactggaaaagagagggacgggtttcagagagtaggtgggtgcttaacattttcagatgctgtgatttcagggagcatggtgtccctggggcatgagggatttctagcctgtcacatgggtacacatacataaataaaagcatttctacaccagagactcaatcctttggccagccatccttgctcattgtcttagtgtagctcctgaagactcatccctgctacctcccatctgctgcgtcttgtagcagtaggagagggagagaagaagggaggaaaattgaagcacaaggagagttaaaattaaaatgtaagcattcttgcttcagtttgtaaataagttgcatattcttccttttgaataaactacttaattataataatgtcactttgtctaatttttaaatggtcatagatgtgtttgtcataagaagtaaatataacataaaaattctgggtccaagccaaaagaacaaagctggaggcatcacactacctgacttcgaactatactacaaggctacagtaaccaaaacagcatggtactggtaccaaaacagagatatagatcaatggaacagaacagagccctcagaaataacgctgcatatctacaactatctgatctttgacaaacctgagaaaaacaagcaatggggaaaggattccctatttaataaatggtgctgggaaaactggctagccatatgtagaaagctgaaactggatcccttccttacaccttacacaaaaatcaattcacgatggattaaagacctaaaccttagacctaaaaccataaaaaccctagaagaaaacctaggcattaccattcaggacataggcatgggcaaggacttcatgtctaaaacaccaaaagcaatggcaacaaaagccaaaattgacaagtgggatctaattaaactaaagagcttctgcacagcaaaagaaactaccatgagagtgaacaggcaacctacaaaatgggagaaaattttcgcaacctactcatctgacaaagggctaatatccagaatctacaatgaactcaaacaaatttacaagaaaaaaacaacaccatcaaaaagtgggcaaaggacatgaacagacacttctcaaaagaagacatttatgcagccaaaaaacacatgaaaaaatgctcaccatcactggccatcagagaaatgcaaatcaaaaccacaatgagataccatctcacaccagttagaatggcaatcattaaaaagtcaggaaacaacaggtgctggagaggatgtggagaaataggaacacttttacactgttggtgggactgtaaactagttccaccattgtggaagtcagtgtggtgattcctcagggatctagaactagaaataccatttgacccagccatcccattactgggtatatacccaaaggactataaatcatgttgctataaagacacatgcacacgtatgtttattgcggcactattcacaatagcaaagacttggaaccaacccaaatgtccaacaatgatagactggattaagaaaatgtgtcacatatacaccatggaatactatgcagccatagaaaatgatgagttcatgtcctttgtagggacatggatgaaattggaaatcatcattctcagtaaactatcgcaagaacaaaaaaccaaacatcgcatgttctcactcataggtgggaattgaacaatgagaacacatggacacaggaaggggaacatcacactctggggactgttgtggggtggggggacgggggagggatagcattgggagatatacctaatgctagatgacgagttagtgggtgcagcgcaccagcatggcacatgtatacatatgtaactaacctgcacattgtgcacatgtaccctaaaacttaaagtataataaaaaaaaaaattctgggtccagctgagtaggcttacatgtgtttcctgattctaatgtggtcttaacatcatccagtttcatttgcattcttttttttttttggagacggagtcttgctctgtcgcccaggctggagtgcagtggcgccatcttggctccctgtaatctctgcctcccaggttcaagcaattcccctgcctcagcctcccgagtacctgggactacaggcgcacgccaccacgcccggctaattttttgtatgttggtggagaggaggtttcaacatgttggtcagaatgatctcctgacctcgtgatccgcccacctcggcctcacaaagtgatgggattacaggcatgagccactgcccccaggcccatttgcattcttaaaggaacaagtaccactcgctttattctgcctaggtttatgaagggagcagtactatttttgctgacataaactgatcatgtttatatttcagctcatctatatctctgtttcactattattgttttaagtgtctggctatgtggtttctaaatgttctctttttgcatttaatattcagacaatgatttggaatctttagtgactagagactagtgtttgctcagttataataaaaggttacaataatacgaattatgtccatttgcctttctagattttggtttcagtaacctcttcactcctgggcagctgctgaagacctggtgtggcagccctccctatgctgcacctgaactctttgaaggaaaagaatatgatgggcccaaagtggacatctgggtaagtaactgccttctcttataccccacagcattagctacccttggttgatgacagctattcgcatcctgaaggatacataatgatgcaacatgaattgagatcctggtcacctgttctttcaagtcccaattcctgtgcaaagcctttttttttttttttttttgaaacagagtctcactctgtcgcccaggctggagagcagcaggatgatcttggcacactgcaacctccacctcccaggttcaagtgattctcctgcctcagcctcacaagtagttgggattacaggcacaagccaccacacttggctaattttttgtatttttaatagagacagggtttcaccatgttggccaggctggtctcaaactcctgacctcaggtgatcctcccgccttggcctcccaaaatgctgggattataggcatgagccactgcacccggcctactcgtgcaaaatctttcctccaatacttaccttgtggactgagccacatatttcaaatttcccctttgcatttgcaaaagaagcccaagggccagcttggatgggggccgttgccaagaagagagattatttctactgtggccacttaccttatccccagagaatgagtactgagaaaaattcaggatgttaccctaaattaatgcctagaagcaaagaagattgttaactgttctaagatggaagaaaaagtttgttccataatcgtatgcatgactcaccatcatctgcatacacacactacagtagtcttttttgtttcccctgatgtgattaattgtacatcctctctgtttgggatgcagagccttggagttgtcctctacgtgcttgtgtgcggtgccctgccatttgatggaagcacactgcagaatctgcgggcccgcgtgctgagtggaaagttccgcatcccattttttatgtccacaggtaagggagtcgctagcacacagctatgaatgggttcatgaaagttagacccactcagttatcccaggaatttagtgatggagtataaatggcccacttacaaccttttttaactccagcttgctgacctgatgcctccaggaggcaaggttctgtagaaacagtatataggttttggcatcagagagccctacttgggtttgaatctgggccctaagtctgtctcagctttagtgtcctcatctataaattggctgagagttttgtgagggctgctattactgtaaggattaaatgagataatgtatgtgaagactcagtaggcccatggcatagcagtaatgcaataaatgcttttgtttcacttctgtcttcctaccctttttcaggatatttccacttattgggttctcattgcaatgtggttttaaatgccaaggataaagtaggctttgcatcttagtcttgctactgcttcatttcctatttctgtgctctttgtcctccagaatcaaatttaaaaaattttatttaacgagtgggcagtaaggtaggcaggtcttggaaaaatttaacaccgaaaatagatacaagatactcagaattaacagtattttatcaccatttatttgcacataagaagggaacattttagagaacgcaaaaagtcatatagttttgcttaatcatctgttttcattttaaggaagaacatgtgtccactgggttgacaacaaggtagaagcccatggtaattgcattttagaacaaagaggtgaaccttggagtagatttaacttggctcctttgaactgataacgtcatagtgtagaagatagtgctaaatgctgtgggacaaataaaatagagaaggagttaggatagtggttggtaagttacatgaaaaccccttcatggagaaagggacctttcagcaaagcctgaaagaaggtgagggtgaatgctgtgcagtccggggaagagcaccccctggctgttgaggggtcagcgcagaggccgcggggatggagcatggctgcatgtgaaggaacgggaaggaggcctgcgtgcctggaaggaaggagcggtgagagatgaggaagagagatgaggtcagagaggtaagagggagcttaattttagggcctagttaatgtaaagactttagattttactgtgactgaagtatacaggattggagggttttgacaggagtgatgtaatctgagttttattttttccaaattttatgatgaaaaatttcaaacatacaaaaaaattgaaaaattttgcagtgacttttgtttaaaaaagatcactttggctgctatgttgccggtaggctaaaaggtacaaaggctgaaggagggacaccagttaggaggagacttttacaatagtccagataagagatgttggtggctggttcccagtctggggtgtcgagatggagatggtaagaagtgatcagattcaagagatgctacctaccatgtgtggcaggcactgttcaaagcacttcacaaacattaactcacttcattattttaacaaccctatgagatacacaagattattgtctccattttactggtgataaaactgaagccaggagagattaggcaattttcccaagataacactgctaccaagtggctgaagtagaatttgaacccaggtattttggctccaataacatttagtgttggatttgatatgaaagaaagactccagagtttctatcctgagcaaatggaaggatggttttactgccaactgagatggggatgactggggaagaatacttacattttggagagatgttttagacatgtcatgtttgaggtgcacattagacatcagagttaagatatgaattggcagtcgcatttaggagagaattctgggttggggatgtatgtttggaatccccagtgtatagataatagttaaagccatgaggtgagctcactttttaggcagtggttacagagaagagaagaggtccatgaattaaactctggaacataccgctatttagagaacaagcaggtgaagaggtatcataagagttgctggtgaggtaagccagagggcctgctgtcctaggagacaagtgaagagactgttcccaggaggagggaggagggagtgaggagctgtggggagtgaatgctgctgccaagtcaggtaagaggactgagaactgaatgttgcatttagaaatgtggagatcgttaatgattttgtttcttttttatccccccacaccctcaccttcctagatcattaatgattctgaagtacacttttggcagaggaacaggagcaaaagcttaatcatgtggttgcaacaaaaaaggaatagaaggaaaatagacgacacgctctttccagtttactataaa

SEQ ID NO: 15809 - DNA, 201874 bp, Homo sapiens
ggccaggaacgcacgctgcctggccgtatcgccgcccccaccgccgccgccgccgggactagaagtgagccgcccgggtcccaaacgccagccagccagtcagtgggtcccgcagtcgcccgcaaccggggcgaatcatggcggccgccaaggtaaccgcgggcccgaggccggggggagcgcgcctgccggatcagcctgggggtgcgagaggctcgggcgctcacgtgtctgggttggtgccacaggcggagcaaaatggggtgccgggcagccgttccaccttgcggctgctggagggagggggccactcctcccgggcagcacaggcggtcggtgcagagaccgaggcccgacctcgcagcggaaactttgtgggccggacactcccacttggccggggagggaagttggtgcctgacggggctgagccagggccgacgaggaggagcgggcgcgactggggcctggtgcaccctgggccggcaagcgctgggggtcctctctaccttcccagcgcgctcctgctcctgaccccgctggttgttgactccggcttcttccaggggccagagcccgggctgaagcctgatcctattacgtttcaagggctccgccctcccgcgggtggggaagttactttgacttccgttttggaaactgcctaggagacttggtctgcgcctttgtgaataaaaagtccagggactctccccctccccgctttcccatcattcccatcttccccctccctctctccatctgacaacacttagatacccgcctcggagcatttgagaggcttctttttgggaacgatgaaacagattgtcctgggagcctgtcactcctgtgaagttgtacttgaaaggggttctgtgtaatgtgaatcattcactaacccagaggaaaggcaactccaacacttgacctttcctctttcaccatttcttgaaacctggacaccatttcagtctctttggactgcatttcaacttctctggcagaataccatatttagtcccaatcacttgaatcatttggaatttattgcttttaatttaagttcacgaaggcagccctctaatcaagcctatacaacttcttagctcattttaagtgcagtgaacttaaatatacctaacatttcaaacatttgtccttaatcaaaactctgtgataaccctcaagaggaaaacatggccaacacatcatattcctatttattcaagcaaactaatcacatttgcaatggaaattgtaagcagacaaatatatttaaatgctgttctatgacttaagtctctccaggctccccaaatccgtaggcttcttcatgttgttagtttctgtggtctaagtggcatttctcttttctgtaattactctgagtttcatccttaggaaagtactctgggtgtgtgggctcatgtatgtttgcatatgaacacacaggtgtgcgtgtgtatatctatctataacttttcagcagtttctctgagcatcactaggattcaattttggaagctgccttaaccctttcaagcccaatagcccttgaccttttttttgcattaaatttgcatgcaaccaaggtacaaggcttggtatgaactaattccctagagtaggtgggactaggtacccattctttactgttagttttatatctgcaggtaatgtaaatacttttactttattaggagataaggtaattgaggaacataaattgagacgtgtgcatagaaatggagtataagacttgagtaatattaagtaaaataagtgacctggtgctgtggctcatgcctgtaatcccagcactttgggaggctggggcgggcgggtcagttgaggccaggagttcgagaccagcctggccaacgtggcaaaaccctgtctctactaaaaatacaaaaaagttagctaggcgtgctggtgggcacctgtaatcccagctactcaggatgctgaggcagaagaatcgcttaaactcaggaggcggagattgcagtgagccgagattgtgccattgcactccagtctgggcaacagagcaagaccctgtctcaaaaacaaataacaacaacgacaaaacataaaataagtgatatggaagttagttcaactctttggttgtacttctacataatagtagaagtgtcacatatcaagggcagttgatttttagctaagtattgagtcagggaaaatgaaatgttcatttttactacttgggagcttgtgtttttgtttatgtcttcatttgcactcacctctttctgtgatatctgatggctcacatcatatatacttattttgcaatccaataagatatataaaaatcaattccaagtagatgggaaaaacaggacaaagggaaagtaagacaaagccaggactaaggttagtggaacattatgtgcttactagaggtgattgcattttctcccagccaaagcaaagaggaaatgatcagtgaggtcatttacttgggagagaagtctccttatactgctctctgagagcagttttttttttttttttttttttgagatggagtcttgctctgttgccaggctggagtgcagtggcatgatcttgcctcactgtaacctctgccttctgggttcaagtgattctcctgcctcagcctcccaagtatctgggactacaggcacgtgccaccacacccagctaatttttgtatttttagtaggccaacatcatgttggccaggctggtcttggatctcttgacctcgtgatctgcctgccttaacctcccaaaatgcagggattacaggcatgagccaccacgcccagccgagcagtttcttttatatgctgtgagtgaacggcatttgaatctaccttgtgaccacagatatatgtctgtgggttacataaggccatttcttatcatgtccttcattataactcaatggcagtgcagtaaatgtggccttaaaaggtccctcaatgaagctgctggtctaacttattccaagaatgtcccttattgaactgcctttgggcatcacctttatcggttgattctgttggcagcctgagttaaaggctgtgctccttgctttttccctggagcatagctattccatgttgccagctgaacacagagccataggggtagggttggcattccctcttaaaagttgaggagcctggataggagaggacttcacctcaatggactgttaggaaattgggctgagactctggggactcagcaactgtgagaattccaacactcactacactcactgtgacaaattgtttgaatatttaagcagatttggtattttctggatagatgtagccacaactagcaattagttttctgatctgtttctttctttggtctttatacttatttaaatacagctaattattcatgaccttcctttaaatagttttaatggggagatggagaatctagtctttggctgctttttattttgaattttgctatgaagattactagttaatggttcaagaagtgtttgttttctttcgtgaatgaacattaatctaaaactcttagtattctgagattatctcaaaaagtgtccattctcttgctgcctacgtttgtaggaataatccttgtgggttcccttgttagatctgcctgtactgtttgcgttgtttgaatatttcttttaaacatttcccaaaactgccataaaaaaacagttttaaaaggtggtaattgagaggtcacccttttcttcgtctctgcccttttcttggttaaaggagagctttcttcttcgtcattggttaaatttatgcgttacgaatgatgtaattaacctatatgaacctactaaaagttagaatatgctcccttgagttcagacctgtgagatgttctggggtaaaactgaacacagaccaatattagcctagaaccaaaagaaggaaatttgggggcacattaaagcattaataataaagacaatttggtctgtaggactagtacactttgtattgacttttcattcttggatgagttgttgctgtgatcattgattcatttatgtgtattgtgttctttccagtgttgcaaatgggacaaaattgagaatactaaaatgaattgttagctgggcatggtggcacgcatctgtggtcccggctacttgggaggctaaggcaggaggatcacttgagcccagaaggcagaggttgcagtgagctgagatagcaccactgtactccagcttgggttacagaacgagatcctgtctcaaaaaaaaataaaataaagtaaaataaaataataaaataaaataaaatagaataaaataaataaaatgaattggactccattttgatgttcaagaaaaccaaaaccattccagggggctaagttctctgatggaaatgctcccactacaaggtttgtgggagcagtaggagaagagcccatttctgaggagatgagggaagtcttctgaaaattgctagtatttcagaaggaatggatggggaagagtaaagatccaatccagtggttggaaacaaatgaagggctgggaggtgagagcacaggctacatttagttaacagcaggtaataaaaactaaaagcagctgacacttactgagcgcttactagataccaaattcagttccaaatgtgtttcattgttgattcatttaaaattcagttccaactgtgtttcgttgttgattcatttaatgcctcagccttttgagttagttactatcatcctttttttatagatgaaggctctgagataccaagaggtgatgttagtggcctaagatctgataagtatggctgggtacggtggctcacacctataatcccagcaccttgggaggccgaggcaggtgaatcacctcaggtcaggaatttgagaccagcctggccagtctggcccatctctactaaaaataggaaacaattagccgggcatagtggtgcattcttgtaatctcagctgctcgggaggctgaggtaggggaatttgcttcaacctgggaggcggaggttgcagtgagctgacgtcgtgccattgcactccagcctgggtgacagagcaagactctgtctcaaaaaaataaaataaaataaaaaagatcggataattaggaaattatcgagctggggttcaaatcctgccagtctggctccagcagctgtggcctcactctgtccaccatgtgtgcctggtagtttagtgtggtggagaataaagtatatgggagaggtgtgggagatgacttaggagaggggtaggtgtctcagtgtaaaccagacttttatttgagaactgccttacctagtgctttttgcatgccaggtacttttccaagagccttacaaatagtaactcaattaattttcttaattctaagaagtaggtgctttctgtttttgacttcaacttacaggtgagaaaactgagttaggggaggttaagtaatttctcacgcttgtgcaacaggtaagtgctacagtcttgatttgaaccttgccaatgtgtcttcagagtctctgctcttaacctctgcgctgctctcccaggtcttaccaagagttccatttgcgaaggtgtatgtgtgagagttcacatgccatcgggtatggatgtgtatatttcctgatcatcccagtccagtagttcttatcttagaacacctttgtcactctgtatatgcttcatttcagtgtttattaagtgtatttctcatctctccaaccagatcgcaaatccctgcaggacaggaattgtcatataccttttatttaattgctttattgagatataattcaagtactatacaatttacccatttaaagcatatgatttattggttttcaatatatgcacagagttgtgtaactgtcaccactgtcatatacctttaatccagtttccattaggatttggactataatatatatatatatatttgggacagggtctcactctctcacccaggtggaagtgcagtggtgtgattattgctcactctagcctagacctcgtggatacaagagatcctcccaccgcagcctcctgaatagctaggacctcaggcacacaccaccacacccagctaattaaaattttttttttttttgtagagacgggggtcttgctatgtcgcccaggctttgggctgtatatttaacctccatgtcttccacattgttcacccatcataaaaccctcttcagaggtttgtcattgaggataaaatatattgaggttattaaagatattcttcaaatggcagggttttttctcccctatgtaaaaactctactaagtatttggtgatatcataataaaacaaatcagtttttgtgctaggaatggaggaaagaaggtttgagttgtttttatgctaccatgatgatgattattaaaacaaatatctatggctccactgtttgggttttaggggttcttatcttgttggagctggatggccttggaatttatgttaacacaatgatctttactctttccttcctcagtcctgtccccttttaccaggagagtcctagaaatggagtcccagaaacatttgttattggtccaaattcccatgaatgcctttgcttttggcactgctctaggccagtgattccctacatactgaagtcttctggactggtataaaaaactgctgatgcctgggtctccctccagagatcatgattgaattggacttgggtgtggcctgagcctcaggatttttgaaagcttgacaaccactgttattttggtgcacattgcttcaagagacctgctggctccttcttggagtaagaatggaatgcagtgagattaagttaaagtccctggtgtgtcagttcaaaggaggggtatgtaggggtttctccaaatttctcttctttcttgacagctttgtcttagtcctgcctggtgtctccagggtgcttaggcatcaagtttatacagttttgtgataatcctggaatagaggttttaatcccaaacttgactgaaagctccatttgtctcctgcagagtctcagtggttttttgtgatcagagaaggtgctggaggagggaagcattacaaagagcaaacctggtctcagagccctctcctgggctaacctcatccagggccatgtggtgccagtgttccctggcttaggtcatatggcttcacagcaaatagagggttggaaaggtgtggggagagttgaaaggtgatatgtagcgtaaaaaagtcagggagcaggtcttttttggatattgagttcttttagaagattgtccgaggagctctgactcctctgtgctttggtctcttagacctttagtcccatgaccagtctctgcttttgatgaattcttagagggaaccattcctccctttgttctccactatgtgtgaggattatctattatggcattcctgctgagcgcttcctcctctctggttggcatttgctgcctcataaacacctacagatttcctcataagactctgtgggtttgccttagggtggaccttgcaacagaggaatgtgtgacgctgagacatgtgttggttctgcttggaggtaaggagggggatatgcctttgtgtagtgatacaattcctttagcaaagtatttaacagctactgagcaaactctattttcatggcctgtttaaccagacagaccctctaattgggtgaaatgaactaaattaaatgtccttctcctaaaagtcaccagtaacctcagttctaaacctgttggcttgtcctcatttctggcctcacatgaccctgtgtcctaccctttctttctcgccatctgctttcatgatgtcccctctcattattggcctctagcatctcatattacccctttattctcctttgcaggcttcttcttcttcttccttcttcttcgtccttcatcctttctcctccttccttcctccttcttcctcctccttctccttccttcttctttcttctttcgtcttctttcttcccagcaaagatatatttttattttagtgtttagcagcatgacatatgcatatagaatgatagtacactttaccctaatcttcaaaacagaatgtactagtttaccaatgaggaattttggccaaaaatgtagtgtttttcccttccctgtacaggtcaggtatatgtaggtccagcactaatgctgcaccttttgagaagcattactttagcaaaaatctagaaatctttcactttttctgaatctaacaaagggtcttactttctttttttttaaatgtacattttaaaaaataatttcaacttttattttagattccggaggtacatgtacagatttgttacctggatatattgcatgatgctgaggcttggggtacagttgaccccatcacccaggtactgagcatagtacccaataattagtttttcaacccttgttcccctccctcctccctctagtagtccccagtgtctattgttgccatctttatgtccatgagtacccattgtttagctcccacttataagtgagaacatgtgatatttggttttctgttcctgcattaattcacttaggatcatagcctccagctgcatccatgttgttgcaaaggacatgattttgttctttttatatctgcaaggtattccacggtggatatataccacattttctttatgcaattcaccattgatgggcacctaggttggtttcctgtctttgctactgtgaatagtgctgtgccttgtgggcttctcttcattctgcctggacacctggaaggttagtgtcccccaaggctgtgcctgagattgtctcctccctccagttcctgccgcactacctgcccccttaatgggtattggctccttaacactcctcagcctgggtggctgtctcaagctctagccctgcacttttagctgtttagtttgagctggaagactcaacttgtctgtctcaaagatatttcaaactctgctgacctagaactcaccagttcttataactgaatccatctttttggtcattcctgacttcatcctgcagcttcactttcctgataaagtttctagttagttcaattaagtacctgttatgggcagataggagagacaccatcagcctgaattggatgtggcaaaagaggtggatcagtgaaacccttctacggccatggagcatgtatgtcctatcttctctgttcaaattcagggcctctttattttgtagctgtaccattgctgtagctcccactgatccccttgcttttgatctcatccctacaccttcctctccattctgtccagactgccaaaggacttttctaagattggctcttgttgccatgataatagcactaccgtgttcatgggtacagtacttagcagctttaaaaagtgcattcaagggcataagtgacgacgactgtttgtcagtgcctacactgtgctgggattccaaaaacaggtaagctactagatttgttttcaagaagctcaaagtcttcagggattaatataaccagataatataaagacccaagcttcattatttgatctttataatcatctacaaggtagcagggaacgtgttgataacctcatttgtcagataaagaaacctaaggctcaaaaaggttatgcaaataataataataatattagcatatgtttatataacacttgtaaaagccggacactgttccaagcactttatatctactaatgcaatcttcataacaatcctatgacatgtaagtgctctcaccttcataatatacatcgagaaactcatttgtacagagtagttaagttctttgaggtacagagagattacataacttgcccaagatcacatggcttgtaaataggagagctatgatttcaacacaggcagcctggctccagagcccaagcacataaccagtgtgctgcattgccctctttaatttatcttgctatgcagtgtggcttctgttgcctgcagaataaaatttaaactctttagccagctaaaatctccttggtcttggctgcattttcaatacttttaatttagtactttcccagtattaccccagactcattcgattttcatattcttcacagcagtttgtgaacgggacataacaacctctgttcatatttcttgccataaagctatggcaacagggtagcaggataaaagagagcctgtttatttgtttgtttaacatagaggtcagtcagagacagaaatgtttctttttttttagcctttgtcagaaagaaatacttcttttcatttctctgtattggtgggcagatatatatatatttgtctgagttcttctcttcagttttcagaaggggttgtggttctattttcccatttcttgaagtccctgtaggaatgctaaaacccatgtcctaagattacagtttttatagttggtttgttctaatcaatattcagatatagtccacacatggctggttgatacgtcttttaaatcttgttaatctataggttttcctgccccctttttggttgtttccttgcagtttatttgatgagggaattgggtcgtctttcctgtaatttcccacaatttggactttgctgattacgtctttgtggtgttgcttggcctcagtatttcctgcaagtgacagtttaatctaaaagcttgatcaagttagagtcttttttggttttggctagaatacttcctagatggtgcttagagcttcccatcacattgctgggtacttggtactgggtactcacatgaggaagcacctaattcttggttgtttcttgtgatgttacgttttggtcagtggtttcagatgttgttatcttaagtccaccagctttttgcataatggttttaattagctaactttaaatattaacatttgcccttcctggtacattgagttaaaagtgattttcattatttaaatacacactcttgtgtgtatgtatgcatattatgtatgtatgtatgtctatatatgagtatatatcattgttataaaaaataatggcaattaaaattcaattggatattaatgggtttagagtttatgtttgggatgatgaaatgggtaatggtgatgtagaacattgtgaatgtacttaatgccactgaattgtatacttaaaaatggttacaatggtaaactttatggtatgtatattttaccacaatgaagacaaatcaattggaaagggattgtaacacatggaattaaaaaaatccaacacaacataatgagtgataattattgctccctaaaaggagccaaagtgagttggagaatagactgataaagtttctttactgaagaatgctagctaataaaggtagaagctatgctagaattagaaaaaggaaaaaaaattgactttgccacctgcaagtaataattgattcaggcatggatcatcattggatgctgaagcctttcagtaaaagactgttggaattcccattgtctgaatgcatctcctagtaaattacttgctgtttacagaggggaaaaagtacctttacaatggagaaatctgcttcaaccaagtgatcatcagcaaatgggataaactagcattatgttaccgactgatattatgcattgggaagtatacaacatgaacctaaaaatgttcttgccaaaaatatttaatctggatctaatcgtgaggaaacaatcagacaaatccagaaagtaggacatgctgcaagacctctggcttgacttcaaaaatgtcagtgttatgaatgaagaaggctggaataaaggaaactcccaaagagacctgatgaccaaatacaatgcttgagcctgggttaaaaacaaataaagaaaagaatcgaaacagctggaatatggggaccatattaaaagatattgtattagtttgctagggctgccataacaaagtactagagactggatggcttaaacagcagaaatttattttttcacagttctggaagttaaaagtctgagatggagaccccagcaagtttggtttctcctgaggccttctctccttggcttgtagatgggtgtcttcatgtggttccttctctgtctgtatcctaatttcctcttcgtataaggacaccagtcttattggattagggtccccttcatcatctcattttaacttaataaccttttcaaagaccctatcttcatatatggccagtcatcttccgaggggctgggattggaacttcaacatatgaattaggtgtgggggacacagttcagcccataacagttattgaatcatttaaaaatggcttgggtgagataatgatgtcaaggttctgaagggaagtgatctttgctgctgatttattttgtttcctcctagattttgaactcttgaggacaaggaccttctctggacacagatatgcctcagagtaactgttgcatagcattcagacactgctggttgaattgtccatttacttggcatgccaacacatggcaaagtaaagggggaaggagattttctgctgcatgtatgtggtttgttgtaaacctttttctaataatccatttgctcaatcctctccatcccccaacaaagtaatatgatgagaatttggaaatacttgaggagttgtgcatgggtaatcgccaggtgagcacatcatggagaatcagaaattcagaacagaccttggcaggggttgtgctgtcccaaggtagatgaatctctatgactacagaaaggctgcttcaaaaggaggcacctagagaaactctcccttgtgattaaaaaagcccaggtacattagagggcaaaattcccagcaggtccaaacaatgtgttccattgctgctgtttcagccctgctagtctcagtagtaccctgggtcatcagatggcttgaaggacaagagggtgatatcctgtctcttctttgactttgttgtgctcactggcaaggagtttcattcacttctgagaattcacacactcattttattgcaggctgatgttgattctgagtttgaggatgccaacatcttttcattgcctcccagctcagttccagaagtgaaagctcagtcctagattctttttttatggtggttcatgaagatttcagttaatccatttgtggtgtccaacagcaacttgagaagagcctggtcttgacctttgcccaattttctattggtttatttgccttttcacattgatttgttctaagagcgcttgtaaatgaagaacattgcccctttgtcctatctattgcaaattttgttgttgtttttcttctcagttgttgtttaactgatttatattcactttttaaattgttatgtcaaatatttatcatttttttctttatggcttctggattatatggcttctgagtttgtcatgtttgaaatcagcttccctacttaacattacataagaaaccacctgtgcgtttttctagtactttttgaaattctctctctctccttttaaagattaactctgatccagctgtagttcttttggtataagatgaaaggtagggagccagtttaatttttgttgctcaaccccaggagttcgtgacccttcactagtgccacatcatcagctagagagacctgctgctaattcagcctgaatctgctggttcagccttcagaggaaatctgattagttcagaaagccaagatcacctccccacaggggtcaggtatctgctgctgcctcaatcagctaggctgctctgaatatgaagagtaactgggaagcaaggcgctgctagattgtctcaagttgtgctgttttcattcaattgttattctctattctcttacttttagcagatgagaaaacaagaggtcatgctgctggttaacagtggagtcagattttttttttttttttttttggagatggagtttcgctcttgttgcccaggctagagtgcagtggcacgatcttggctcactgcaacctcttgaaccctggttcaagtgattctcctacctcagcctcccgaatagccgggattacaggcatgtgccaccgtgcccggctaaatttttgtatttttagtagagactgagtttctccgtggtggtcaggctggtcttgaactcctgacctcaggtgatccacccacctcagcctcccaaagtgctgggattacaggcgtgagccactgcgcccggccgcagtggagtcagatttaaatgttccattgcaaagctcatgaaataggaaacattctatgaggggaatctggttggagaatcctggaggaagaggcatttgacttagtccttgaaagaacagcatcattttttaaacttctcattatggaaatttcccaaaaagtgcaaaactggaatagtataattaaccctcatctccctatctagccagtagtaatcatcaatttatgtcctcaatattgtttcatttatgccatgccctctttcctccttccatccctacttttttttttttaattaaatttttgtttttggagacaggatgttgctctgtcacccaggctggcgtgcagtggcgcgattatggctcactgcggtctcaaccaacagtcctcccacctcagcctcctgagtagttgggactacaggcacatgccaccatgcctggctaattcatccccatatgtttttcaaagcaaactcagccatcctatctgtaaatattttatgtatctctaaacaagatttcttcaaagcacaatcacaatatcattattatactttaaaaaattataataattcttcaatatcttcaaataggtgttctgtacacattgtacacatttcccgtattgtcttaaaattttttaaatagttgttgaattgtgatgtatataaggttcatgcattacaactgatgtgtcttaattttctttatttttttttttaaattacaaagctacctttatacttttaagccccacaggaataaaaaacactgggaagggctaaccccctcaccccaggagtggcccatagggagagaggctacctgaggggaaggaagtacaaaagggacccaccgcagactcatggcaaagggaagccatcggtgctgggacctgtggtcactacaggaggaaatgcgagtgtggtgggactggctccaggcacacaagtgaagggcaagagagattggagtgaagccacaaagctacttgggttcctccttcttctcgtttgcctttttctgcttctgctgcatgatctcctgagtccctgggggtagagatgatagggcactaggaggtatcagagggcaaaaagaacaaaatgcagagggatgaagggcacaaaagagaagatggaagtggatgggactaagctcaccgtttggctgctgtactcccatcctaggagaagaagaggaagagagctgaggctcaaaaggcaatcagtctccatcctgcagttgcccaagaggtcagaagtctggccacataggcccaaggctctctaccgtttggctgctgtactcccatcgtaggagaacaagaggaagagagctgaggctcaaaaggcaagcagtctccatcctgcagttgcccaagaggtcagaagtctggccacacaggcccaaggctctctattcttacaccagtaagaaggttgggagaagggaggagaaccgggaacagcaaggagggccagaagcactgggctgtcataaccacaggtgtatctgaaatgggaagctccctgcccttgccctgaaggtcagactgggggatgctcagaaatcagactcttgtgtcctaattttcttttgatctctggattctcttgcctgctcaatactgtgctttcttttcctctgaaggacagtgtcacataatggctgaaatcatagatttgcaatcaaattagggctctgccacttgctaactgtgtgacttggggaagttactcaacctctctgtgcctcagtttcctcatctgtaaaatggacataacggtgtctactcctcagggctgttgagagtgtcagtaagctaatgtttgcaaagcattagagtcatgtcaaaagctgtgggctgtggaatagggcccaggagggctcactcaagtgagatggtgtgtcgtctttgagatgagcctccagctgtgcagagagcccctttccttttcctttttgcttccttctggttcttgacgtgcttcagttagatgaggttgatagcaggaatttggacaggtaaggcatatttaatggaagcaacttctttattgtcctttcatttttggcttcctcttcctctgtatttattaaattagcttttctctctcagaagtgtttaactttttatggcattatctgggcttcagcaacttgtgatctcctaagtagagcttttcagcactttataaatacgtcatatactttttatattcctttgttccccatcaggaacatagccccagtcttcagaatagcacaatcagtttttattcatttaaggagcagtagtaatttgacacttgctaatatgtaacaaattatattgggcgtggtaattacaattgcagctggttcctaattatactgtaaccttgatgcttacaaaaattgagactgaattcagcataaaatactggagaataatattctgcactaggcatttctgccttctactgagccatgggcatttatgaatcataatgccaaattaaaaagaatttattttaaattggttacaattacaatgttgtccagtgtctccattcttaaaggtagctttaaagtccccctttttgcttgctaaactctgggaatatccttcaggtattataattagtgtctaaataacctgagctcaggggtcatttctggctgtgtgatctactggtattcatttaagactctttagtacctcagcttctttatttgaaaagtggggatattactcactcttccccttaaagagttttaatgatacagtatataaatgaaataagataaaaagccattagcataatgcctggcatagagttaaggacccagtaaaagttagctggtcattgttatcgttataattaataataagtgatccggctccaaagactgcctctgtgaccctcaactttagcagaattagtgtattaattctcctgccactctgccttatgatagcatgtatcatcatacattttgtaccaaccacttgtcgataagtcagctttccctgcttggggcagggtttctgatttattgggtgttttctcctcggtgcctggcgctgggcctagtacactgcagctttcccataggtgattgtgttgcatggatgagcaagtagagcatcaccatctaaggagtggttgttagctggggggtggggtagtttggcccccaagaggatttcttttagcaacctctggagacagtttcttggttgttgcagcttgttggggaaggggttgctactcccatctagcaggtagaggtcagcttaataacaataatagtaaaatccagaactagtatgtttcaggctcttttggcataacagaacccagctaaaacaccaccattcattcttaactgttatactctgcctcttaatatcagaattttaatgatgatggctttctagtttatgttctacaacagagcagagtgaaatctaacatacatcacaacctactgaatccttctgataaacatctctagtgcctctgaaatgactcgctgatgtaattacccagtgggttaacatttgtggtgtctgatactttataagtcaactgttgagtgaaatgaagttttgccagctgattacatagaaatgttgtggtttgaagaatgcttaacagggcatcttgtctttgtactaatttatatttcagtaacttttcccataatgactgctcttcatttattaggtcgtagggaaactgtaggatgaaggatgagtgactcagtggtttcaataaaaaattattttcttaagtttgagatacctttttcttcttctcaagttaatggtaactgtggttttagggaattccaaactttcttttgcaattactgattgtatcagtcagggctcactcgcagagaacagaatctactctagctggtttaagcagagagagatttattacaggatattaaatggcttacacaatttgttgggaaggtaaagaaacagacttgaggttgagctctaaagaatgacgtctagagtctcaagcagagcaggccaccaagacagcagtgacctcctgtgcagtcacaatgctgcctgccaagtggagagtgtttcaggaccatgtggccactgacatgggagggcaggaggttgccacaggaaaactagacacttccagcaatggtgcgtgcttggcagaaacagcagaaggtgccccccaactcccaaacatttgccaaatctcactcaatttcatctaattgatggcacataggccgcatagcagcaagggagtctgggaattgtagtttcagccttctagtgtctttagtataggaagataaagaaggagggtgggcccctgcttctaagtggttaggttacacccaagaatacttttctttgggattcagggccatctactgcactatttcctcaggttcaaaagactatgcaggactgtttctccttctctctccgtttcctgcttgtcactgcatgcttatttacacccacccacccacacacacacccagaagcttgcttttgatgagctacctctttgagtttgtagttcttatctaaggcaaatatttactttatgatagtagaattttcagtgtaagtctgtgcttgtcttggctttcagatgtttcaggtttgggagggtgactggggaagtattgctgaggaagggctgtgctgtacagttggtgacgtagcagctgaggttgggcctcgggtcctaacgcagttgttctcagtccacccacacatggtaatttcttgagggagctctaaagatatccattctagaaattttcatttgattgacctttggtatggtttgggttttgtaaaacctaaaagcacctcaggggacttgaatatgcagcgaggactgagaacctacatcttataatccgtacattaaaattggacattatctaaagctgtggttcttaaactttaactgcatcagggtcacctggagggcttgttaaatcataggggattgctgggcctcacccagtttctgattctttgggtctgggatgggtgtgataatttgtatttttaaaagttcccaggtgatgctgatggtctccacactttgagaaccattggtctgaagagagttgcctattttcattgtaaatgtcagatttttactgacctgaaagactttattctatattcagcacttccagagaatctactttgtttcctgatctttgccagagttggggttgatctgaggagtaaggtgccctcacagagatggtggtctcacatctctacagcctcccagtgaaagaggagagctttgcttttctttgcattttatttttcaaattagcatttcttattttcgtgtaggttttcttatattcttccccaccatcctctcttagatctgacaactattttgaatacaccattctataccactgtgatttgttaaagtaatgagcctgcaactgtggcttgattcccttgtaagaaagtctgtttaaaaaatattcctacaggtaggaattttctggtgaccccctacctatggctgctctaactcatattaggagagtgaattcatttgtcctgaaagatgacttttgtattcttcttgccatgttctcccctaccccctgcctttttaaaaacaccagttcttgaaattgtgttattgtttttctttttatttctaggatgtacctacctagtatgtgttttgcaaacgctattgatgacttacacaattataaccagtgtttatcttgtcaaaaagttttacatattcagtgattctcaaattttgctcctgtggagcatagactcattgaatcgacctgaaatttccatactaaatttaaataatgatagacttttcccagtttatggaagaaactatgcatagagtttttctgttccaacattgccactttctgggccaggcatggtggctcatgcttgtaaacccagcactttgggaggccaagatggaaggatcacttgaggccaggagtttgagactagcttgagcaacatagtgagactgtctctacaaaaaaattaaaaaattagtggggcctggtgacacatgcatttagcctcagctactcaggaggctgaggtgggaggattgcttgagcccaggagtgtgaggctgcagtaagccatgatcgcaccactgcactccagcctgagtgacacaatgagacccccaactaaaaaaaaaaaaaacaaaacaccaaaaccctctctttttcccttaaatttggaatcagagtaaaatgttatcaaatttcaacaaaattctttatcttgttagcaaataatatttcatagtaatctgtaaaggacccctttcttcttagtgaattactctgtatgtttgaaaaccagttacttgatttaaaattcttgatataaaatttttgttttaatgttggaatccattcttacaaatgcaaattcagaagaagaatcataaagaaaatcaggcagttataacaatagtagctgtaaatatttgcatgctattaatatatgagaaaaaaatgtaacagtgaaagtaagccttctggaaacaatctaaagtttgatgactcttctaaaccccaagaatgaacgaagtctaataattccaggcttctaaagcccaagaatgaactaagtctaataatcccaagcttatgtgatgcaaagtatgcatgctggacagctgttctgaattgactttaaaagggtggctacatttctgtggcttcctttttccagctcatagaacttcctgggtattggttttgccaccaggtagaattcattgaaatacacctttaaaaaactggtacatctcatggtaactttgcattgtcttcaattaagttgtgtaagtgttcttcattcatagcaaatgacacttaaaacaagaagataggaatgggaggtagcagtataaatggaaattccgaacagccacacagcatttgactggtgaataatagatggaattactatagagatgaggcccaggaggctggtagtaatttttctgaatccatcccctgttgaaccatacttatctatccttaaatagaatgtaccaggacctgagccaaattttagtgggcctcagagaaatcttgtggtgatcattaaccatttgctgtacctggaactctgggttgggggtagggtagctgagacaattatcagttaggatggccacaatgtttatttagtggtttggtgagtgtgtttgaagacccatgagtttctcttctcttttgctaatttatcccttctaaattatgagccagtttacccatcatttagatttcttaaggagtaaacatggtagaacataaacatctttggataaataatacaaatagtaatagataccatttattgagcactttaactgtgtggcccttttggtgctaagcactttgtgtaattatctcatattacttttctagctgtctaggactccccattttataaatgaggaaagtgaggctgagaggtcagggcctccaagtcacatggccagtgagtttatgaggttggtcctgctccctatttgaggatgatctgacactaaggccatgttctttttttttaatgaagatggggtgtcactatgttgcccaggctaatctcaaactccagggctcaagtgatcctcccaccttggcctcccaaagtgctgggattataggtatgagccaccattcctgtaagatcatgtccttaatcacagcattggacagacactacacactgttaggagaaattgggagagttttgatttttaggcttgtactatattgcagttatgtaccacataaggatgttttcatcaatgaaggactgcatatatgatggtggctccataaattatagtggagctgccctgtacaggtgttccactttttatcttttaaaaccatatttttaccacaccttttctatgtttagatacttgttttacagttgcctacagtaatcagtataggaacatgctgtatagatttgtagcctaggagcaataggctatctcatttgcctaggtatgtagtaggctacaccatctaggtttgtataagtacactatatgatgttcacacaatgatgaaatcacttaacaatgcatttttcagaatgttatcctgttgttaagtgatgcatgactgtattatattgccagctaatgcaagttatcaacactttgaagctgcctgtaatgtgggtctgtaggaaggccactacggtaagagatggaatatttgggatctgatctcagctcagaaaacatttagaaatgtcagcacagattggcacttaatctgactttttgggggaaataattgatgctttctgagctttggtttcctcttctgtaaaattagggcagtaatatccatcttatctgactgatttgcagtgagaatccaacgagataatagtcttgcttagaaaactgtaaatgttaggcaacatgccttataagtgttgggtcattctctgtctttgttttgatttgtgttctctgccctagaccctgagaaggttacaaagtgaacactttttttccccctttgaggtgtagttctgatggggagcactgaatatacatttcaggatccttaagcagaaatgtgctatgaaaattgagggcaggggaggttcactctgaaatagcattgcccaggcaagaccttacaaagttcatggcataaagaattaattctattttagaattacgaagaatacttcattttgtggaaaatttattttgcttttaagaggaaaacagttaagaacttagggtaccatatgcttttgaaaaaagtgttatgtacttccatgagatgtgggactcttaccatcaaggaggagatttttctgctcttaaagtggaggatgggggcattttatgctgtcccatcttctcttgtgttcgtcctaccctacctttctcagaatagagacctgagaggagggagtcctctctgaagcttttagggcagcagagtcattcatcttaggttaactagcagtacattttcttctcctctattgaacagcagagaacacttactaattcaggatttttaaaaagattaaaaattcatggctgggcacagtggctcatgcctgtaatcccagcgttttgggagtctgaggcgggcagatcacctaaggtcacgagttggagaccagcctggccaacatggtaaaaccccatctgtactaaaaataaaaaattagccgggcatggtggtgcatgcctataatcccaactacttgggaggctgaggcaggagaatcgtttgaacctgggaggctgaggttgcagtgagctaagactgcatcattgcactccagcctgggcaacaagagtgaaactccatctcaaagaaaaaaaaaaaagtattacaaattcttatgaatagccttggtggttacaagcactcagctgaaatgaagagttatcagtcttgctttgggaaacaaggtgaccaaccatctggtttcagaaagactactcccattctagtgattagttaataaaattattcctgacagtggagagcctaggagctcaggcagttccatatttagagacagagaactcattgtccaaagatctcagaacagccttcactagctcacagaagggatttaggacaatttgcataagtttccctgtggatagcaacatgggtccagtgttgggtggttccaggaacctctccttggcttcatcatggggtggctctgtgcttggtgggaacccagtctcatgatgttttttgctaggaggattgggtgttgggacattgaataaacccactgtttggttccacataagggctcttttgtgttggcctgaggaagccatgttgaagtttgtcttgcttttccccagcaatgtttttggactttgtggcctgcagaattaagcacaacacccattctgagctaatctgtcaatttttgctcttcaaagataaccacagccacttgtatttctaaaatatgtagaataatatcatacctttggagacctatgatttattaattaaaaactgaggagaggaggagaggttctttggcatgcccaggtagtgaggtatacatgcctgttcatggtgaaactgtgagaagtaactcccttgagttaatatgatttccctagttcactgacttctttaagaaatatgttctcttggctgggcacgatggctcacgcctgtaatcttagcactttgggaggctgaggcgggcagatcacttgaggtcaggagtttgagaccagcctggccaacatggtgaaaccctatctctactaaaaatacataaattagctgggagtggtagtacgcgcctgcaatcccagctactcaggaggctgaggcaggagaatcgcttgaacctgggaggcagaggttgcagtgagccgagattgcaccactacactccagcctgggcaacagagagagactgtctcagaaaaaaaaaaaagaaatatgttctcttgcatagttgacaaacatttgtttacttaaattctcctgtgaaagggcatggtttacactggattataagtaaaaaatgacaggtgtttgcaatgtttcaccttttctttttaagaaatgatatacattcaacattagatattaagagattttgctactggttccttgcataaaattttatcattttagaagctgcataaggagtctaatttaaaatgggaagggggcatagtttatgcactggggcaacatggtatttaagtacaaaaatgaaatgcactaatttttaatctgagatttattttcctttagtcggctagcttgatttctcagctttgttgtaataacataaacatttttatgtttatttataggtggctttaaccaagagagcagatccagctgagcttagaacaatatttttgaaggtcagtataaaggaatctattttgtttcttgtttgatttgtgttctataacttttaaatattattttcaaacagctctttatttcgttgttatattttgaaaaagtcccaaagtgtcagcccggcacggtggctcatgcctgtaatcccagcactttgggaggctgaggtgggtggatcccctgaggtcaggagtttgagaccagcctggccaacatggtgaaaccccatctttactgaaagtaccaaaactagccaggtgtggtggcacgtgcctgtaatcctggctattcaggaggctgaggtgggagaatcgcttgaacctgggaggcggaggttgcagtgagctgagatcgtgccactgcactccagcctgggcgacagagcaagactgtctcaagaaaaaaaaaaaaaaagaaaatcccaacatgtcttaagaggggagagccttacaaatacgtctgctttttaaaatgtaggtgactgtgatgacaacatggcttatattttaatttcttttatctcatgtggtgtaaggtatgtgaataaaagcggttgctggagtattcagttttgcaacccatttacctttccaggattgacccgtatagctttttctcctaggaagtttaaagctcattgtaaacatctcagtaatccttcactcatccatgggactatactgtctctccctggtagaagcctattgttgtggtcatcatcattatcatcactttatgatgactgcggtatcctgagaggaggctccagtatggataatactagatactagagcacaacagacaccatggaagtttgtgtcttatactggcatcttatatttccacctattttgtgatagtgggcagtgaatgattaatagaataaaagtctgtctcaggttccagacaccgaaacacctttatgttattcagctgaaattaaagtactcagaaaagaaaaggccacttttgtaagataatatacacacatataatatatatgtatatatacacacacatatatgatatattattaataacatatattaatatacacatattttatatatatatgtttttctaaacattatgaaaaggcagctgagttgtatggaaagaggaccagggtgtcaaatgagaaatttgatgtgtactgaatatggtgtagaaaggtattaaatctatgaacctctctttcctcatcacaatgtgttactattaaaactaattgagacatcaaggactttgaacatggacaggatatttgatattaaggagttggtattaatcgatgtttaggctgataatattctcattatgggaaatatagagtctatgttttagagatatacactgaaacatttttacagatgagactaccgtttctgagatttgcttttaaataatccagttttgttgagttgaggaaaatgagtaggcagtatgatgataacttttgaaattgggaaatggaatattgggtttattacactgttctctctactttgtatatgtttgaaaaattttcttttcttttcttgttttctgagacagagtttcactcttgttgcccaggctggagtgcaatggcgctttctcagctcactgcaacctccacctcccgggttcaggtgattttcaggctcctgggtagctgggattacaggcatgtgccaccacacccggctaattttgtgtttttagtagagacggggtttcaccatgttgatcaggctggttttgaactcctgacctcaggtgatctgcacgccttggcctcccaaagtgctgggattacaggtgtgagccaccacacctggtctgaacatgttcataataaaacatttttttaaattgtaacgattcagtgaggtaacttatatgaaaggtgtcctgcatctgatatgtgttatgtattgattcagtaaatgcttgaaattaagtaatgatttaagtaaaggagaaataaagactccaaaagcaaatgaattaaaagcagggatagttttgtggggaggaaaaaaaaggacacatttgtaaggagatttagattatacataaaaaatcaggattctggacacctgtaatcccagtgagaggctgaggcaggaggatggcttgagcctaggaatttgaggcttcagtgagctatgaatgtgccaccacattccagcctggatgacagagtgagaccctgtctcttaaaaacaaagcaatgttctttataaatttgtttttagcccagaaatacagtgtagagtttcttttttttctttttttttttttctgagacagagtctcactgtgtctcccaggctggagtgcaggttgcgcatgtcagctcactgcaacctctgtctcccgggttcatgtgattctcatgcctcagcctcccgagtagctgggattataggcatgtaccaccacgcctagttaatttttgtattgttgttattattatttttttattatactttaagttctagggtacatgggcacaacgtgcaggtttgttacatatgtatacatgagccatgttgatgtgctgcacccattaacttgtcatttacattaagtatatctcctaatgctatccctccctcctccccccaccccacaacaggccccagtgtgtgatgttccccttcctgtgtccaagtgttctcattgttcaattcccacctatgagtgagaacatgtggtgtttgtttttttgttcttgcgatagtttgctgagaatgatggtttccagcttcatccatgtccctgcaaaggatatgaactcatcattttttatggctgcatagtattccatggtgtatatgtgccacattttcttaatccagtctatcattgatggacatttgggttggttccaagtctttgctattgtgaatagtgccgcaataaacatacgtgtgcatgtgcctttacagcagcgtgatttataatcctttgggtatatacccagtaatgggattgctgggtcaaatggtatttctagttctagatccttgaggaattgccacactgtcttccacaatggttgaactagtttacagtcccaccaacagtgtaaaagtgttcctatttctccacatcctctccagctcctgttgtttcctgactttttaatgatcgtcattctaactggtgtgagatggtatctcactgtggttttgatttgcatttctctgatggccagtgatgatgagcattttctcatgtgtcttttggctgcataaatgtcttcttttgagaagtgtctgttcacatccttcacccactttttgatggggttgtttgtttttttcttgtgagtttggctgagttctttgtagattctggatattagccctttgtcagatgagtagattgaaaaaattttctcccattctgtaggttgcctgttcactctgatggttgtttcttttgctgtgcagaggctctttagtttgattagatcccatttgtcaattttggcttttgttgccattgcttttggtgttttagacatgaggtccttgcccatgcctgtgtcctgaatggtattgcctaggttttcttctagggtttttatggttttaggtctaacatgtaagtctttaatccatcttgaattaatttttgtataaggtgtaaggaagggatccagtttcaactttctacatatggctagccagttttcccagtaccatttgttaaatagggaatccttccccatttcttgtttttgtcaggtttgtgaaagatcagatggttgtagatgtgtggtattatttctgaggcctctgttctgttccattggtctatgtctctgttttggtaccagtaccgtgctgttttggttactgtagctttgtagtatagtttgaagtcaggtaacgtgacgcctctggctttgttcttttggcttaggattgacttggcaatgcaggctcttttttggttccatatgaactttaaagtagttttttccaattctgtgaagaaagtcattggtagcttgatggggatggaattgaatctgtaaattaccttgggaagtatggccattttcatgatattgattcttcctatccatgagcatggaatgttcttccatttgtttgtatcctcttttatttcattgagcagtgatttgcagttctccttgaagaggtccttcacatcccttgtaagttagattcctaggtattttattttctttgaagcaattgtgaatgggagttcactcatgatttggctctctgtttgtctgttattggtgtataagaatgcttgtgatttttgcacattgattttgtatcctgagactttgctgaagttgcttatcagctgaaggagattttgggctgagacgatggggttttctaaatatacaatcatgtcatctgcaaacaggacaatttgacttcctcttttcctaattgaataccctttatttctttctcctgcctgattgccctggccaggacttccaacactatgttaaataggagtggtgagagacggcatccttgtcttgtgccagttttcaaagggaatgcttccagtttttgcccatttagtatgatattggctgtgggtttgtcatagatagctcttattattttgagatacgtcccatctttacctaatttattgagagtttttagaatgaagtgctgttgaagtttatcaaaggccttttctgcatctattgagataataatgtggtttttgtctttggttctgtttatatgctggattacttttattgatttgcgtatgttgaaccagccttgcaccccagggatgaagcccactttatcatggtggataagcattttgatgtgctgctgaatttggtttgccagtattttattgaggatttttgcatcgatgttcatcagggatattggtctaaaatgctctttttttgttgtgtctctgccaggctttggtatcaggatgatggctggcctcataaaatgagttagggaggattccctctttttctattgattggaatagtttcagaaagaatggtagcagctcctccttgtacctctggtagaattcggctgtgaatctgtctggtcctggactttttttggttggtaggctattaattattgcctcaatttcagatcctgttattggtctattcagggattcaacttcttcctggtttagtcttgggagggtgtatgtgtcgacgaatttatccatttcttctagattttctagtttatttgcgtagaggtgtttatagtattctctgatggtagtttttatttctgtgggatcggtggagatatcccctttctcattttttattgcgtctatttaattcttctctcttttcttctttattagtcttgctagcagtctatcaattttgttgatctttcaaaaaaccagctcctggattcattaatttttggaagggttttttgtgtctccatctccttcagttctgctctgatcttagttatttcttgccttctgctagcttttcaatgtgtttgctcttgcttctctagttcttttaattgtgatgttagggtgtcaattttagatgtttcctgcttctcttgtgggcatttagtgctatagatttctctctacacactgctttaaatgtgtcccagagattctggtatgttgtgtctttgttctcattggtttcaaagaacgtctttatttccgacttcatttcgttatgtacccagtagtcattcaggagcaggttgttcagtttccatgtagttgagtggttttgagtgagtttcttaatcctgagttctagtttgattgcactgtggtctgagagacagtttgttatagtttctgttcttttacatttgctgaagagggctttacttccaactatgtggtcaattttggaataagtgccatgtggtgctgagaagaatgtatattctgttgatttggggtagagagttctgtagatgtctgttaggtctgcttggtgcagagctgagttcaattcctggatatccttgttaactttctgtctcgttgatctgtctaatgttgacagtggggtgttaaagtctcccattattattgtgtgggagtctaagtctctttgtaggtcactcaggacttgctttatgaatcttggtgctcctgtattgggtgcatatgtatttagaatagttagctcttcttgttgaattgatccctttaccattatgtaatggccttctttgtcttttttgatctttgttggtttaaagtctgttttatcagagactaagattgcaacccctgcctttttttttttttttccatttgcttggtagatcttcctccatccctttattttgagcctatgtgtgtctctgcacgtgagatgggtttgctgaatacagcacactgatgggtcttgactctttatccaatttgccagtctgtgtcttttaattggagcatttagcccatttacatttaaggttaatattgttatgtgtgaatttgatcctgtctttatgatgttagctggttattttgctcgttgcttcatacagtttctccctagcatcgatggtctttacaatttggcatgtttttgcagtggttggtaccagttgttcctttccatgtttagtgcttccttcaggagctcttttagggcaggcctggtgttgacaaaatctctcagcatttgcttgtctgtaaagtattttatttctccttcacttatgaagcttagtttggctggatatgaaattctgggttgaaaattcttttctttaagaatgttgaatattggcccccactctcttctggccagagatctgtcgggagatcagtttctgtcgagagatctgctgttagtctgatgggtttccctttgtgggtaacccgacctttctctctggctgcccttaacatttttttccttcatttcaactttggtgaatctgacagttatgtgtcttggacttgctcttctcgaggagtatctttgtggcgttctttgtatttcctgaatttgaatgttggcctgccttgctaggttggggaagttctcctggatattatcctgcagagtgttttccaacttggtttcattctccccatcactttcaggtacaccagtcagacatagatttggtcttttcacatagtcccgtatttcttggaggctttgttcatttcttttttactcttttttctctaaacttctcttctcgcttcatttcattcatttgatcttccatcactgataccctttcttccagttgatcgaatcggctactgaagcttgtgcatttgtcacatagttcttgtgccatggttttcagctccatcaggtcatttaaggacttctctacgctggttattttagttagcctttcgtccaatctttttttcaaggtttttagcttctttgctttgggttcgaacttcctcctttagctcggagaagtttgatcgtctgaagccttcttctctcaactcgtgaaagtcattgtccgtccagctttgttccgttgccggtgaggagctgcgttcctttggagcaggagaggtgctctgatttttagaattttcagcttttctgctctgttttttcccccatctttgtggttttatctacctttggtctttgatgatggtgacgtacagatggggttttggtgtggatgtcctttctgtttgttagttttccttctaacagtcaggaccctcagctgcaggtctgttggagtttgatggaggtccacaccagaccctgtttgcctgggtatcagcagcggaggctgcagaacagcaaatattgctgaacagcaaatgttgctgcctgatctttcctctggaagcttcatttcagaggggtacccggctgtgtgaggtgtcaatctgcccctactggggggcgcctcccagttaggctacttggggctcagggtctcacttgaggcattctgtctgttctcagatctcaaaccctgtgctgggagaaccactactctcttcaaagctgtcagacagggacatttaagtctgcagaggtttctgctgccttttgttcggctatgctctgcccccagaggtggagtctacagaggactcctggagctgtggtgggctccacccagttcgagcttccaggccgctttgtttactactcaagcctcagcaatggtgggcgcccctcccccagcctcactgccaccttgcagttggatctcagactgctttgctagcaatgagcgaggctccgtgggcgtgggaccctccgagcgaggcgcaggatatattctcctggtgtgccgtttgctaagaccgttggaaaagcgcagtattagggtgggagtgacccgattttccaggtgccgtctgttaccccttcccttggctaggaaagggaattccctgaccccttgcgcttcctgggtgaggcgatgcctcgccctgcttcggctcacacttggtgggctgcacccactgtcctgcccccactgtccaatgagccccagtgagatgaccctggtgcctcagttggaaatgcagaaatcacctgtcttctgcatcgctcacgctgggagctgtagactggagctgttcctattcggccatcttggaaccatccaccaatttttgtatttttagtagagacgggtttccccatgctggccagactggtcttgaacttctgacctcaagtgatctgcctgccttggcctcctaaagtgctgggattacaggcacgagccaccatttctggccacaatacagtatacagtttctaagttggaaaaggattctggaggatgaaagtccagaaaacagaaaagcatttgttccttacctaagctgatctctatggttgtgcatgttgggaccaccatggttggaatgaggtctgtatgagagaaccagagaaggtcttcgtatgtgcatttaaggtgtgttgatattgtaaaactccagtgacagaaatctgaaagatcacttgcagaaaagtaactaagtgggctgccaaagatcctatcaaaatggaaagtagctcattagcttaagctggtaaagaagtcatcgttctttgaaccgaggacctatctgttacttctgttttctaaacaagcaagagtggtgggcatccttctgacaggaagtgggaacaccatagagggtgtctcaatacatggtgcatcttacaatctcactggttggtgtgatccattgataagactccacttaaaggctgtgtccacctttcgaggaggccacatggtccctggagaagctaggctgagaccttagtttggaacgatgtatctttgtcagctgctacatccactttcagcagccagcaggactatactgggggagagtctaattgatcaggtagacctagagagggtgagaattcatgcagagttctggagagacacctgtagtgtttctgtttaagtgcacttgaaggccgagggtggaatctttggtataaatggggaagtactctcttcccttggggtggctgggactatgtgacttttgagtaacagtttgtgtggcttggagtcctaagagatgacgtcagggggaccatacctgaagaaaacagcagtcagcagtttgtggaaaggattgtggatctggcaaaagttctggtgatctcaccaggcctggatagtgtggtaccaacccaaatctgccttggcttagcatgctaaggatgtcaggtttaccatttatcacagatggtattgtggtgaggggaagaacgggaaacacagcaatgtggggaccgtgccaggccgagcttcttagttaattatggatcagcagtaagcattctgtaaacctgtctactttgctgattttctgtgactttttcctgacttgactttcttcctagtaaaaattccatgtgaaatatcccagccttctctctgctaacctgtgtaaagagaggattcttctttagcttgggaggtggaagggagcttcattgcagccttcacaccaggtgtgatggtagcaggaaagttggcagctctgtagatcagcgacagccagtggaactgagccagataaggaaagagggctcctaggggattaaaatgagcccaattctgcccttttcatttgtttgagaatttagaatcagttccactgtttttttgaaggtacctagatacagtgtcatggactgggtgtgtatcaatgcatacatcatggctcctgtccattaatatcagagtgagaactgtgtgtaagtgtaaaaaaccccagaagccatgatatgattgataagtagtgtacaggattaattagcagaagatggtgtggtctaattatatctttctatggagagtcattaagttatggagaggtggtaatgtttgaattacgctcgaagatgagtaggtagagaagggtttgttggcaatggaagacctttttaggcaaagaaaacaacacatacaaagtaaagagctgtcagagtgccacaggtgtggagggaatggctaaacacttgggctggctcggggcacaggatcctgggtggtggtagtcaggacaggacttgttataaaacatgtggggctaaggcatacgacagattttttttttttttttttttgagatggagtcttactctgtcacccaggctggaatgcagtggtatgatcttggctcactgcaagctctgcctccccaggttcatgccatcctcctgcctcagcctcccaagtagctgggactacaggcgcctgccaccatgcccgggtaattttttgcatttttagtagagatggggtttcaccgtgttagccaggatggtctcgatctcctgacctcatgatcctcctgccttggcctcccaaagtgctgggattacaggcatgagccaccgtgcctggccaacgacagatgttttcttatggaggatgttcttgtggcaagtgtcaggtaatgtttcatctagatgtagaagttaaagtctaggaagtcagttttgtttctagtcttaacgacatgcgtttttctgtttgcctagtacttttggtgttgcttcctgttagtttaaacagatgtgtattgagtgcctgccatttaaataaaacaccaggaaactctgtggtgagtgggaggtgcaaaagatgtataacaatgaccacatcttaaaggagctcagattttatataagagaccagatggataggcatgcaggaggtaacaaagaatcttaaagttggcataccccaagggcctgcgttgtggttaaagcaaatgctgtaggaggtggaaggagggagcagcccccattgtggagagtggtcagggaaggcccttaggagagagaacttggggagtctcagggacaagttggagaggcgacaaggaacacgtttgagggaaggcctggagatgagttgaggagaaaacaacctctgcaggttgaaggagtattgctcatcctttaagtgtttatttaaatacaactctggctcaaagtatgctgagtatcacagggtgtgggtgacaggattggaaaggtaattgggggtttggaattccactaaacagtaggaagcattcgaggttttttgacgaggagatgggtgtgagatttgattggtgcagcaaggccacaagttaggcagccttagggttgcggcagcaggaggaatggagaatggcaagatagagtcactttgaaagaatatttgattaagatggctgattttttataatggatgagagagagcagagagaaaatacggtctgagtgcagagaggtgccagtaataagaatagagaaagtgagagggagccagtagctcgagggaggaaaagagatgatgcgtgctattgtattagtaacagagaaagtgagagggagccagtagctccagggaggaaaagagatgatgcctactattagtaatagagaaagtgagagggagccagtagctatggagagcaaaagagatgatgtgtactattgtattagtctgttctgttctcatgctgctaataaaggcatacctgagactgggtaatttatcaggcaaagaggtttaattgactcacagttccacatggctagagaggcctcacaatcatggtggaaggcgaatgagaaacaaattctcgtcttatattgtgacaggcaagagagcttgtgcaggggaactcccatttataaaaccattggatcttctgaaacttatggggagaccgcacccatgattcagttatctccacctggccccgccctggacacatggggattattacaattcaaggtgagatttgggcggggacacagccaaaccatgtcaactgtttagaagtatatagtctcaagtaactaaatctctgtagcgaaagatgggaaaattggggaaaagggctgaatgagaaacagaagacatattacagagtaacatagtgaattacacttggatttttataattgttttgtcagcaaaagcatgatatccacttttaaaatgtctgtaggcaaattttgaaaaacagttaattctgtttttggaaactttttatcacatcaattttatatgcattgaaaatttaaaaggcagatacataaacaaaagtaacttgtgatctttgtgtaggaagatagatatttatatatttatttatctctcagtctatgtgtctctctgtatgtatataattttttttccccttaggagaaaaaaatactgttttctatctagttttttcccttacctgctatgttacaaatactttttcctataattcagtgtgcttctatattttttttatttttgtaaattattttgtttcttccatgatgatttagaggaactacttttaaaccagtacaaatatgtcataaataatatctggccatcttctaaccagttgagtaatttcttgcgcagtaagttacctcacatcttttggtaagcaatacgttaaatttgattagtaaagacattatacagttaattaggacacaattaaaatttgctttaaatatttctttgagggagtggacaccacatttttacaatccagaggtctttttttttttttttttttttttttaaacacctatttgccatgaagtcataggaaatagcttccagcaatgcaagctccttcccgtgagttctcacaaagtgtgcttctctgcgtggagcaggctgacaccaggtacaccttctttttctgatcatttttcttcatgcatttcaggaagctatctcagctcttagagtgcttaatgtgcccagcacacacattgattctcttagcaagagtcttgcccttaacttgttgtttacaacagtgccaacagcatgctgggggcattgtagactcctctacttttgccatggtaacacttgtaaagcattcctttttgaacagtactcattcccttaatgtctacaatatcacctttcttatagatttgcatatatgtggccaaaggaacaactctatgttttctaaaaggcctacagaacatatattgagtgcctctcctctttccctttgtgttcatcccattttggtgaattactggaagatggtggttccagctgaaaggaaccctactacaatatttttaatgctgcataatattcctacatatggctgtttctgttttgccctaacttattgaagcactatttaattattgaatatttagttgtttcctgtgctttactatcatgacagcactgtaatgatagtattgtacctacatttttgcatatagctagcattattttcttaggataaattcctagaagtggcaccattgggttagaatgggtttagaacatattaaggcttgtgattccccttggtagactgcctctcatgaaggttatttcaatatttattttgggtgggaacacggaagtgttcatttcctacattatatcaactcagattattatgagtttttgttgcagcagcaacaaaaaagactttatgccaatctgttggttgaaaaattgtatcttatttaaaattttcatttttaaataaatagagcaatatgtttattggccatttatgtttcttaaatatgtttttaactttattgtgacaattttcagacatacagaaaatagaatagtaaacacccacataaccaccatctgatttaaagtaatacttgtcatgttagtttatacatttttttctgatttatgttaataaatataacttagctatcactataattcaccctaaataatttagcatagagcttcaaataataaaaacaatctcctacacagtcataataccattgtgcacctaataaagttaatgataattccctaatataaaatacccaatccagatgcaaatccttaaattatattttgttccatccctataacagggaatcaaagtaaaggatgggcagatgcagtgacctgttgtgtgcaccttctcagtggttggaaaacaatgtaggggatttgtccttcagtcccaggatatgagtgattcatgacaaaatgggtagctggatgattatggttctaccctggctcattcacagcttacaaacctttatcaatttactgtgactgatggtgagcaggccagataggacccctgccctcggggtatgggcatttgtagtgataggttccttctggtttcctttgctgtcatcttcactgagtatggtggtatttcttggtgatgacaataagtattatacaaggttgcatgaggaatcctaaaactcttcccattttgcaggtgtatgtttaatcataataaaactcctgaaaattgcaagggaggaaggcttcagctcactagtgaaaaatattcccaaagaaggattaatgacattttaaagatgtggtggatataaggatatagtccgttccccctatagggaccctctgctcactgctgcagggagagcagagctgcatttatcactaccctcatacatatttttattatggtctgcctctgtccatcaatcctaaggagcaacctttgacatgtttacttaaatcacagagcagactgcccagccgtggtgatgagcttgttttaaaaactggagaaaactatttctgtgcccagattaacatgctcttatatttaagaaatgatttctttattgcatctaaaaaaatgaagctgataatatctctcaaagacttctaaaatgtaaactgttgaaatataaattgaatgcatacatcacaaatgtacagccatgaatactcagaaagtgagtaggcccatgtaacgagcatcccagaggccctctgatgccccttctgatcagcacccaccaagggtaaccagttgtctgaattctggtcactgtatgttaaaactaactgtatgtaagttttgcctgtttatttcactttgcgtgaatggaattatacgctaggttttcttatgtttcttttcttttacccttaggattcgtctgttgtcatatgtagttggagttagtttattcttttttttttttttttttgagatggagttttgcacttgttgcccaggctggagtgcaatggggcggtctcagctcactgcaacttctgcctcccgggttcaagcgattctcctgcctcagcctcttgagtagctgggattacaggcctgtgccaccatgcctgggtaatttttgtatttttagtacagacggggtttcaccatgttggccaggctggtctcaagcgcctgaccttaggtgatccacctgccttggcttcccaaagtgctgggattacagatgtgagatgccgtgcccagctggagttagttttttctcattgctgtgttgtattccattgtgtgaattcaccacaagccattaatgtatcctactattggttgacatttgtgttatttttagttttttggatactacaaataatgccgctgtgggcattttcacatagtttttgtgtatatgcacacttctgttggtgatatacttctgattgaaattggtgggcttgtggttgtatgttcagctatagcagatactgcccagcatttttctaaaatggtttactcctttattctcataccatcagtgtgtgagagtaacatttgctccacatttttgccatcacttattattctttttcgttatcttgggggtatggcatggtattgcattgtaggctttttgttttatgttttgagacagggtctcactttgttgcccaggctggagtatagtgatgcaaacatggctcactgcagcctcaatcttttgtgctcaagcgattctcctgcctcagtctcccaagtagctgggactacaggtgcacgttaccctacctggttaattttttattttttgtagagatggagttccgccatcttgcccaggctggtcttgaactcctgggctcaagcgatctgcccaccttggcttcccaaagtgctgggatgacaggcatgagtcagtgtgccctgccttgcattgttttattttgcatttcagtggaatttttttagggagcagcaacttgataatgattctaaaggtcatttgtggaaaatcaaggagtgatcatggccaaaaaaatttccaagtgtaaaataattcaatgtcttttttaaacctttcattcttttaaaaaaatatttatttgaacatgtttcactatctaccaggtactagtctgggaatttgaggacacagcagtaaaaatgagagaaaaaaaattctgtcctaacagaactttccctctagttatagcatgtaatcttgcaagagtagacgagacaattgaaaaggatggtcctgaaacatctctgactgcagtgatgacaagagctgtcattcgatcccagcattctcccatggagcgtaggtcagcctcagaatacatgttggccctaggaagcctttgccagttcatcagaactggtactgcagatggagccattttgtcacgcctttccctggtgaccatatgataattaagtatgtgataaacatggcatcctaaagacctggaagagagaatgatttgctttgtgttcgtgggacaaccaagagattaagtggaaaaattaaagttgggggattcttaccttagatcacacacaaagataaagtactaatgtactaaaacttaaaggtaaaagataaacctactttaaaaaaactcagataaactctctgatatttagtcttgaaatgaagaaagactggtgatatggcttggctgtgtccccacccaaatttcaccttaaattgtaataatccccacatttaaagggtggagccaggtggagatcattgagtcatgggggtggtttccctcatactgttctcgtagtagtgaataagtctcatgagatctgatggttttataaatgggagttcccctgcacaagctctcttgcctaccgccatgttaagatgtgactttgctcctcattcgccttccaccatgattgtgaggcctcccagccatgtggaactgtgagtccattaaacctctttttatttataaattacccagtcgcaggtatgtctttattagcagtgtaagaacagactaatacagctagtgtctaagcttagaaaagtaatggaagaaatttcaaaggagaaaaaaattctatacactcaattatataaaaatatcaaactggaaaaatatttgcaacaaatataatagaccaaagtgagtaaagggcatgttcacacactgttggtgggagtgtaaattggtacaatcttttccggagagcagtgtgataataagtaccaagagcccagaagttcctctcctttgactcaacaatttctcttctgggagcctagcctttgaaaattgccaggaatttggacaaatgttatattcaaagcttactaccttagctttatttaaaaatacaaaaaactggaaatgtctactggtaggagaaaagttaaattgtatagtaaaataaattattcactatcaggggcaaacttaggtataattactaagtcataagattgctgtaattagcagtgatatttcctttatattttcatcttgttttggctcagttaggaaaatcaaaatataattctttacatgtccaaaaagccgaattaaatgctaactgaagaatagtaggatcactggggcatctttgagcctttcccttgtagtgtgctaaaaaaaatgttaactgtaagacaatactatagaacatttatttaatataaagtacttattgtgtatagggcgttgtgctaagtatatgacatgagtatctcatttaaatatttctagcatcagtcttatgaagctgtaatgttattctattcattttgcaaatgaggaaccagaggtaccaaaagctttagttacttacctgaggccattcaagtggtaagaggcacagtccagacccgtgggatgccaaagcatattactactgagtatctgagcaaagccttagtctgcattggaattaaaatgtagaaataacaagtgacttttaaaaacagttttaatcaggtttaactcagattagagagagaggggagacactgccctggcacttcactgcgcaccctccatcactatggctaccagtgtggttcttatcacccagctaggcttgttcttgtagatgcactatccttgcctcctcagtccccaaaccactgctttgtccccaggatcaagaggccgtctcctgcttcataaggacaccacatgatcccatgtcgtttctcagcatttctgcccttagggctccatgcaacagaaattaatgggctctctcttatccaggctggagtgtatcacattaaaggccagacctaggagaacactgtgaggaagcgttgtttgccacctaattcttactgagcatttctgcatggtaatgccttagaatggagaggacagtaactagagcagcatttactgcctccctccataagattgcccaagatgacacgcacttagtagtttgctgtccagcttagcttgtttgccatcctttcttgtatcattgatgctcttaaagcaggaatggggcaaaggaattaggttgtttgcctccatgacttcgtaattccactttttttttttttttaaaaagctatgtgcctttgctaaaaaacaagacatagtttgtctttccaaatttctataaaccagggtttctgaacctggacactgcccacactttgggctggagaactgtctgttgcagggagtcatcctgtgtattgttggatgtctagcaacatccctggcctctacctgctggagccagtagcacccttcctcacatgttatgacaatcttaattgccatcagatattgccaagtgtccctgtgggaaaacattgctcccagttaagtttataaacataaaacttgacttgttttttctttgaactgttgggagataatggtcattatgaagcgtacatgatcatatctgatattttatcgtttggatattttcaactttttcacatatcactctcatgattatatactgttgaaaatcaaatatataaaatactgtttttcttttttttaaacagtatgcaagcattgagaaaaacggtgaatttttcatgtcccccaatgactttgtcactcgatacttgaacatttttggagaaagccagcctaatccaaagactgtggaacttttaagtggagtggtggatcagaccaaagatgggtatgtttatttttaattattttatttaattctttttgtttgaaacagctttcttttgctctaatgaccaggaagtcattaaatgtataccttcccatctcttaggaccattttctgtacttactactattattattacattatttgagtaataatgtagttccttcaatcattgtttcaagttggggattcaatatgtatatatttgactcttttaaagaatgctttatcgtatcagagaactattattgtcaacaaggtggtgatgtgcagatgtatgagagtatttatatgcctttggtatttttcaaggcagctgtaaaattgtgagtaaatgtacaacatagctctatgaacgttacttttctataatctttctttctgagcaaatcgcctttaaaaattcacaggtgattccaaagccccaagaaaggcactctgcaaaagctagaggaaagaaactgtaccatatagaatcaaataggacacgttgcagaatgcctttggattctttttttccctaccagtcttctctgcttccattttgttggaacttttttccctccttcttttgaggcaggttctcactctgttgctcgggctggagtacagtggcatgatcttggctcagtgcaacttctgtctcccaggtacaagctatcctctcacctcagcctcctgagtagctggtatcaaagccgtgcgccaccatgcccagctaatttttgtatttttttgtagagacgggattttgccgtattgcccaggctggtctcaaactcctgggctcaagccatccgcttgcctctacctcccaaagtgttgggattacaggtgtaagccactttatctggccttctgcttacattttaaaaatgggttttccttaagctgtataagattgcaatggcttttaccattacacgaagaattttggactctgaactcttgctaatcaaacaccaatgtctgctaatagccaaagtataatgtacaagaactaaccttctctaggtaaactgtaaaggaccttgccttcttccttctctaggtaaactgtaggagactttgcttctgtccctgctgcttgccagcacccttttgacagattgcagttacctatcactctgaggtggagttctctagctctgaattttctctatttattggaatcttcatgtgtctgattttcccacatgcagcagtttgagatataacccatgtataatgtctttatgtacttcgaatactctcagttttcactagcactttccttttcttatttatgcacttgtcacccaatttttttattatactttaagttttagggtacatgtgcacaatgtgcgggttagttacgtatgtatacatgtgccatgttggtgtgctgcacccgtcaactcgtcgtttaacattaggtatatctcctaatgctatccctccccactcccccgaccccacaacaagccccagtgtgtgatgttccccttcctgtgtccatgtgttctcattgttcaattcccatctatgagtgagaacatgcagtgtttggtttttttgtccttgtgatagtttgctgagaatgatggtttccagcttcatccatgtccctgcaaaggacatgaattcatcattttttatggctgcatagtattccatggtgtatatgtgccacattttcttaatccagtctatcattgatggacatttgggttgattccaagtctttgctattgtgaatagtgccacaataaacatacgtgtgcatgtgtctttatagcagcatgatttataatcctttgggtatatacccagtaatgggattgctgggtcaaatggtatttctagttcaagatccctgaggaattgccacactgacttccacaatggttgaactagtttacagtctcaccaacagtgtaaaagtgttcctatttctccacatcctctccagcacctgttgtttcctgactttttaatgatcgccattctaactgaactacaaaccactgctcaatgaaataaaagaggatacaaacaaatggaagaacattccatgctcatgggtaggaagaatcaatgtcgtgaaaatggccatacaaggtaatatatagattcaatgccatccccatcaagctaccaatgactttcttcacagaattggaaaaaactactttaaagttcatatggaatcgaaaaagagcccacattgccaagtcaatcctaaaccaaaagaacaaagctggaggcatcatgctacctgacttcaaactatactacaaggctacagtaaccaaaacagcatggtactggtaccaaaacagagatatagaccaatggaacagaacagagcccccagaaataatgctgcatatctacaaccatctgatctttgacaaacctgacaaaaacaagaaatggcgaaaggattccctatttagtaaatggtgctgggaaaactggctagccatatgtagaaagctgaaactggatcccttccttacaccttatacaaaaattaattcaagatggattaaagacttaaatgttagacctaaaaccataaaaaccctagaagaaaacctaggcaataccattcaggacataggcatgtgcaaggacttcatgtctaaaacaccaaaagcaatggcaacaaaagccaaaattgacaaatgggatctaatcaaactaaagagcctctgcacagcaaaagaaactaccatcagagtgaacaggcaacctacagaatgggagaaaattttttcaatctactcatctgacaaagggctaatatccagaatctacaatgaactcaaacaaatctacaagaaaaaaacaaacagcgccatcaacaagtgggcgaaggatatgaacagacacttctcaaaagaagacatttatgtagccaaaagacacatgaaaaaatactcatcatcactggccatcagagaaatgcaaatcataaccataatgagataccatttttttttttttaatggaaagaacctcctgtaaaatgaaggccttgatgactgggagggagcaggcagggaattaggtgatctacttgttgcagtattctggaggattgttggattatgccttctctctctgttccagcggcagaaggtttcctttttaaccttcttacctttgttttctaccctaaccccaagggggattctttgcttggtaggaaaatgtaatgtatgagcagggtggtgcaggaaaaggctgggctatatttcacactagttcatttaagctgaaactatgcaaaacacagacttatgccagcaagcatttttctgtggaaaatctagttgttttttcacctcctagaatggctcatgtttcagaggaagtgtgaccaagttcacatgcaacatggattatctgccttaatatttgagatcagttttttgtaatttggaaaaattttaaactacagaaaaaaaaatctgagtcacaaaaaagttgagagaagaatatggtgagcacacaatctatacccttcacctagattgactttttattaaaatttttaccatctttgtgctgtctttgtacacacacattttctacacacaaacacgtacacacataatttctttttatggttggaacacttaagtgtaaattgtacacatcacaatatttcagcatttatcttctgagactaagaacattctcctacataaccccccatgctattattgcacttaggagaattaatgatcatgtcaagtatcagctaatgtctattccatatttaaatatactagaactttcaagtatatttgcagatctggtgtgttcacctcccttcccaacctcaaatggctctttgcctattcttgtttctttctttttttgttttttgattgaagattatactgcagttagttatgtctcttttactctaaaacagaacagaaatattatattgtttttcgtgatattgacttttgaaatccaggcgagttatttggttgaaggtcctgcattctggacttgtctgattgtttcctcattgtctgattcaattcaggataaattctggggtataggttaggagctattctatactacccattgtatctcctcaggagggatcgtgtccaggtgttggtgatgctgtttgataagttggtgaagctggcatccacctgatatttccattgtaaaggctacattttgttgttatatgagtagataatttgtgggatgatatgtcaagatcacatggatattttctccagcaacctttcacctgatggttttagcatccatgatgattctttgctgaaccggttattctattgatgtttaaaaggtggcgatttttctaatcctataatttctcctgtatatattgtccaacattccttggtaaacagaaactttctttcctcttcccccttttctttgtcttttaatcttttttatcaacataaattactggatttgcatactttaattctgtattatactccattaccagtatgcccttacaggcaaagcgtctcataactggtcagtgggagggctgggcctcaagctggcttctcattctcagctttcaggtgctccttgcttttggcaaattagttgttccaggctcaccttggaccgttcctgcctttgacctggaaatcacttttccccccaacaagaagctctgattccttttatttaggaatggtgcttaggaacaaagctctgggcactggcttattgttaccagggtgttactgcttctctgacttttcagtgaaaagagctgggaaatatataaactttaaaaaattgaaagttcataataacatctccttttaaatttaacattacaggatttttctttgttttttaaattttgtgtctctctctgcgaaaattttggttgctacatacattaatatgtttatgggcctttatttgatagaattggaagacctctgaaggtataagaaagagcaaaaatgtttaaaaaataaatgaataaataggctgagcgtggtggcttacgcctgtaatcccagcactttgggatgccgaggcaggcggatcacctgagatcaggagttcgagaccagcctggccaacatggtgaaaccccatctctactaaaaatacaaaaaaattagccaggcatggtggccgtaacctgtaatcctagctactcgggaggctgaggcaagagaatcgcttgaacccaggagctggaggctgcagtgagccaagatcacaccattgcactccagcttgggtgacagagcaagactctgtctcaaaaataaaataaaataaaataaataaaataaaataataaaataaattggaataccttctgatgtgctttgtgttctattttatcccccttcccattaatagacatgctttttctttttttaaacatataatatccaaaaatacagccttacatttatcagataacaatgtgtaatatatattttacatatatagtataacataatgtgtgtattttctcaaaagcttgtgacagatttgaaaggccgactttgttttcttggttttatcgatgagataactgaagctcttggtatttaagcagtttgtagctaaaaggtgctcaggcctgtcaggttttaaattccttggccttttcagtgttctgagctgcctcttctcataatctcacagtcctcttttgacattttcttttagattttgtattatcttaaatctcagtgttttactgtgacacagaaaatgttagatggccttaatcctttgccctataacaaaccttttagttgcaaaaactgtgaacatctcagttatttttttcctttcatttctagttggcgtgtagtaattgtacatattagatacagagtgttagttcagtacatgtatataatgtgtaataatcaaatgagggttttatatcaatttgttgactaaatttagttaagtgtactaagaagcatttttacgaaagcccgggaatagaagctgtattttgaattctgttactcaccttaacaggctgaataatggccacccaaagagatctattcctaatccctggaatttgtaaatgttaccttatttggaaaaagggtctttgcagatgtcattaaatcaagaattttgagatgaagatattactctggattgtttaggtgggctctaaattccatcacaaatgtcattagaagatagaggcaaagggagagttgacacagaaacagggaagaggaagagacggggtgaccacagaagtagaggttggagcgttgcagccataaaccgaggaatgcctggagtcaccagatgctggaagaggcaagaggggattttccgcaagagcctttggagagtctgtggccgtactgaactcttgatttagggcttctcatccctagaactgtgatagcataaattttgttgtgttattatgggaatttgttttgtttatttatttatacttatattttattttatttttagacaaagggtcttgctctgttgcccaggctgatctcaaattcctaggctcaggctatcctcctgctttagcttctggagtagcagggattacaggcatgtgccactgaaatcaggtatttatatttctcttttttttttttttggagatggagtcttgctctgttgcccaggctggggtgcagtggcacgatctcagatcattgcaacctctgcctcctagttcaagtgattctcctgcctcagcctcctgagtagctgggattacaggggtccgccaccgtgccctactaatttttgtatttttagtagagacagtgttttaccatgttggccaggctggtctcgaacttctgatctcaagcagcccacctgccttggcctcccaaagtgctgggattataggtgtgagccaccgcactcagccccagctatttatattttctaattgacaaaagttgaatatatttatgatatgcaacatgatgttttgaaatatgtatacattgtagaatggctaaagcaagctaattagcatgtccattacctgatatacttatttctttttgtattgagaacacttaaaatctactcttagcaattttcaagtatacaatatatgattattaagtatagtcaatatgttgtacaataggtctcttgagcttactcctctaactaaaattttatattgttggaccaacatcactccagggcctttccccatactgtccccttcccccaagggaggccctggcaaccaccagtctgctctctgtttctatgagtttgacttttttagattccatgtgtaagtgagatcatgtagtatttgtctttctgtgcctggcttatttcacttaacatattgtccttcaggttcatccatattgtcacaagtgagaggattgcctttttaaaggcttaatagtattccattgtgtgcatgtatcacattttcttcatccgttcatctgtaatgggcacttgagttgattgcatatcttggctatggtgaataatgctgcagtgaacctgtaagtgcagatgcctcttcagtgtaccagttttattttcctgttgtaatttgtcacagcagccccaggaaatgaatacactcatgtagctgttttttccgggacgttagaaagcttatagttgtgaagaattttctttgccaagggccagcctgatccggaaaaaaacctttttctagtggtagttttggcttgatccagacattttccagtcagtgacccctgttgtcaactgtctctgtgagggcatggctgcttcctaaagacttcacctatgtgtgggctgggatggaactctgggcagggaatttaaatgcctgtgcacttacggccttaacacctccagcttgctgagagagggatcctgttttctgtagcactcttgtttctagtggaatgatgcatgagtgccttgggtacattggtcagccttccatgttggagcttctctctgaacactctccagttattcagcagctctttgggaacctcatctctgtgcttggcacagttgtgtatattgaggataacatggtgaatggaaaaaaaaacacagtgcttgttgccctcttggagcttctaatttaatggagcagacaggtattcatcagggagcctgaaataaatgtgaattgatgtagtgatactgctatgaaagagagagatggtgtgagtaacaccaaataagggcttcatttggactgggaaattgggaagactttccatgagtgacatctgagttgcaggagttggaggtgggagtacagaggacagagagttgcaggcagagggaacagcagttgtaaaggtcctgtgttttgaaatgcagaggctggcttgcctggagcatggaagtgcagggcatggtggtgggagaggtgggctgtgcccagactgtgtagggacttgtacctcatattaaggattggggttctttatcttgagagtgctggagagccatcaaaggctaatttgaatgaggggattggcacgatttgcctgtgtaacagcatacttgctgttaatactctttgttgtgtttagacctccctgcattccactgttttaatctacttaatgatggatttaatcaatttatgaagttccgtaagggagatgagaggagactttgagtgtctagggctggaagccttttgtttttggtgggccttaatgaatgaagagggcttgtcccagcatttgaggaggaggtgggactctaaggacttctcagggcctagaccttactgtaccacgtaactgaactgtaccttttagatttggttgtgattattattttttcattcaaaatgagaataaagctttgtatatcttctaagtataatttttatacattgttcatacaacttacctgttaagagcaaggtgaaaattcttcctttgatctttgcacacgttctatttgttgttgttactgactgttatctcgttaaagggagtcaaggctaaagaactgtcttcacttgtgactgaccttctcacctgggaagaccacatgggactagaataagctggaggtgttgagtgcctgacttactgagggttacgggtaccaagcactgtctgtgaggtgggcaccgggtggctcagggatccagttggcttgctagggtcacaaaggaatttaccacacatatgtctttcatctccagtgtggaacctctttgcactccatgtgcaaacagaagttggcacttcttttggaaaagggaatgttagatatctcagtttgctagtgatgaagctgacagattcaccataccgccttgtcagccccctgccactttgttgtaccaaaatgacagcaatataatcaaacccttaatttttttttttttttttgagacagagtctcaggctggagcacagtgggatgatctcagctcactgcaacctcccttactgggctcaagcaattctcctgcttcagcctccccagtagctgcgattataggcatgcaccaccacacccggctaatttttgtatttttagtaaagacggggtctccccatgttggtcaggcttgtctggaattcctgacctcaagtgatccacctgcctcagccctcccaaagtgctggaattacagacgtgagccactatgcccggcctcagataattcctttctgttcagagtaaagagattgagtcctgggacagttcctgttttgatgcatgaagaataaaggcatcaaagaagaaaagatgaaaaagaaatctaaagtttagaaatatgtggcctatataaataaagcatgttctctgcctttcctatgtttgctattctttttctgaggaaagaatatatggccttttaaagatttcacaaggtgaaggaggatataataatgttgatgataaaatcatttttatatacctgttttcattttgtgaggctgtcgtgatgaaatccaggccttggccacatgctgggagttaatgaggtttacaattggcaatacttaaagaatattagggtaatatatttaaacatcagcagttcacagcctgaagtgctcatcatctgtcaagttataatacagaatcaataaggggaggtctttcaatttgctaatgaggaaagttttctatactattagggtagacatagatttcagataaacatctaaaattcataaactatagaatttggcgaaagcatctcttcgattaaaaagaaaccttgataataatcaatagcagtcacctgagaagcttagattttcttcttagtcatcagactcccaaattaatctaccaaaacaaaaagcctcattaacagctctcattgaatcagtgttattttttcctttctctcaaggtgtctgattaaccccctttctttttgcattactcactttgtgttaatatttgatgtctgaaatcatggggcaggggaggggttgtgcaatgtggtggctagacactgtctacaagcagtaaattaaaaagaatttttaaaaaggtttgtattatgttgctgatgtattagaaaatctctaggaatgtcaggtgcctgggttttctttttctttttaatttcagaaagggttgattgctgattgggtgctgattttgcttctcattcatatgtacagatagcgctcctcctcctcttacccagctcctcttgcttaccaatccaagccttcttttggagagttttattgaaaaggaaaggtgagaaataaggccataactggagggaaaagggaggttgaaggagggtcttttctaggtgaatgccaatgggaaagactcacttgagagtagataagattgacaatgtaggagagaaaggaaagacattctggagcattgtctaggaggttggcctcttgtaagagcatggagagttcatccagaacacctgacctcaaagtgtagccagtggactcctggaagtccctgagaacttttcagaagtccaggaggtcaaaactatttgcacagtagtaaaagcatgatctacctttttcaccatgttgatatttgagctgaggtttctaaaagcaatagtgcgtaaaacttctggtgtcttaacagcaaataaggttttgtctgaacattgatgtccctccaaaattcatgttgaaacctaacctgcatggtgatagtgtgaagaggtagaactttggggaggtgattaggtcatgagggctctgctctcacagataggattagtacctttgtgaaggaggcttgagggaatctgtttgccccttctgccatgtgaggatggagcaagaaggcaccatctatgaaggagaaagcttttaccagacaccagacctgctgctgccttgatcttggacttcccaactcctagaactgtgagcagtaaattctgttacttataaattaccaagtactaggatattttgttataataacctgaacagaataagacagacaccaatccaaacagagtaagcaatcattattttcttcattacacattcatcatcttcgtcatactgattctgcttcagaatgtccttgaagaagcagtcaaaatcattgattttattaaatcttgctcttgattacacaagattacattttaaaattctgagtaattaaatggcaagtatgcataaagaactctttaatgtagtatggtggttgtctgaggaaaagtacttgagcagttgttttgaattgctagttgagctagtcttctactagaggatacgggataccattcttatttgaaagaatgacttttttgaaagatttaaaattttcatgtttcatcttcctaatacttaaagactttctgatgtcattggtggtgatgttaatgaatgtggcttttaaatatagtttaatgaagtttcctaacatttggatgatctgcataatatagagaaacagtattttcccagttgaccggtgtgcatggtgttacaaaattatgcatgggtaacagatagtttgaaaagtgctcatagacccatgaattttaaggtaacagagaggagaaaagttcactgatacagtttcagattgcacattgccactagtctttaagaaactttacttgttgggatttggtgttgtatcaaagaagaacatccccagttatctaaaaaggccattaaaatacttctttcttttctaactatgaatctgtgtgaggctgaaatcctttcatattcttcaaccaaaacaacatattacagcagattgaatgcagctgttttccattaaagtcagacatttaagagatttgtaaagatataaaactgcttttctcactaaattttctgttttagaaaatatagttctttggctgggtgtgctggctcatgcctgtaatcccagcactttgggaggctgaggcgggaggatcgcttgaggccaggagtttgagaccagcctggctaacatagcgagaccctgtctctacaattaaaaaaaaaaaggtatagttctttttcatacaaatatatttatattaccatgtaatagagttactttttaatgaaataaatattttctaaatttcccaattttaatttctagtatggtaaatatgatagctataatccacataaataaaagctctgtggggacctcaacaatttataactgtgttaagaggtcctgagacctaaaatttttgagaaatgctgagctagaagagaagatagagactagagtagagagagagtgtagatgtagtggtgagatttggggacaggttgtcttttggtttctttgatttttttccaggaaatagatgagatggaggtgcaggttgaggtattggcagtttgtggagagagattcgtatactacatagttatctagaagtgggagggtgaatgtgtgaggaacagcatgatggctgggcaggacccacttgagtgcttacctgaggattagtggtcatgaaatttaaagtgagaccagttagtgtggctgtatgtttttcagataaggccagtcgttcaggcccaggtagtaagggttggatgtagctagggttgaggtcatggccactgaataatccagagtaggtgaggttccagggaggtaggtgcaggggcgtgcaagggagtaattatgatgatagactatagatttagtctgggcaaggagcaaagagaggacattgggtaggacgcaatgagggatggtgagaaggtgacatgcttaatgaattgtgagtttcagcatggttgaaggttgttgatcaattgggatgtgtttatgagggactgaacaggaagactagaatatagtggccataaagtgagatgcatgaaattgagaaaaaggagtttttggtaatggcaagtaaagtctagagtgtgaccatgggagtgagtggctgaggaaggatgaaagaaaggccatcggaggagatgagttaatgtaattggaggccttagtgtttgaaggatcagtatattgaaggataagtatgttgaaaatattgagaactaagatagaagttgagagagtgtcatcgagccaagagctaaaatacggggtgagaggggaatccagggttattagatcacagaaacaagaggtatgctgagtggtatagtcagatgatgggaatatttgaatgggtgggggttaggaaggagaatatgggatctacccaacctgcttataggcctggtgcaacctaggactgcaagaggaaagctcatccctacacgtaagaggggtctacagtggaagcattgtcctcaagggacagccaggtattggttagagcaagaaagtgaagagatattttatggaaggattgaggaggagattttggtcactatacactgaattctagagaacacagttggagggtttctgggagatggtgacagaataggcaaagtccagggcctctcagggattagacgtgagtggtaaagggtaacctgggtgtccgggactgttggtcaaggctgacattcacggaataaagagaagaatgcagttagtcctggtagactccagattgtgcctgctggttgatagggatctttgcagagaggcaaggaagcttggagaggggcaacttttattacttaaagaacttttaaaataaaaatattttgtgagcagtagctctgctgtttttttttttttttttttcctagatggttggaccaaaggatgaaggaaatgaatagttactgagcatatatagggttccatatctggtgctaacaatttccacctgttttcttatttaatcttcatacaagaccttaaaataaatattttcactgcccatattataaagggaggtggagaattagagaggttaaataatttgctcaaagtcatatagctaatgagtggtggaactagcatttcgacccagttctttctggcttgtgctcaatctgctctaccatgaaactttctatgcatagagaagaatatttaaaattgagctttgcacgagaactttgcttatgtctttgcttagaagttctgatggcctttgcaagattctttgcccttgagactagtcatttagccctcatatttggccaacataaggtgaatataaaacctccatgagaggctcttcgtcacccatacccacacttatgaaaaactggccttgcttacctcttactctttttttttaaactgaggagtagtttttggaacacttttccctttttactgttcttatattgaaccttgagttaccattgcgtatcatattctcagaataagaataagtatcgttactgggccaacttaataccaacagttcttccatattcttcccagcatatgatgctgcttagtgaatgcctgaaagagcaaatactgttctttcctctttctttgtttggtgttagtgtagaaagataagctggattaattgtttgatttgcttgatctagactgtaggtgtttaaaacataaatctaaaattttaaaggaaaggaaatcaaatgtaagctctgtttcctagctacttgagaatctgcttctttaccactgtcagaattagaggtacaggatgtggagttgcttaaattaaaacagtcttgtactgagctatgaggaattcatgaagcaaaactgctatagtttgaatgtgtcctgaaagttcatgtgttggaaacttagtctattgcaacggtgttgggaagtggggacctttaagagatgaacatattaatgcttttatcgcaggcatgtggtatgtgggagtgggttctttatctcaggagtgggtttcttatcaaaggatgagttggtcctcttccccgtctctttcccttgcccatgtgatgccttccatcatgggacaacccagcaagaaagccctcaatgtcagtgccttgatcttggacttccaaatcccacaacagtgaggaagtaaatttttaaaatgaattactcagtctcaggtaattctgttctagaagcataaaatggactaagacaaaaatgttaggagatatagtacccaactttcccattgattgtggcataattgtgccatgattgtcagtgagttgcttcctagtaaatacagtgagattcagagattttaatgaaggtttttgagagtaaagtaagacttctcttgcaatctgatgtaaaggttttgagatcttcagtctggaataagcaaaaggtgaaagaagataactgatgaaagaacttaattgtcagaaattttagagtaacttagtctgaaataaatgatatatggtaaggtaaaatggccttctgctacaaatctgagacaaccttgatacttgaaaaatatagattaatttcagatttggtaactcatttaacaaatatatattgacaccaactatgtgccaggcactgttctaaacagtgtgcttttatatagcaaacagataatgtaaacaaaagatatatatagatgatatagaggtaggttgttatatttattaaagtgctatggtcgataaagtggtcagggaagatctctctgaaaagtgacatttgggcaaagacttgaatgaaggagtaagccatgggagaccctagggattgagccttctcaatagagaagaatagaggggataacaggtgcaaagagcctgagaggggagggtgcttggcatgtttgagaagcagcaaagagaccagctagtagagagggttgataggagagtgaaagaagtataaaatgtatcccagggccaggttatgtagatgttgtagaattgtattttgagagtagtagaagtcattggagggttttgagcatgggaatagcatgatctgcattacattttgaaaggttttgcctggctgatttgagagaatgggatgaagtgggtgacagtggaagaaagggaaattaggactgtgctgcagtaatctgtgtaaaaggtgatggcaagactagagttgaatggtaagaagtggttggatttgggattttattgatggattagatatgaaatatggggaatggcgatataagcaaatgagatagggaatgttgggggaagagtaggtttggaagcaaaattaagagttctttaggacattagaatattgacctccctgttaaacatgcaattagagaggcaggctgtgagatgtatgcttagagatgagagtcaatgtaattacttatttggtctgagccaattctcagcataaggagttggtgctgttgtaacttcagtgagttgtgttttgtagggtgggggaattggggtcttttttgtattgattattatgaacttacaggtttttatatgtttgtgttttaattgcaatatctcatctttggccagtaggaacccttttatattatctcttttgtcctttttgatatgatccattgatttttggtagcttccttgtttctggcaaaataggttgttattttatatatttcctgccctgaacctggaatcagttgctctgcttgaatctcccccttttttaattattattatattttaagttctgggatacatgtgcagaacgtgcaggtttattacataggtatacatgtgccatggtggtttgctgcacccatcaacccagcatctacattaggtatttctcctaatgctatccctccccttgctccccaccccccgacaggccccagtgtgtgatgtttccctccttgtgcgcatatgttctcattgttcgactaccacttatgagtgcgaacatgcggtgtttggtttgctgttcctatgttagtttgctgagaatggtggtttccatcttcatccatgtccctgcaaaggacatgaactcattctttcttgtggctgcatagtattctatggtgtatatatgccacattttctttatccagtctgtcattgacgagcatttaggttggttccaagtctgctattgtgaatagtactgccataaacatacgtgtgcatgtgtttttatagcagaatgatttgtaatcctttgggtatatacccagtaatgagattgctaggtcaaatggtatttctagttctagattcttgaggaatcaccacactgacttccacaatggttgaagtgatttacactcccaccagcaatgtaaaagcgttcctatttctccacatcctctccagcatctgttgtttcctgacttttaataatctccattctaactggcgtgagatggtatctcactgtggtgttgatttccatttctctaatgaccagtgatgatgagctttttttcatatgtttgttggatgataaatgtctttttttcagaagtgtctgttcatatctttacccactttttgatggggttgtttttatcttgtaaatatatttaagttccttgtagattctggatgttagtcctttgtcagatggataaattgcaaaatttttctcccattctgtaggttgcctgttcactctgatgatagtttctttcgctgtgcagaagctctttagtttaattagatcccatttgtcaattttggcttttgttgccattgcttttggtattttaatcatgaagtctttgcatatgcctatgtctgaatggtattgcctaggttttcttctagggtttttatggttttatatcttacatttaaatctttaccatcctgagttaatttttgtatacagtgtaaggaagggatccagtttcagttttctgcatatggttagccagttttcccaacaccatttattaaatagagaatcctttccccgtttcttgtttttgtcaggtttgtcaaagatcagatggttgtagatgtgtggtgttatttctgaggcttctattctgtcccattggtctatatatctgttttggtactagtaccatgctgttttggttactgcagccttatagtgtagtttgaagtcaggtagcatgatgcctccagctttgttcttgttgcttaggattgtgttggctatacgggctcttttttgtttccatgtgaaatttaaagtagttttttctaattctgtgaaggaagtcaatggtagtttgatgggaatagcattgaatctataaattactttggtcagtgtggccattttcacgatattgattcttcctatccatgggcatggaatgtttttccatttgtttgtgtcctctcttattttcttgagcagcggtttgtagttctccttgaagaggtccttcacatcccttgtaagttgtattcctaggtattttattctttttgtagcaattgtgaatgggagtttgctcatgatctggctctctgtcttttattggtgtataggcatgtttgtgatttttgcacaagaattttgtatcctgagacattgctgaagttgcttatcagcttaaggaggttttgggctgagacgatggggttttctaaatatgcaatcatgtcatgtgcaaacagagatcatttgacttcctctcttccatttaaataccctttatttctttctcttgcctgattgccctggccagaacttccaatactattttgaataggagtggtgagagagggcatccttgtcttgtgctggttttcaaagggaatgcttccagtttttgcccatttagtatgatattggctgtccgtttgtcgtaaatagctcttattctttttgagatacgttccatgaatacctggtttattgagtgtttttaccatgaagggatgttgaattttatcaaaggccttttctgcatctattgagctaatcatgtggtttttgtcattggttctgtttatgtgatgaattacgtttattgattatcacgtatgttgaaccagccttgcatcccagggatgaagccgacttgattatagtagataagctttttaatgtgcagctggatttggtttgccagtattttattgaggattttcatataaatgttcatcagggatattggcctgcaattttctttttttgttgtgtctctgccagattttggtattaggatgatgctagcctcataaaatgagttagggaggagtccctctttttctattgtttggaatagtttcagaaggaatggtaccagctcctctttgtacctctggtagaatttggctgtgaatccatctggtcctggactttttttggttagtaggctattaattactgcctcaatttcagaacttgttattgatctattcagggattcaacttcttcctaatttagtcttgggaggatgtatgtgtccaggaatttatccatttcttctagattttctagtttatttgtgtggaagtgtttataatattctctgatggtagtttgtatttctgtgggatcagtggtgatctcccctttttcattttttattgcatctatttgattcttctctcttttcttctttattagtctggctagtggtctatctatttggttaatcttttcaaaaaaccagctcctggattcattgattttttttgaagggtattttgtgtctgtgtctccttcagttctgctctgatcttagttatttcttgtcttctgctagctttcgaatgtgtttgctcttgcttctctagttcttttaattgtgatggagtgtcaattttagatctttcccgccttttcctatgggcatttagtgctataaatttccctctaaacactgctttagctgtgccccagagattctggtacgttgtgtctttgttctcatttgtttcaaagaacttatttatttctgccttaattttgttatttacccagtagtcattcaggagcaggttgttcagtttccatgtagttgtgtggttttgagtgaatttcttgatcctgagttctactttgattgcactgtggtctgagagactgttttgatttccattcttttacatttgctgaggagtgttttacttccaattatgtggtcgattttagaataagtgctatgtggtgctgagaagaaggtatattcttttgatttggggtggagagttctatagctgtctattagttctgcttggtacagagctgacttcaagttctgaatatccttgttaattttctgtctctttgatctgtctaatatggacagtggggtgttaaagtctcccactattattgtgtgggagtctgagtctctttgtaggtctctaagaacttgctttatgaatctgggtactcctgtatgggctccatatgtatttaggatagctagctcttcttgtcggattgatccctttatcattatataatgcccttctttgtctttttggatctctgttggtttaaagtctgttttatcagagactaggattgcaccccctgccttttttttgctttccatttgcttggcaaatattcctccatccctttattttgagcctgtgtgtctttgcatgtgagatgggtcacctgaatatagcacaccgacgggtcttgactctttatcccatttgccagtctgtgcctttgaattggggcatttagcccgtttaaggttaatattgttatgtgtgaatttgatcctgtcattatgatgcttgccatttattttgcccattagttgatgcagtttcttcatagtgtcgatggtttttacattttggtttgtttttgcagtggctagtaccagtttttcctttctatatttagtgcttccttcaggagttcttgtaaggccggcctggtggtgacgatatccctcagaatttgcttgtctgtaaagtattttatttctccttcacttatgaagcttagtttggctggatatgaaattctgggttgaaaattattttctttaagaatgttgaatattggcccctactctcttctggcttttaaggtttctgcagagagattcactgttagtctgatgggcttccctttgtgggtaatccgacctttctttctggagcccttctttttagtaggcagttgtatttatagaccacaatctggggattaggtatgtttccttcttttgagttgtcactactttgagaccttttgtttttctcttctctttatttattattattattttgagttagggttttgccctgttgtccaggctgaagtgtagtggtacaatcatggctcaatgcagcctcaaccgcctgggctcaagtggtcctcctgcctcagcctccggagttgctgggaccacaagcacacaccaccatggctggctaaatttttaaattttttgtaaagatggggtttccctgtgtttcccaggctggtcttaaacttctgggctcaaatgatcccgccacattggcctcccaaagtgctggaactacaagtgtgagctaccgcacctagctgatgccttttcaattcattagagaaaaaattttccattcatgctgatatttcaaatgtaaagataaattgacacagttaaatccaaagtaattttattgttttgatttttctatctccgctctttcattgaaaatcctggttaccagcaacattcacagtattacatatttgccatgtgtaggatatatccaaaatagtaacacctttattgctgccaacaattagatactgaatgaagtttaagatttctttttagttctgttgtacttagactgtgttccacaaagtatatatagttaaaatactgtattctaaagttattggaaagaattcatttaattctgtgtggttttgccaccaacttaatatatatatagggaggttcattttttcagtttattttcaatttttagggattgtcttttttattttcaacttaatttaatttttgagtatgtaaaacatatgtttcccaaatcaaaactatacaacagaaggaaggtatgctcagggaagtctgtcttaacatgcccgtccttttcaccctgactcttccttcctttttataggtcattcttttttgtattagttttttggtttctcctcccacagggtattttttccccaaatataagtaaatttatatgtgtatttgtgttcatctttccttccccattcgtatccaaaaggcagctctatcaactctatatactatatatacgctcctttgagggagtgtgtatgtgtgtgtatatatgtagtatatgtgcatgtgtactagggtttgctcatgaaacagatccaatagggtatatatacacacacatatgtgggtatatatgtatatttatataaagagagacaaatacacatgtaaatgtacatgtaaataataaatgaagacatttattataaggacttgtctcacatgactgtggaggctgagaattcccagtatcagctgtctgcaagctggagatctgggaaagccaatggtgtaattcagtttgagtctaaagacctgagaaccagggagccaatggtgtacttcccagtctgagagcaggagtagatccatgttccagctctaacactcaggtggagaaagcaagttatccctttctccacctttttggtttattcaggacctcagtggattggatgttgcctaccacattgggagggcaatctgctttacccagactgcctatttacatgcaaatctcatccagaaacacccatacagacacactcagaaataatgtttaatctgactaccacatgttgctatcgaggtaacacataaaattaaccatcacagcatttgtataatgtttgtctccagggaagacagacagacagacagacatgcgcacacacacatacagcacacacacacagttgcttttatctcttagtcgtgtgttttgaagataattctataaatatgtaaagaaatcttcctcattcctttttatggctgcatagtgtaagcatatacatttataattatttttccagtttattccaatatctgttaaagtttacagaccagtgcttttaaggtttacattatttggctcatcaggatcttttcccaaaccattttagggctgttgtcaaagagcaatggacaaaccctaatgatgagatgaactttactctcagaataccgtctcacttgctcctatgttctgcattccctgcaccaaacacttcctatgctgtctgcttccctgtccactcatacaggaaagggcttcgatgttatagagtcactcttattgctcctgctaactgctgtcctgataacaatgggtcttttgcatgggaaaagcattatagagtgaaaggatcactgatagcagtcaaaaaaacacattttactatgtcttttaaaatctgtgggatcttagacaagtgacctatcccatgtgagcctgttttctcatctgattaaatggggttgttacttgctcggtgaatgcttgtgttgtcacccagtgaaataaactccagggaagtttagttagctttcccttctcaatttacctgcagatactgtttcaacattcctctctcctctcattccttccctctcttattcctttcctcacctcctacttttcttccccaattcctggcatctttcctggtggcaaacagaccttccatgtgaagaaaaactcctcataattgcactttcctcttcagattctgccccatttctcttctttctgcaacactcatcaaaagcactgtctgttctggcccttacaattaattcctctgcccattgattcttttttgagatggagccttgctctgttagccaggctggagtgcagtggcatgatctcagctcactgcaacctccgcctcccgggttcaagcgattcttctgcctcagcctcctgggtagctggaataacaggagcatggcaccatgcccagataatttttgtatttttagtagagacagggtttcaccatgttgtccaggctggtctcaaactcctagcctcaagtgatccacccacctctgcctcccaaagtgctgggattacaggtgtgacccaccgtgcccagcctgcccattcattcttgaatccactctccccaagtttcctctgctgctctactatgctctaatctgcccttgttacgatcttcaaagcagaatccaatgataatattagttctcaggttaacacacttgcctcttacccctttttgcaatactcacttcacgttcattataccatgttcccttgcatccctcagacctcactggttctcacatctctagtttttcctaactactttttgggtgatcttgtcccatctcatggtgctaaatacttcataacttctacttttatgtcttcagccctctcctccctgctgcttctgtgagagtccatttgcgtacctaataggcccctcaaatgtcacatgtcctgacctaggctcctgagccttctctctccaagcattctttcctattgcttgctcagtagattctgtcttgcagttgctcaggccccaaactctagggacatccttgcttccttcttttctttcacacctcccttcaaatcttacatccagtctagttggcctcactatcagtatatgtatcgtcagtactccctctgcccaatttcttggaaaggtgacagtagcagcaactgctgttcaggcttcatgataccagcaaggataatacaaaaaaaggaagatgctggaaagttgaccaagaaagagacccagtaaataagtctggactcaagtccccaaataaaaaaagattcaaaggcaaactctaagacaagctctgtttttggtcttgtttcataaagtcatatagaaaaaaaatataaagacgtttccaactgtagttcataactgctgtattcatctgtgaaggattgatgacttgaggctctctgaccagggtgtccaataagaagtgcttagtaaagactcatcaggttggtttccaacacacagcccacattcagtctatacccaaaatagcaaagatggtgctacaccaactgctagtgaagatgcttcaaatgggcagtaagatagtaaatgtacacacccctgcaggtctgcttcacttttattttctttccaagtacagtttcaagaacagtttattaagtaaagcaaaaaaatagaaaagaaaatagtacgactcaatcagttcactccatatcaatgcaaattcagatgcaatgcaactggtgattggtgtgtggcttccagttggccagttctgtagaatcattcccactgagtgattcaacacccaatgatgtgaccctgcattttacttgatttactttttaaaaattctgctcagcattatggaggatgttactccataaccagacgcaggcatgaccatctctcacctggattattgtaataacttctcaccaaatcttcttgtgcagccagagtgattctgttaaaatctgagttggattatgtcactctctggctcacaatcctttatggctctccattttcactcagagtaaaagccaaagcccttctcgtggccaacaaggccttgtggtactctctccttacgttacctccccagcccctcacttcatctgctgctctttcccttaattactttgttctggtgacattggtcttcttgccgcaccttgaacacaccgtgcttgccgtgcttggtcccacctagaggccttgtacttcctcttccttctgtaaggcacttcccctaagaatctcactcacttcctttagggctttctcatggtggttatcttgtataatacatgtgggtttcattaattttttttttgtctcctcctctttcccacacacttgactgtaagctccacgaaagcagggatttttgtctgtttagttcactgctgagtcagcagatcctagaacgtggctggcacatagtagcactccataagtatttgtctaatttgaatggattgaacacataatgttccatgcacatgtgaggtattatccagaagaggtgggattcttagatttctctctatggttccttctttgaatttttacatgttaaaatctctgctgtcatttttctcccaggaccactgtaatattttatggagcctctttttttttttttgtaacaggtctaaaacttttagcaaatcttttttcttctcctgtcttcacttttctcctccccaagtagactgcttccacagtattttggggttgttctagtttttgtaaactttttctgaggaattctttgtgttgaaaaaaccacctatatataggattagattctcatatttttgagaatcctgccccattcttcagcatccttacaagggactggactcatgtcccaaagtgttggtggattccaaccattcggcatgtcctcgctcatttatgtcttatggtctggtaagttaactgccttctgccgtagagttaagtaaagacagccatgtcgctgctcttttagtgaattttggctgttcacattattcttcaagttatttagaatataactttttagattcactgaggatattgcatctacttgggcaaaaccctgaaagcccctaaggatttagctgaacatgtaattcatattgaaacccaccttctcttgccttatgattttctgattcagtactttcttctagagttttttttctttttttgagacagagtctcactttatcacccaggctggagtgcagtggtgtgatctcagctcactgcaacctccgcctcctgggttcaaacaattctcctgcctcactcagcctcctgattagctgggatcacaggcgtgtgtcaccacacctggctaatttttatatttttggtagagatggggttcaccatgttggctaggttagtctcgaactcctgatctcagatgatccgcccgccttagcctcccaaggtgctgggattacaggcgtgagccaccatgcctggcctagagtttttttttttttttttgctaagttaagaaataaaacagtaaccaatttctgaaggaaaaagcattaaaatattgatgttgcttttctgcaatacttataccaagaaaatgcaagagagtctcaaaagttgtgtagcttaatttcctcttgcaaaaatataaagtactcccaacagtttctaattttgatgatcttttacaattactgttctgtgttgtaatggcctgcgttttaaaaaagcttgaaattgttaggagacctttagacatagaacttggtaagaagtgcagagataggatggcatagaatggggaaacatgccagatcaattgggacagaaaatttttcttaactgcttttcagcatttatataggttcttccatgagcaaaataaaatatgaacctaaatagaatgggctcaaacagtcataataaactcctttggttattttcagaaaatctatattcacaggtggcctgtgttaataggtgaattcattgtattttggtgtggctatttgtataacaaaacatgactaaatatgaaagatgtgtatgtctttttctttaccagatcttgcgccagtttttaagcaagcaaattatgttcatgtagtaaaattttaatctgtattgggaatagaggtgggaatagtagtattctgtttactgtggatttggagtaaaatctagaaatgctacttaatcagcatattgtaagcagaaattactttttgtcttttttacaaaaaatggacatgagagctcactccgttgcccaggctggtctcaaactcctgggctcaagcgaccctcccacgttagccttccgagcagctgagaacagaggcacgtgcaattgtgcccagctttagaaatcactttttattttaattcttatttgtaacatttcataaggtattaggctacttttcccagtcactaccgtttatacaatttagttttaatttcttaaaattttatttgaaattgtagaatgtcttaatcattcagaatgtgaattgtcatggaggtgtcagagatgcaatttaatttctcctgatagcagtatatcttgaaaatattttgcttaaagatttatttatccttgctgtcaatttgtttcttataatttgcctcatagaaacattcattcaaaacagagtgctgaaaccaaaatggaatatacaattaaaaccaaataatttttttcctgctaactacttcccagcccccagactgaactcgtgattgaggttctatttacttttgcaaacagatgaatatttttggagcagtggaggtaggagcatggtacctaagtccaagttgcaccattttgtgtggctgtttctttcttattttgcattaggaaacaggtgcaagaaaaagaaaaaaaattccacttcatcatcgtagtagtatctggaatctcattccccataaccaagaagaactcatttattcttggccaccctctctcttttgttattctaagttgactgtggacagctttgatgctgcccctgaacttctatgagtccccctgcccttgctgccaggattttagaatctacccttctcctatactaggagtggtaagaaaataaattcgggtagtagtgccatttgatgattcattttctttttatatgtgtcctttaaaattaacattgacaatttggagcccctttgtaatgtggatgatagaggaaaagctgtgattgcttataggctgaatttaggttcatctgaaattatgatgtatctcagaaacatcataattccttggtttgggagtggtaataggattaggactgttgagactgtagaaaaagcacattgtttttcttagatgtggatgcttgtttggggtggtgtaggctgatggagagtatttgagacagcggctactctttcttttttttttttttttcccagctgctactctcaatgcagacattgctctagaacaccctgtataaactatatattgccacatctaaaccatatagtacttcattaaattttgaacatttaaaatattttaactatatgagacaactatgtggtgcatgtgttaattagcttgattgtgataatcatttttcaatgtatatgtatataaaaataacacattgtacactttaaatgtatacaatttttgtcaattatatgtcaataaagctgtaaaaaaattttagataatgcacaatggatcccatactttgtatttattcctatataccttgatttttaagcaccttattctttaagttcattttgttgccgaatttgagtgcattctccctagtccttattaaagagggtacaataatctttcatctgagatacaattgatggaattattttataggatcgagtacattttaaagcctaatctttctttgcttacattgaatattatgaccataatattatgaaatgttattctgaaacttggtctgagttctcttacgtcatcagaaatttctgcaaattcaatctgaaatcaacacatgggcactttttttttcttttttatggtcttaaatacagaaaatcataatctattttaagcttagataaatgatggaacacttgtttacatgggtaaaatgactctatctaagtagtatattgaagttcatgttaatgtttgctatttaatgacacctaatgatattcagtgaagggttatgctaaaccggagagaaaatgtgttacccaggcaactgcctctggcagactagagattcgggcatatggctctatagtacacattatttcagcatctttaagcataaagaaccacacatgtaattgactgtgaaaaattactgctcagttactgtattgtatggtcataatagaagtaaatgaatacgtcattgttgttggaacaagtctgttgggaatcacttgtagactctactatttaagaagcaaaaatacaataagaagaaaatagctggtttaattaacatgtaaaaattgggttaatttgaattcagctggcacagcagatattaatgttggcttttttttgtgatattctggctcaagcctgggtatttttatttcttcttgcccacaccatgaataattttatttcttaaaatgataagggctatttcagtcatttaatttttgctttgccagggacttttattacagtcacatcaagagaggttttgtgtgtatccaaaatgtaggaattacagttgaatgaaagaaaatgccaaaatgttcccgagtaattgataatgtttctcaaagaggaatcagtataattttgatttcatgtattttttaaaaattttagtttactgctgatgtatttttatttttttaacagtgacaaactaggaattgatcaacggcagatgcaagaaaatagcatgttcttgtcactttttgtgtgcctatgcttatgtgccttttgttcgttttagaatattgttttaatcatcattaccttgcttcagagattcagaaaaacctattgagaaaggcattgtgttccaattaaaaaatcgtttagctcaatcaatttttggtattttaaaatgttatttgagctgagaacaaacataggtaatatgggcattaactaaaagtatgtatgggaacattctgttccttgggctgtgccttcggtaccctgtaggtacttttgtgcttttcagccctaaatcaagggaatgatcaaactggagactatggttagagaagtgaaggatttggcagtgtgtgcccttgcatgcaggccagtctttctgtccttgggtgcattcaaagtacctggttatccagtggtaatgagaataaaccaacatgctgctttatatagtgtaggccagtatacgctgacaaattcatatgcctgctggcttttcagttactgatttcttatttgtggtttccccactatccttcttcatttgccattttaataacattgagacctttttatccagccttaattagtagaacaaagaaagatttaggaaacctaggtttttaaatctgctttatttgccttaatcagttttccatcatggtttacaattacttttcccttttttcctcaatggtctttctttacctcttttgatttcctcctgctttgaaggcaatacgtaatttaaaatgaggtatttatggtgttttttgtttgtttaaacttagtagacttttcctttaaaaagaagtctttggtagatctcaaaatatccatgatgtaattaaaatgcagactatttgtcatgcacattattaaattctgctctcagtgttggtaattatacaaaataggaacaatgtagtataataagatagcttttcggggtttttaaatgatgtctactagtatttaagaaataaaggatatttatctaaagaattgtggagatggtgaatatgatttgtctctagttttaaaagcttgtaggcttgtagtggttcttttccttgatgtagaatcatctttgtagggattggccgtgatcggagcatttttgtgacttgaaggttaaaagagaggttgagggaggtggcaaggacactggggcagattctcctcatctcattgagtaatggttattttacagggagggaaagaataaatggggtataggaagagtaaagacattttctagtgttacttgaattaactacgtactagcaagtgagaactagaaaagggatgaatcatacctgtcaaatgtgcttgatccatcttataagaaagagaatgttggaggtataagaataccccagtaaatccccctggttggcacagtcagccttgggcaacttgactgctgtttggagtcagctgcaaggcgatgggctgccaagtagagctggcagtatggacagatcacttactgagttaagctcacaattacgagagcctatatatatatatatatacttttgccaatatggaggcagtgatatatgcagaggtgatatttataggccaaatttgtgataacgatacagtaaaattgccaataaaaatctttaataggtttttaaagccaggcagtagcctgcttgtttgaacaatattcaatctgccagatttcactggagccaatgaatttaaataggcccttggcaaacactgcagcgagatttgaaccagagtacatagtagagctgaagagccctgctggcctcagaacacatgcactccagggaatgccaaggtcctttctggagccagggtgggcacagaatggctgcctgtaacctaaaatggaagaaaacaggattttagaatgaaaggcatccgagaaaagcaccttttatggaacaagaaaggatatctgttccaacttgtccaacaaggtcattcagccagttaggcaaaggtaagaccctataggactcagcttctgtccaccttattcctgatggtttttagaagattgggtaatcactcattgtctcttttcagatcagattagaaacaatagtcatgaatttgcataattggagtcgtgagtcttcgtttgtgtgcttgctgaccatcaactaacatattaaataaaaatctttacttaggagcatcctcttcatctgcctaactggtagtttccatatcctcagtgacttccaagcctcagagtctgtgcctgtgactgccatagcccctggccactgggcctcctcttgatggggaggggctgagcagctcctgggctttaaaaactgcttgctgtgacttccaggacaggacccccccagaccccacgtaattaagccttaacagctgtttagaaaatgtatcccagatttgactgctccttggttctcttgctacgacccaggtttagcctactgtagccgcttctaactgggctcactgcttcacccggcggcccgtgctccacagtgtcttgagtgttcttcgtaacctttctaactctgaggcgagtcacatcactcccctgcataaaacccttcaacagcagctgatttccctaggaataaaatccaggcatccttttatgcccggcacctccctcatcctcatcccctttcccttcccctgccttctctactctccagctgctcgaggtctccctgccctttggaacttaacaagggtggcctgctttgggcgctggcactgatgtttctcctcacatccctgtcctccaactcttttcctggccgctgcttttcaccattcagatctcaatacctcctcaccagaggcttttcctgaccgctttaggcaaagtagccttatctcccaaccccattactctcctgaagttgattttcaagcctggctatgtagtacaatcacttgagaagtttaaaaaaaaaccaaatgagtgtttaggcccctctacagaccaatgaaatagagtatctggggctgagaagcatgattccaaggcgttgctctattttaccctatgcagtggttgtctaattctggaatttttatgtatgcatgtgctcatcctccacccatctgcaaatgtggttccttgaggacatagatgttgtcaattttgaggtatccttagtgcctggggcatggcttatcatataataggaacagggtacacatttgctttgttatcaaaaagagtcagactctggggccggtgtggttgctcacacctgtaatcccagcactttgggaggctgaggcgggtggatcacctgaggtcaggagtttgaggccagcctggccaacatggtgaaaccctgtctctactaaaaatacaaaaattagccggggatggtggcgcacgcctgtaatccccagcttctcaggaggctgaggcaggagaattgcttgaacccgggaggcagaggttgcagtgagccgagatcacgccattgcactccagcctgggcaacaagagtgagactccgtctcaaaaaaaaaagagtcagactgtaaaatattggaagagatttattctgagccaggtatgagtgaccatggcctgtgacacagccctcaggagatcctgagaacatgtgcccaaggtggtcggggtgcagcttggttttacacattttagggagacatgagatttcaatcaattacatttaagaaatacattgattctgtccagaaaggtgggacaactcgaagtggggcgaaggcttccaggttataggtagagttaaacattttctggttgacaattggttggagtttacctaaagacctgggattattagaaaggaaatgtctgggttcagataaggtattgtagagaccaaagtgttcattgtacagatgaagcccttaggtagcaggcttcagagggaatagattgtgaatatttcttatcagacttaagatataatgagacatgtccaacccccacttcccgtcatggccagaaacagtcttttaggttaaatttgaagagtgccttggctaagaaggaagtccatcaaggggtcttagaattttatttttggtttacagcttggttgcctgaataatgtgtatttgcaaggaatatgggcgggaaagagaagagctataaaagccaaaagctattaaaagatgttaaaaatcatggagaccaaagctttggataaatttggataaactggtgatcacaggagagtccagttccagatttttcttaacacccacatatacttgtgtggtctgatggttagaactgtgtttttggagttagattttactttcatctctgccattgaccctggacaattgcttggcttctgctgtaacacacagaagaggtataaggagaagttatttttgtgaagtactcttgtggttaggaaccttcagtaaaagtggtaattggattttgatggtacattgtctacaaccaaacttcctgaagtatgaacagaacaattcctatgtgctgttgcttaaactttcgtagccacagagttggcctggagataggagccaggcaggagatgaaagggatcacatggggtctaagcctctgctgagtgagaataagcgaggacagagaggaggagaagaactggaggttgtccgttagtgtgattctttcagatcctttgtttcttttttcaatttgtcttcctctccccaaatctcttatatagtcctcctgccactatctaagttgaggactttgctattttgtttcatatgaatttttatttttttcttactgtaagaacagtgcagtatgtatattattgaaaggattagaaaatatggacaagcagaaaaaaatcttaaatttctaacaatttaaccacctagagatgatatccactgccaacactttggtgtgccttcttcagactttgtgtgtatgcaaaatattattgtccatttttaagaaacaaataattttctacacatcattgtgtaaatgactttttacttactaccatggatttgtttataacactttttagtggttggatagtatcctgcatatcaatgttctgtattcagtccatcacatattgttgtatattgaggttgtttgtacttttttcaccattaccagcagtgctgggtaaatatccttgtagattaaagtttgcacgcatttatgaattattttttaggataaactcctagaagtgcaattgtggtggctgaggagtaaagaggtgtttttttgtttttgtttttttctaactgcttcttgtggggcagggctaacccataggctacccagagtggccataaagacatctttgagactcttgctgtgttgtcaaattgttctccggagatgctgcactcccagcccttggtataaagtgcctttctttctttctttctttctttctttctttctttctttctttctttctttctttctttctttctttcctttctttcttttcttttcttttctttccctcccctcccctcccctcccctcccctctcctctcctttcggctttcgtagctcttccctggattctgccatcgcatctcctcaactctggtctcttccccttaagttcatttaacactcctctgtcagattaaatgttctgatgcacaaattgatcacatcactaaaattatcagatcttggtctaccatcacaggacctcataatcaggatgtgagcaactttgtagggtttttttctttcttttctttttttttttttctagtagatggtgtctcactctgtagcccaggctggagtgcagtggtgcagtcatagctcactgcagtcttgaactcctggactcaagtgatccttctgccttggcctcccaaagtgctggaattatagacatgagctgccacacccaaccccggcactgtattttctgttctagttttcctccagcaaatatggatttcttgtgattcttcatctctggtcttccttccttggtacctggcttaccttctgcccctctggaccaccatttctggggagcagagattgcgtccctagaactgccctctgccaaacatgtagaataggcattgaagtcaaactgcagctggtggactctcctcccgcatctcccatctttacttgatcacatttcacttttattgcaagactgagttcatgttcaccaaacacatcttccttctggtgtcatgtgttcgcaatttcagtaaggctttctccatctcctttcactcaacatgacagtaatctttccctcctctgaattcattgagtcatttatttccagttctcttatgttacttaacctactttttccataatatcacaatttttagtctgtattctctattatatttcagatatctccaggctaagtgctatcccttgcaaagctggggggaggagggacctaaagttacgctacagtgaagaagcaccatcatcattttggtatatatcttgtagtacctttccacatatgtgataaatgattaatatttacattgtgtaagcatagcatacagatgcaattcacttttcaactctttcttctttggcccagtattttatagtactacgcagtgctttggctattttattattacttggactataaaggagttacaaagtcgctactgttataaatggcttccagaaggagaacagcagctctaatgctttgtaaaacaaaaatgacttgcttacagaaaatatctagtagcatcagaaccatgaaatagagtagttagaaacctaccctcccctaatctctgagtggtataggcctgtggaaatgtgacttgtacatttgctttcatgttagctgacccatgttctactattagttcctgcagataagtgtggtggcaaatactgttccttagattctagtcatagagttaatcagagctgcatgattcattttaaagggaatctaacattgtcaaagaagttctgggagttgcgggtggaaaaggaactaagtgagttcaccagccaggtctgaacttgattaagcttgaattctttgttgtaacttacgttaatgctcattaaatctgtaaagcaagacggaagcactgtttgtctatatatatatatgtatatacatatatatatataaacatttttaggtatcatgctgtaaagtaatatagtactacataattattctcatggccttctagtcagattaccttgaaaatccaaaatgatcttggtgaacaataatacattatgattttatggttcatctatatacctcctgcatagatgtataatactcatatctaacaggattaccaaattacataccttttggtatcagtaacatgcctgaaataccagagtatttattggctattctcagttatgaaacattaacattgccagacaaggctttgtatatacatacatacatatatatatatatatatatatatatatataaaatatatagtcatatatataatatatattatatatatgtctttatatattataagctttgcatatgtatatggtctcctatatatgctttttttatataagccttttatatatattaagcctttctttattcagaccatgaaaccaaaaacatcccttttctagataacgcatagtgtgattctatttaatgaacctaatgtctgtgaaggggtaattaagcaaatatgattgttttcggcctcaacaaactgccagcaagttcccctggagagcagcactgtgtggctgcgtggctgtgggtgcctgctcagcagggttgggggatgtgaggaggcgtggcgactgggaagcaaagggccagaaacacatttgtcttctgtccggcttcagaagtctatagtgtggcgggcctgtcggtgaattcctcaaggtcttcttttattacagcatgtcttaaaaggaaaaggaaaaggaaacatctctaaatgaaatgcttgtgggcacttttattcacagctttaagtaacctttctttaaaaactgccagatctgtgtttccaatcttggcctctatattagtttcctcaggctgctgtaacaaagtactctaccgcaaactgggaagctttaaaaaaaaaaacaaattagttgtcctaagttctggaggctagacatccaaggtggaggttcagcagggttggtttcttctgagggctgtaagggagaatctgttccgtgcttctttcctgtcttctggtggtgggcgggcaacctttggtgttccttggcttgaagaagcgtcaccctgatctctatgttcatctttacttggttttctccttgtgtgcatgtctgtttttaaatttccctgttttataaaaaagactccagtcatattggattaggtgcctgccctactccactatgatctcatcttaactagttccatttgcagctaccctatttccaaataaagtcacattctgaggttctaggggttgggatttttggggacgggggacacagttctgcccataccagcatctctcttgagtccattgggtctcttttggcttctggctggacactgtactacatgtcccactgttacctcaaacacagtcacagttggttacattctcccacaggtcccttctttccaatttttacctttttttcttttttcttgtttatctttggtggtggtatcatcatcccactcagttatccaagttggaaatgttgggaacatcctggcctgtttccttggccttggcctccaacatccagtcctaaccacattttataatttctgcctctgctgtgtttctctagcctttcttctgcttccattcctagggcccccactcaggtttagaaccctgtgatccctggctgccaggctgtctcccacatctcatctctcctttaaattcatcttccacaccagttctttttctaaaacaaagttttgaatgtgacatttcttaatccagaaactgagtgatttttaactgtctgaaaaaaaagtcaagattctgttgcttggcccttaaggtccaccctaggtggctggcatctcgctcttgccagtcttttgctcctcatgacctgctagatggagaattggtaactcctacatgcttctccaaatacagcacatccatttgttttcatctctgtactttgcttccccagtgtagaatgtcctctctctacccttccctcctctctccattgtcaccaaaccaaagtcggtccatttgcctgcacaaaatggaaagccaaacacaaagcaccagttttttgcagcaagaaagtttattgccaggcaactgagtaaggggagaggagtcacactcaagtttgactttctctaccagccttacagccatagatttaagggagggcttctgagtgtggagtttaggtggtgaacagtgattagtgattggctgaaaggaaagggggtttggaaagtgtcttgggcatgctgttgcccttccatgctgcttcatgggttgcacctttggacagtggtggcattagcttgaactgagggtgagtttttggccctctaacgtcaaaaggttactcaacaggagaagaagtctattctgcccagactccagtcagctatgttggttccaaccagcctcagtctgtcagccaattttgtggcaaacagagagaactgtaacaaatggttttcttctctgctgtcctgcaagacaagcttaataaatttttgttagttaccaaattctttaatcctgtggggcatggtttcaccatcttcccacagcagttggaattctacccaggttaaatggaagccaggagacctggttttcaggccaaaatgtcagaagccagttgttttgcctaacccaggtcattaactttttccagtttccgtttcctcacaagtaaaatgaggaggttgaagtagataatccctaagatcttctcagctttaaaatttgttcttcaaataccatgccgccatgaagcagtccccaactcttccaggcagaataattcaccccttttatgccccttagtgctttactttttcttttacagttaactcttaatttctagtggttatgtgtgctcatgactatctccccttcctccaaacagctggtggtaagctcctggagttcagccaggaatgcttgactcatatttgccccccttcttgcctcctacgcagagtctcggtgagagagaccttagtagaggataaaatgtccttgggaagtactcccctgtaacacatgctcttcctgagtgttcccaggcattgagaagcatgtgttttggatggttaatgatacagagatgctatattgaacacactgcgtttttcctttctttgtagcattattgtaattgggtgacattctgggaaacagctaagttcactttgtaacagtttttataaaaatgtgttctctctataggatgtttagaagtaactaagttttctgtaaaatatatgaaaaccattcctattttcttcctccttccatatcctccggaaacttggagtatctcaatgtatcattaaagtatttggatacttaaaatagcagttgttaaaaaataaaatctaggaaagcttttatggacccatttcctctttggaagtcaaaacgtccttggcctctcatgttcttcctaaagcttagatttgacccacattttgaccttcggaaagttaaagtcactcctttttcctagagaagaatgaccaggcccttttctttcttcaaggccacctctggtcctatatttctaatcttattttacattgttcttttatgcactccactgtccagacaaaatctgtcactcatcagtttccctgtacactccttagctttcttgcattagccttctgcctgaagtgccctctagtctacacccattaccgcatatccaagttgtactcattttttaaggcctagctcaaatgccatttctgccacaaagacttttattaccatactagttcttgtgttatgatttgtccttcctctatacactagtctgtttctagaccagtgctgtctgcctcactagactagaagtcccttggggtcatgtttcatgtatcatttatctgtattccccttgtactagccctaggtcaattcacaggtggtcagtaaataccagtagtgaatcaatatctgtgaaccgttttttgcatggtgtataaggatactaatgcataacaaagttgctctattttgctgttaggcagtcacatcttagtctaaagtatctgcacttttattatagaacccaaaaacatgcctgaaggaagactgaaacatatatgatgctggataaaacagttatatttgaaattataatgtatttagtgtgtaacttcatggtcaatgctgtcatgtcttttagattctgtgcattattatttcagtccactatatgtaaaagtaaatgctaaatgtttataaatgttttcagtttgaattttatgttttggcagtgatatcttattttttccctcagtgtatgtttgtatatgcttctgttttccacaagctactgacttttgctttatgtttgttttatgttgcagattaatatcttttcaagaatttgttgcctttgaatctgtcctgtgtgcccctgatgctttgtttatggtagcctttcagctgtttgacaaagctggcaaaggagaagtaacttttggtaagaagcatgcttctgtgcacgtctgtgtaagtgtggacttgtgtgagcattttcttttttttttttctaggaacaaaataaagtgtatggaaattctttatagaagatagtatatcccttttagtaaagatacttcaatgttttggagctccagttcaaacatcttcctattcgaaaaaaacaagtttctggcttagtagttttgatactctgatttagttttaaggtgagggagatgtggcatgactgttttcatagagtcatagcatgtgagagccagacaggacttctgtttcttccctgcatcatcagtagtgctttccactgatagaacgaagaagtgaataatctgcctacacacagaagttacttatgcaccctatacttcttgtcttcacgttgttcccatggagtagtttgcggccagagctgctgcacaagatggtggttcagaatggtacatgaaggaccttgttctaaacaacccccgctcccccgacctgactgctgtgctggcagtgtctgctctcctgtggccttctttattttgcaaggcacaaacatcatcatgggaattagctacaaagctgcagaaaaccctgatgtttttcaaattcttagaagaaagggaaggcttggaagtggtgggacagtggtaagttattttttaaaaaactggctactaaggacagatttaacggaaagtaccatgtttcccttggactctgtggtgtccagcatatgttgtctctgcatgcaaatctgcagtagcattgctcatgaagaattttggagccctttaggcatgtggattgtgctttcatgagagatggctttaaagattagggagaatgtggcatgactgttttcatagcgtcatagaacgtgagacccagacaggacttctgcctgtcttgtgcttggcatgtgcccattttaagtgtctctattcatagtttctaattcattcagacctttgggacttgtcttatttgatgtattgtggaaaacatacagatatgggaaaaatacagatggtgtaacagtgttgcttccagaatcagataagcttagccccttccagctctgctgctgttgtctctgagccaaattagtgatcctctccagtcctcatttatcttatcaagaagtgaatataataattagataaagtattggtaagatagtataatagatttattgtgccaacccccttcgccattccgtcatactcatttggcatgacagaattaaaggttaaatcatcttgagcaaagacaaaaaattatatacttgcccggtttctagaagatcagatgctttccattaatacttcatgaggattatttaatatttacagatcctcagaagaaatttatttccatcacccagttcctcttagcaccactgcaaccacaacttttcaatggaataccaatttttagaaagtccccatttaaatcttcaagtaatgagtaagcagctagctcatggtgttattgatttactcaatggaagcgagtttggtgacattgttataatagcgtttcctggggatgaacagaggaaagcctgtgagtgtaagcatgttcagcataggtgtgttctgtcttgtcctcctactttccccagcaagtctggatgtgaggaatggaagagagttcgatttgatattagaggactgagaaatgggcttcaggtagttccttgatatagatccatcttcccttcatgcgtgtgaagtggcaagggatattggtgacaccagctttaccactggtcctagaaagacgtaggagacttccaccattgcagggcaaagtgtgtgtgttagtgtgattagaagaaaatgatagtgaagaagcaggatgtaggaaacaagagctgtctttgaattgtagaaggcatagttgcataaggattttgtttctgcttcttactagctgaaggacaagtcatttcaaccctctgagctttattttcctcatctctaaaatcggggtaataactactttacaggactatgtaaggattaaaagattcactgcataaaaggcactgtctgaaaaacaaaggcctttatacaaatagtgatactaaaagaaatagcctaaaagaggaaaagattttctgtttttttttttttttttcatttttctttgggaagcccttttttttaaaatttttttaaattttttttttttaacgtaagttcaggggtacatgtgcaggtttactatataggtaaatttgtgtcacaggggtttgttgtacaaattatttcattactcagatattaaacctagtacccattagttatttttcctgattctctccctcctcccaccttctaccctccaccctctggtaggccgtaatgtctattattcctctctgtgtccttgtgttcttatcacttagctcccacatatacatgagaatgtttggtttttggttttctgttcccacattagtttgctaaggataatggcctccagctccatccaagttcctgtagaggacatgatctcgttgttttttttaatgactgcatagtattccatggtgtatatgtaccacattttctttatccagtctatcattaatgggcatttaggttgatgccatgtctttgctattgtgaatagtgctacggtgaacatatgtgtgcatgtgtttttatgacagaatgtttatatttctttgggtatatacccagtaatgggattgtgggttgaaggataattctgtttttaggtctttgaggaatcaccacactgttttccacagtggttgaactaatttacactcctaccagcatttacactcctaccagcagtgtataaatgttcctttttctctgcaaccttgctagcaccagctattttttgactttttaatagtaaccattctgattagtgtgagatggtatctagttgtagttttgatttgcatttctctaattaccagtgatgttgagcctttttccatatgcttcttggccgcgtatatgtgttcttttgaaaatatctgttcatgttgtttgcctacttttttcttttcttttttttttttgagacagagtctcactctgtcacccaggttggaatgcagtggcacaatctcggctcagtgcaacctccacctcctgggttcaagcagttctcctgcctgagtttctcgagtgcctgggactacaggcgcgcaccaccacgtctggctaattttgtatttttagtagagacgtggttttaccatattggtcaggatggtctcaaactcctgacctcaggtgattcacccgcctcagcctcccaaactgctgggattacaggcatgagacaccacgcctggcctttcccccactttttaatggggttgttttttcctggtaaatttaagttccttatagttagttgctggatattagacctttgtcagatgcatagtttgcaaaaattttctcccattctgtagggtgtctgtttactctcttgatagttgcttttgctgtgcagaatgccctttagttaattaggtcccatttgtcaatttttgtttttattgcaattgcttttggtgtctttgtcatgaaatctttgcccattccactctccagagtggtattgcctaggttgtcttccaagaatatagctttgagttttacacttaagtgttgtttgtttttcagatgaactcttgctctattgcccaggctggagtgcagtggtatgatctcggctcactgcaacctctgcttaccaggctcaagtaattattgtgcctcagcctcccaagtagctgggagtataggcatgcaccaccatgcctggctgattttttgtatttttcagtagagacagggtttcaccatgttggcgaagctggtctcgaactcttgacctcaagtgatccacccaccttggcctcccaaagtgttgggattacaggtgtgaaccgtcatgtctggccacatttaagtctttaatccatttcaagtttatttttgtatatggcgtaaggaaggggtccagtttcagtcttctgcatatggctagccaattaacccagcatcgtttattgaatacagaatcctttccccattgcttgtttttgtcagttttcttgaagatcagatagttgtaggtgtacagccttacttctgtttataagtatcttgagatatcaacaggtatatgacagggtgttggtatgactggtaaattctagttaatttgtgattctgtatgtgaggagaaaaaattaaatgtttccatttgtatttttagcctattgtatgtgacagtgattttttaaagtacactttgttgaatgacagcatacatgcagaagaatatacaaatggtgttaagtgtacatctttctgaacttttacatctggatctgcttaccacgagccagatcagaaagaggatggtaccagcagtttagaggtctcatcccagtcactgttccccaatcccaatggtaacaactgacatttatcactatcaattggttttgcctgtttttaaacttaatttaattggaactatatagaatgtactcttttggtctggcttcctttgttcattttatttgtgagattaatccatgtcgcatgtattttttgtttttcttcactgtattgaattccattatgtgactctatcctaatttatttatccattctattgttgataaacattttggaacattttcatttttggctgctgcaagcaatatgcttttgacattgctttacatattttttggtgtgtatagacatttctaggaatagacttgctcggtcacagaaaatatgtatatttagcttcagtagagcttgctaaaatgttttccaaagtaatggtgtgtctggaattggtgggttcttggtctcactgacttcaaggatgaagctgcggaccctcgtggtgagtgttacagttcttaaagatggtgtgtccagagtttgttccttcttatgtttggatgtgttcggagtttcttccttctggtgggttcgtggtctcgctggcttcaggagtgaagctgcagactttcgctgtgagtgttacagctctttaggtggcgcttctggagttgttcattcctcccgtccagagttgttcatacctcccggtgggttcgtggtgtcgctggcctcaggagtaaagctgcagaccttcatggtgagtgttatagctcataaaggcaatgcggacccaaagagtgagcagcagcaagatttattgtgaagagcaaaagaacaaaagcttccacagcgtggaaggggaccagagcaggttgccactgctggttcgggcagcctgcttttattcccttatctgccccacccacatcctgctgattggtccattttacagagagctgattggtctgttttacagagagctgattggtccattttgacagagtgctgattggtgcatttacaatccctgagctagacacagagtgctgattggtgcatttacaatcctctagctagacataaaagttctccaagtgcccatcagattagctagatacagagtgctgattggagcatatacaatcctcctgctagacataaaagttctccgagtccccacccgactcaggagcccagctggcttcacctagtagatcccgcactggggctgcgggcggagctgcccatcagtcccacgccatgcgcctgcactcctcagcccttgggtggtcggtgggacctgggcgctgcggagcagggggcggcacccgttggggaggctcaggctgcatgggagcccacggggttggggggacttgggcatggcgggctccagctcctgacagccctgccccgccgggagtcagctgaggcccggtgagaattcgagtgcagcgtgggtgggccaggagtgctgggggacccagcacaccctccacagctgctggcataggtgctaagcccctcagtgcccagggctggcggtgctggccatccactccgagtgcagggcccgcggagcccacgcccacccagaactcacgctggcccacgagcactgtgggcagccacggttcctgcccacacggtctatctccacacctccctgcaagcagagggagctggctctggcctcggcccagagaggggctcccacagtgcagtggcaggctgaagggctcctcaagtgtggccagagtgggcgccgaggccgaggaggcgcctagagcgagcgaggactgccagcacattgtcacctctcagtggtaccagttaacactcatgccatcattgcatgatggttttattttagatctttgccagttggtatcagccatttttattttagtgatatctcactgtgtggcttcaatgagcatttatttccctgattcctaatgggttatatgacatttttccatatttattggccatttggctatcttcttcagtcatgtgcgtattttctggatacaagacctctgagggttatatgtttcacagattctttactctgtgacttgcactgtaactcatttgagtcttgaggaacataagtttctaattttaatgtagtacaaattatcagcattttcttttgtggatagctctttttgtgtcctgtttaaaaaatctaggccaggcacagtgattcccacctgtaatcccagcactttgggaggccaaggcgggtggatcacctgaggtcaggagtttgaaaccagcctgtccaacacagtgaaaccctgtctttagtaaaaatacaaaaatgagctgggtgtggtggcagcacctgtaatcccagctactcaggaggctgaggcaggagaatcgcttgaacccaggaggcaaaggttacagtgagccgacatcatgccattgcactccagcctgggtgacaagagcgaaactctggctcaaaacagaaaaaaaaaattctttgttttcctccgggtcaggaagatattctcctatgttatcttccagaagtttgctttcctttcagatttacattttaatctttctagaatttgttatatttttgcatggtactaaaggtaaaggtcaagattcttccctggccctcttccccaaggatatgtcgattgcctggcaccatttattaaaaagatggttcttttctttattgcactgcagtggtactactatcataaatccagtatgggactgtatctgaatgctccattctttttacattattgtatattctccgctaatactatactatcttaattactacagctttataagtcatatctggttaggttttcaactttattctttaagattatctcggctattcttggccctattcactatcaaaacaattttagagtaagtcattaatttccacaaacatcctgctgggatttcacatgctattgccttgaatatgtataatatctatatgtatatgtataaataaatgttttattcctttaagaatttttaaagtttttaaataaaagtttatttaataacaagtgttagtctgtctatatctcactactctggaaattttgagttgatgaacactacaaattttgaaagagaaaggaacacatctatgttatttgttatctaaagatgctggtgcatgtgtacaattttgcagataggactactgccaaggatgaatcagtgctaagtacctcagaaggaaggtagtagaaacgtgagctgaattttatatttgagataacaaataagtattaccttcttaaaagttcataaatatttcaatagatatattttactacatattgaatataatacatttaaagaaacttcagaattatgtgagttggaatgttaccaatactgtcaaattttggttaccatagtggatgggaggggtattcaaagggagtaaatcatggtggaagacaagcagggtaagaagaggaaagaaaaaatgatattaattgcctagtcatttgtaaccaaagcagagaaataataaataagggaataagctgtcattatattaattataaatctgtgctattatgtgaggagacatttacacaaatttgtttttgaaatttaaggtcttttctctttaaacttagtgtttcgaatgtcaacatagttttctttttctttcttttcttttttatggtgttattttttatactagatcacgggtggcaaacattttctataagggtaagatagtaaatgtgttggtgcagtccctgtggaaaatagttatggagattctgacaaaaatttacaaatagaagtaccatatgatccaccaatctcacttctggatatttatccaaaaatcaggatctcaaagaggtatcagaactctcatgttcatcgcagcactgttcgcaacagccaaatgtggaaatgacctaaatgcccatccacagctgaatgggtaaagaaaatttatatacatagaatattattcagccataaagtcctgccatacatgacaacatgaatgaaccttgaggacactacgagtgaaataagccagccacagaagacaaatattacatgattctacttatatgagacacctgaaataggcagattcatagaatcaaagagtggtggctaccaggggctgtgaggagggggaatggggatttactaatcagccggcataaagttttggttaagcaagatgagtaagttctagaaatctcctgcacaacattgtgctgatagttaacgatattattttgtacacttaaaaatctattaagggtagatctcatgttaagtgtttttttccaccaaaaaaaaaagattttattttcattttttgaaagaggtgaggtaattggtcgtgtagatatggggatggaggaggggagactgtcgcaggcagaaaataatagccatttcccgggttctaagcgcggagtctgtttgatacatttgaggaacgttttagggagagagactataaacaaatacaaaaaatatgatgtcagaatatcctgtttgtatgtaaagcaggctaagtgggtagaaagcatggaagctatctgagcagatctagaggagtgaccaaagatgcattaatactgaactggcatgatatgggctttgtattccatgaagggttggagctgtgggggtctggaagtgatggccactttggaagtgccacaaacagtggaggctgggaataacagaggcctggactggagtcatatctcgggaccccacctgggccattccttttttttttctttcttggtttctttcttttttttttttcttttgaaacaaggtctgtcacccaggctggagtgatctgggttcactgcagcctcaacatgcctgactcaagtgatccttccaccttagcgtcctgagtagctgggactacaggtggcgctaccatgtccagctaactttatttttattttcgtaaaggtgagtttaactatgttgcccagactaatctcaaactcctaggctcaagcaatcctcccgccttggcttcccaagatgctaggattacaggcatgagccactgcacactgggctgttcctgagagctaatctgtatgacttggctcccgattggccatgggtgagaggaagggggccaaaggaaaggaagaagaaccaggtggtagctactggtcttgttctgttcccaagatatgtggttttacataatctcatgagagaagtaaggtaaccatcatttttattttaaaatacatgccaacctctgggctaagtatttttggtataatttattatttaattattgtagcctagaaggtctatactattataattctcattttctgtagaggaaatagacatggggaagttgagtaagtggccacagtcatagtgttgcctgtgatggagctgggagagcagcctgatcctggctgactgttcttcactgtgccacactgcctccctctggtgttgatactcatgcttttggagcaagcccactgtaatccagataggtgtcagttagcccattgtggtctcagtctgtatcagacattagaaggatttaatatttttcatgaagtaaagaacaataggcaaatgcattagttacgattttttttcactatggtggaaagtaataaggaagagaacgtacctggcttagagttaccagtgtacatagaaagttgccttggttccagctatctggataacttgttgagatgcacacgatgtgagttttacccagaaaagctttatcttttgatatgaacagaattctgactgaaggggagaatcacaggacgatagggaagggtgaggagatggtctgtgtccaggttgaggatagaggggaaccatagtagaggaggcccttgattgaggggtgcagcttaagagacctgagtacttgggagggtggttgtcagggcaccaacgacagggccgggcccttaagcaagagtaattatttcatatgagaagcaattaggagtcactacaaggtctttggaggacagggataggatcagaatgatgcttggaagagatgatttttgctgagttgactagagtggggcaaagccaggggtaccatgccagtgatcattatttaggcttcacagtatctatgtgaagccagcgtatagtcaccccactttgtgagtggaagagctgaaagtcagggtttggaaggacttacctggtgtgtgagcaggttggtacagacatgttgtgagtgatagtttctcagacactttcctgttactgtatttcttatttaatgttgcggggggtgcaaaacatttccattgtgggttttaagaaagagtacctgtgtggatgtgtgggtgtgtttaatgaaactgtcgatctgaactatttggcatatataccagtgatgtatcttataatgctaatttaagacattacctattcctacttactgatatttcttaagttgttgtaccacattaatagcctagctccacagtagcagagagattgaatactacttttttttttttttttttttttttttcagagatggagtctcgctctgttgccccggctggagtgcagtggcacaatctcggctcactgcaagctctgcttcccgggttcaagcaattctcctgcctcagcctcccgggtagccgggactacaggcgcacatcgccacgcccagctaatttttgtattttagtagagatggggtttcaccgttgttgcccaggctggtctggaactcctgagctgaggcaatccacccgcctcggcctcccaaagtactaggattacaggcgtgagccaccgtgcctagccgagagcttgaatacctgcttttatctgaggaaagtcacaagtagaccccctgaaaattcaaagtatgatctatacaataccagtttcttaggttaaactcccaaatgttttcttgcattatgctattacatgtttctctcttcctttgactttttaaatttatttttcagtacactgaacaagatttcatgaaatatgttttacgtgcaattttaaagttatccttaatacctgaatgtaacccaatttcattacaagtgttggtggtaatgatggtgtgtgcatgtttatgttctgcagtttttaattaaactttaaagtcaagggttctcaactctttgcctggataagtatcagggagtctgtgaatggctatggttgtttgtaatatttcgtctaaatgagctttttttttttcctggggaaaaattgtgtaggttttagcaaatctcacagaggtcagtgagctgccctttaaagataaaagctgctttttatagaggggcagttgaactagtagacatatatcttatttaacacttttccagcattgctgttaaagacattgattgtagaatagtttatgtatgacttcaaaatgtaatgataatcagtttttggatgccttttggttttggatatatgaagaaacaaaatgtatcagacaacctatatataatacaagagacagattggaaaatacatttttctgtaactgaagtaaatgtagagtaactaacgaattattaaaaatacaaaaagagccgggcgcagtggctcacacctgtaatcccagcactttgggaggctgaggcgggcggatcacaaggtcaagagatcgagaccatcctggccaacacggtgaaaccccgtcgctactaaaaatacaaaaattagctgggcatggtggcatgtgcctgtagtcccagctactcaggaggctgaggcaggagaataacttgaacccaggaggtggaggttgcagtgagccgagatcgtgccaccacactccagcctggtgacagagcaatattctgtctcaaaaataaataaacaaaataaaatacagaaagaactgtttggttggctggctagtgagacctctgaaagggaattggttctgattctcatgaagaccaaaatggaagaaactagtctacaccctgtgccacactgggaggcctgggctggctcgccactgcagctctgccagttagcatggagtctgaaagaaactggtccagttttgccctttattggaaactacagtgaccttttgtcctttaatcttcactattgaaatatattgtaagtttagtaactatagagaagcgtttcttgtttatgttaataagtggcatgtggaaaagggctctcctaagagagaatcataaagcctggaacttttaatttattaaggctctgagaagtcctgcggaaaaaataaatctatttaactttgtttaaattgtagtttagcaaacttattatatttgcaccaacttttctcttgtgtctctcccactaaacaaaacccacagaaccggggcgatttctaagctagttaattcttaattctaagcgagtcctcagttagttaattctctgatgtggatgtaattgtttggagggaccctttctgagttcaacttagattgtgtccaggaacacctgctatgatgaaattggtgtgctttgggaaaatgggtaggctagatgacattaggaaatgtgtggaaacacccactcagtcacttcgattcaggttgcagaaaatgatgggagttaaaagtatggaaatgagaagtttcgaagttaagcactcaaatttaatattaaatatataaagctagaggaatgctggtattggattggaagaaggcagactttacccatcatttttaagcttgctggaaaggaaggtcatttgttactgtctttgtaaagacacttcgaaaatgaaatattcgaaaagatagctgagggagaaggtggtgaagaatcagaagaaacgttacttggggaaagttcttcattaatattggttctgattttggtgtttcacaaaaataatgtgtcattttgatgaaagaaaaatattgccctgcagtagatttgattttattttatgagaggtaaagagggggctgagtatattctcttatacatgcttacatcccaaatagagagtaagaatttcgaataagaacagtatgagttttgaaagtaaatagtctctatgttgataagaattgtggcatgcctgggtactgagtatcttttcagagatcctagagactgtccagaaactgttccagttcattgggtcaaaaatccactatttacgaaaagctaaatacggatttgcacgattgaccataatggcttcaattttgaaagatagtagtatcagagagcacttccagttggtgggataatttaagaatcgcccgtgctcaaatggctaaaatattgtactttttgctacttcatcactccattttaaaaatagagagggggagaaaagaaggcagacctgttgagaaggtggaagaatgtcagttggagagcaaatcaaaataaccatgtgaagccactccttagttaactactgcctgaaggttaactgttccttagaagcctgtcagggagtggagagactggactgggggctgctgtccctgtgtgtgcatgtgcacctgtgtgtttgtgtgtgcatgtgtgtgtgtgtatgtgcatgttcatgtgcatgcatgatgaagggtgaagagaacttgtgagtaggaaagaaggtgtagagaacagaaagctaacataaaatcctgaaacttagagtcctaggaaaatttgactattttaaactaactgtactgcttatttaaagataggaaaattataccattcttcttctggtataagagagagataaaaatacagtttttctaaattggaaaatttgctgtaatcttgctgctaatgactgatttcttccaacagttgcaaggcagtttttgctctgataggttgataaaggaaacaaaatcaagaacatattggaaattctcagagaaaattacagtttaggtatatgttgggggtggatacttagacattttaattgaaataaaacagttttatactaatatgggatcactgtgggtgtacatttgtagtacatctgctcttgaagcatttaagtagggttaaatgtatgttaatgcttttgcaagaaaattttcgataatatccgtctaaggaaactagcttaggaaataggtttttgaaaacaatatagatattatatttgcatttagagagtgaattaggactctgtaatgctttaagaattttaaaacattagttgtattctctagtggtaatgaaagttaacaataattaacacacagcagatgattaaagcaagcttacacatctggagagtggccacagtctgctatatgcctctaaacaccattttaattgacctacttttgatattatgaaaggctaataatgatttattctacccagttgaaaatactttttctagcagataattggaaacatctcagttggcccctctgttgatttagttagtgtgtgtgacagatggttaatatcttacgctaaatatctgccagccttgagccattttgttgttgttgttgactcacagtcactatgatgacttaaatagtgtatgaatcttgagaattgatagatctgtcagattatagaggaggagggagtcttatcaatgaggtagaccatgggttctcattgtaatagtgtagaatgttggttaactgtggactccctggctctgtctcaaatctactgattcataatttttgggtgtggggcttgggaatgtgttttaaacaagctctccaagggaatgtagttcctacttcaaatgaacaatggctgagtatagtttatggctttctttcatggatgaggaaacaggcccagaggggaaaaggtgactagtttcataagaatcacaactttgacttctggcactagaaggatagggttctttcctgaatgccacatgaccttaactcaggctagttccatccctaagtacagaactggaagagttttaaattagccctaatttttacatacaccaataccacatatgactttagtataatatttggctcagcttggctgtgtgtgtgcttattttttgaaagatacctatcaccactgtacctacatgttcagaataataataataaaaagtttacaggggattatagagaactcaattttaatgtgaagtacttatgctctacttactatgttttaatggcaaccattttccccctagaagtttcttgagcgactctgaattgtagccagaatacgtctttcctcttcagacccttagctgtgattaatgtaaaaaggcacttgtcaaaagggtttgaaatggcaaccttgatattggagcatatggcagtagagataggtctgcatccacttactccattatgttatttaatgtacgaattcaacaatttgtcttttgctccctgcttaaaagatgatggccgtagaagctggttgttaaccatatcagcagggtggaatattacttcccttagagaaaaaccacaactttctttgaggatttagcatgcattagaaaaagcatgaaactgttcagagataaaatgctgggccttcagcagtcctctctttgcctccaagaggggttacttttatgtttaacacaaacatcccttttgtgtttattgtattaatggaatttttaaaatccatgagaaagagagagagattatggtttagtgtttgaaataatatagcttgatgaatcttttttattttaatgagaaactctttttcatagatatgctgcttcaaaaagtgaatcttttagaaattaaaatgcattaatttagttattctgtatggaaacaaaaacatggaaagttaaaatttgcataagtgaagaccttgatgatttcagattatagtgtggtggaggttaaggaataagagtccatagaatttgtaaaaacaaattcagtctaaccacttaatggcatgtgcaagtaatttgccaattaaatatctctagtgtctgaaagatcttcagagaaaagagtggaggttcttaatctttcttaattttatactttaagaaacataatagaaaattacttagtttttgatcacttttcattcaaaattttagcatatgagctcaagaaaggatggattttaaatatttgaggaaaattattgctttttgagaaattaaaaactatgatacttccaaatcacactgtgctcatttaaaaaatagtatttgtaaatatttggtgcccagataataattttcattataattaagactttatactttggagttttatgattttgatggtcacctactatgtttagaacattgtactagtcatgcttaactccagaaaaactgtctaagatagatattcccattttaaagattgagcgaattgagtcagagtaagtaatttgcccagggttactcattagtaagaggcagatctctgacagttctaggtgttttttgtttttttttttcagagaaagctttgttgagatataatttacccatttaaagtatataattcaatggtttttaatatattcacagatttgtacaattatcaccacattcaattgtagaacattttcatcaccccaacaagaaacctcgtaccacaccttagcaatcaccactcccttccatccagtccctccatcccctggcagttgttaatctactttttgtgtatatggatttgtctattctagacatttcatataaatggaatcataaaatgtgggctttcatgattggtttcttttacttagcataatgtttccaaggctcatccatgatgtagcacatatgttattcctttttattgataaataatatttcactgtgtagatatagataggtcacattttgtttattaatcagttaacaggcataagagctgttcccagtgcttggctattatgaataacgttgctgtgaacattcatgtatgtgagtttgtatgggcatatgttttcatttctcttgagtatatacctgagagtggaattgctgagtcatattataattctatgttgaactttttgaggaactgccagactgttttccaaagtggccacaccattttcttaaatatattcccaccagcagtgtttgagggttgcagttccttcacatcctcaccaacacttcttattatctctttttgattataaccattgtagcagggtgaagtggttatctcatcatggttttgattttcatctccctgatggctaatgatgtttaacatcttttcatgtgcctcttggcaattttatgctgtctctggagcaatgtctgttcagatcctttgcccatttttaaataggattatttgtccttttattgtattgtgagagttctgtgtgtatactagggttccttatcagatatgtgacttgcaaagtttttctcctagtctataggctattttatctttttcttttctttttttctctcttttttttaaacttttttattttaagttcaggggtacatgtgcaggttcattatataggtaaacttgtgtcataggggtttgtcgtacaaattatttcatcactcagatattaagcctagtacccattagttatttttcctgatcctctccctcctcccaccctttaccctctggtaggccccactgtctcttgttctcctctgtgtccgtgtgttctcaccatttagctcccacttaaagtcagagcgtacagtatttggttttctgttcctgcattagtttgctaatgataacggcctccagctccgtcgacgttcctgcaagggacatgatctcattcttttttatggctgcatagtactccatggtgtatatataccacattttttttatccactctatcgttgataggcatttaggttgattccacctctttgctattgtgaatagtgctgcagtgaatgtacacatgcatgtgtctttataatagaatgatgtatatgcctttggatatatacccagtaatgagattactgggttgaatggtatttctgtttttaggtctttgaggaattgccacactgtattccacagtggttaaactaatttacactcccaccaacagtacataagtgttcctttttctctgcaacctcaccagcatctgttattttttgactttttaataaccattctgagtggtgtgagatcgtatctcattgtgttttaacactttctttttttcttttttttttttcttttgagacagtctctctctgtcgcccaggctggaatggaatggcatgatctcggctcactgcaacctccgcctcaggggttcaagcaattcttcctgcctcagcctcctgagtagctgggattacaggcacgtgccaccatgcctggataatttttgtatttttagtagagatggggttttgccatgttgcccaggctggtatcaaactcctgacctcaggtgatccgcccatctcggcctcccaaagtgctgggattacaggcgtgagccaccgtgcctggccattttaatactttcttaatggtatccttggagtataaagttttaaattttgatgaagtataatttatttttttttctgttgcttgtagttttggtgtcaactaaaccatttcctaatccaacatcacaaaaattatgtctatatttttttctaaaattttcttgaaaatatgcctatattttcttctaaaactattcacggttttaagtcttgtagttaggtctttgatccattatgagttaatttttgtatacagggtgagataggagcccaacttcattattttgcatatggatattgtccctgcaccagttttttcttattgtctgttacctttgttggaaatcaattgactataaatgtgagggttaatttttttactctcaatttcattctgttgttctctgtgtctatcttataccagtactacatagtcttgattactctagctttgtagtaagcttgaaatccaaattcgtgccaggcgtggtggatcaagcctataatcccagcactttgggaggccgaggtgggtggatcacgaggtcaggagttcgagaccagcctgaccaacatggtgaaaccctgtctccactaaaaatacaaaaattagctgggtgtatcaaagcgcctgtaatcccaggtactcaggaggctgaggcaggagaattgcttgaacctgggaggcagaggttgcagtgagccaagatcatgccactgtactccagcctgggcaacagagcaagactccatctgttcttctttttcaagattgttttggctcttctgaattgcttgaattttcataatggattgttggatcagtttgccaatttttgcaaacaagccaaccaggattttgatagggattacattgaatctatagatcattttagggagtattgccattttaaaattaactttggagagttttgccatcttaacaatatcaagtcttttaatccgtgaacatgggatgtgtttctatttatttagattttctttagtttctttcaatgctgttttgtagtgtttagagaatcagttttgcacttattttgttaaatttatttctaagtattttattgtttttgaggctactgtaaattgagtttttttaaaattaattaattaattaattaatttttttgcaacggagtctcgccctgtcacccaggctggagtgcagtggcactccactcactgcaagctccgccttccgggttcacgccattctcctgcctcagcctcctgagtagctgggattacaggtgcccaccaccatgcctggctaatttttgtatttttagtagagatggggtttcaccctgttggccaggctggtctcgaactcctgacctgaaatgatccgcctgcctgggcctcccaaatgctgggattacaggcgtgggccactgcgcctgaccgagttgttttttaaatttcatttttggattgcttatttcaaatatatagcaatacagttgatatttgtatattgatttttctgtcttccaaccttgctagacttatttattagttctaataattttttagtgatttcttaggacttttctgtatataagatctgtgacccaacttttaaaggtctcaactcttttcactataaccataccctgtagcctgggaaacttactaacttgggagaaataggttgactttttgaggttatctttaggaagtaaacaactgccactttgtaattgtcttctcatgatataaacaaatgcggcagacttttaagatggaaacttttgtggagaaagcaaggttccacaagtaaaaggaaccttgagcttatttggtgaggtcttactttaaataatatcactattatttggtgatattatgggaactacaggccttccaaacatagcttgtttggcacagactgaaataacaacaattatactttactttaaaaaataagcattctaatttggctttacttttaggaggagtggctgaactaagaaaaatatgactttatatatccaaaatatatactagtgctacatgcacattttaatgctaattagttttgtttctttgcctatatgacctcaacatggggaaaagagtataagccttgtattttagaccagaagagacctaattctaattatttttacatttgagatagatctagcaggtggttcttacctgaaagtcttccacgactgagttacgagttattctgaaccaagtaagcaaccaaaaaagctaaaacatgttgggtttcttctttcctctccaggactgcaagttaggtttggaatggtcagggaatggtacgggtttggtgagagggcaactctaagtttgactcctggagtctttcatagtaaggctcatggaattgcccatgtgggagccagagtatagagtagaactgggcttgaaaatcgctttggattttcatttctgatttttcagctataaaatgagagctgggacttgttcctcttacctctgagagccttacaagacatagaggaatcttaaacaatcaaatgttaagtgagaaagctatttgtgcctcctaaaaggagaaaagaatattaacctgacgtggtattataatgtctcccagagtgagggagaaatgcaaggaacccatagtgattattgagtttatagatgtttctattcatgagcctgcaggaaaacgtagagaccaaacatttcagaaaatgaatgccctaggatgattcattagagcagaatgaaatattcagaaacttatgagtctataaaatatttttggagaaaatgtgtgagttttccagaggaacaagatttaatattttgttttaaaagactttattagttgtgagatgaatagaaatattggtaggtttcctttaatcttttgcatatcatttggcttctccaattagaatggcttggcaatcttatgatatttgagtacataatcctgctaggtaggtcaagagagtaaaaagtaaatttcgtagaaattatgccaagtggtaaacaacttcaggcctttttttccctgcagagtcccatggccaactgttctttccatagcaaacttttcttcaccataaacatagcatcatgccccgggggctttaaaataatgtttgctgctggcaggtgatgccaatgtctgtggctacctggagcaggatctatcatgtctcagtgatcccaggtggctttggtccaaagcactgtaactggacctttgattcacttcaaaagaaatgaacctttcttcatgccattgatcgccattgaaaagctccctcaaaggtccctcttagtaaatccttgacacctttcaggtcccagatcatggtttatctgctccagtaagcttttctctcttacttctctccttaaatctccatttccttaccatgaggccaccctgtggtttagtgctgatacagtgtactgtttgaatctgctgttgaattatttctcaagtattagacttggatgtagcctcataccttttactacccttcctcttcccacaggacctagtacagtgctcccaagctgtgctacttagaaggttgctagctagctagctaagccctgacattcctacaatagccagtatattggaacagccacaaagctaataatgggcctacatcctcagggtcatgtgtttgatacactccccaactccaggaggcaccagtcacatggaccatgaagtgaatgccatccactagagttgtgcagcatgggagccctgaatgacctaggtcacacatgatctgtgtttacacattcctgcattacactgcttggtctggagagtcttctctacctccttccttttaaatttttatccatttcaatgagaagttaaaaattaggagtgaatctaacccttccatactccctgataatgctttcagaatgaggtcctggacccttgcatcaggaaaacctggagtgctggctaaaatgcagttttttcagcccctcaacatgtttaaatcagtttaggaccgggcctggggattttgataaacgatgttgactgatgatttgtatgcagtgcactgaagtggtgagaaatgactgttgaatagtttctcagcaagggaaactgtagtgccccaaagggttaataccgctgtccttaacctgttgcattatctgttgtaaaccttttctggctcatttaaattcagcaactacttagtgagcagttgctctctgcctaccactgtgccagccatagtggtagaatcagatgcgaagaatggggtctttgctgtgaaggggctaataatcaattaggaaataaaagacgtgcaataaatatgcacaaacacattaatatgtgcatacatatgcatactatgtaatgatttatattacatcatatagagatcttttatatacatctagtatagtatactctagaagatttatagagagatcttttttcaaacaaatcattattggtagtacaggcctataggattgtcagattttagatctgagagatatcttagggataatgtatagctctatcctgcagaggagatttcagtacatcagccaggcatttcatagaggcacacacacagtctatggtgtagtccaaaaaactatagcgtttagagtttcggattcaaatgtgagctctagtaagaagtaaatggtagttactttaattatagataaataagattgttgtttatggtgagacacattttacatgcattcactaattttagaaaaacttaaacctactttcatgtatatttataattttagaccatataaatataaaaatggataataagtgccttagctttacataccagctatttagtaaaaaccttctgttactttctatgggaaacagagattgaaggagagatcaagaaggggaaaaatcttatttttgacaattatcctatgattattacgttaaaactttatttcactggaatgcttggcagaaaggaatttttaagttaactgaggataaaccagaaaaccattttttcttgcatattatttctctaaaattttattctagtataaaattttatttacagtgtgaattttttttcttttggtcacatctttatcatttgagcattattttcattagataatttattcatctagattagaaggttatgggagcctttattaaaactttattgggcctgcttcctacagagatacagacacttacacctggaaaggagtcacagattatctcggttaatatgttttgcactgaagaaagtcatgttttaagatattaagggacttacagccattagaacaatacttggcacatggtgagtgcccaagaaattttagctgctgttagtagaatttgaatccaagtcatttgaatttcagtttggtgatttcttctcagaaatcttctacttaattccttttattgacccctggtcagactcactgagaatcttttttgtttgtttgtttttcctttaaatcctaattctggattcacttcattttccttatatcttatctcttttttccctaaaagtaaagaagacagaataaattcagtacttgtactttaaaacttttattgtcctcatcagggccagtctgaggatttctgccatgttttataaaatttatgcccagcataatcctgattttttactgccttctctgtgcaaatacacacctaaccttatgctaatggtggcactactgtttcttcatgacaaggctttaaaaatttctggaaactttaaaaacgtggaataaaaactgtgggtataatgggggtgggagcaggaaatttgaggggaaaccatagacacattatgccaaaggttttggcacttttcagaggactaaataactttcttcttctttttttgttttaaatagaagcaaaagagaaaaaaaggtatcaagcacagtttgctcatagaaatgagcaggtttggtagatatatttaaagatgtgaaagccaggaaaaattattaatatgctaataatttgtatttcctccattctccaaacacatacttttatcaagaggaggaggctaaaaataaaaatagaagctttagaaaagtaaggtttttcatgtttttttcttgtttgtttgttttttctctgtcagtcctcttacagtttttctgtagaggctaaaaagagatcctaagccaggaccagcacattcagtggcccatcttaaatgggattatttgaacaatttgagaactcttgggtcaagccaaaagagtgcagtagaaaatcaaagacttgggctgctgctggcttttctcctcattttctttgtcttcacgtgcagctcgataaagtgttggactttttcaaacacagaaacagccttaggggtgttaaatatgtgtgtcaaattttttcctaatggatttctaaatcttccaaaaacttttaaataacttgttaaaggctatatgtaacgcttgtatcgtgtgtgtgtgtgtgtgtgtgtgtgtgtgtgtatgtgttttcctgccactaagattgaattctgtcctctgtacctagaaaataatcattatttcttgaaacaaaaacaaatgagatgataatagttttagctttctacttgggtttcctacagcctttaggttgtgtgtgtgtgagagacttcttgattttccccccctttattttatttggtgggattcttgaccttgatttcttaactgattccttgagggttcttttatttctgccatagtttgtaatctgtatgtctatttaaaattgaattactttttttaataagaaaaagcgatatccattcaataacagattttatcagaaagaacttcatttactttgttttaatcaacctgtcttttctcttttcagaggatgttaagcaagtttttggacagaccacaattcatcaacatattccatttaactgggattcagaatttgtgcaactacattttggaaaagaaagaaaaagacacctgacatatgcggaatttactcagtttttattggtgggtctagctcttaaaaagttaaaagggtatggccgggcacggtggctcacacctataatcctagcactttgggaggccgaggtgggcggatgacgaggtcaggagatcgagaccatcctggccaacatggtgaaaccccgtctctactaaaaatacaaaaaattagccaggcgtggtggccggcgcctgtggtcccagctacttgggaggctgaggcaggagaatggtgtgaacttgggaggtggagcttgcagtgagctgagatcgcaccactgcagtccggcctgggtgaaagagcgagactccgtctcaaaaaaaaaaaaaaaaaagttaaaagggtaaataagtaaacctggaatcaaattgtgtgtaaaagtcctgattggagtcttgaactgtgatttacttactacatactgtgatttacttactacatacttactacagtttagcctggcaaaactgtcccattgagaagtatttctttattaatatgttgaaatcatagaattaaatgggatttccacagatttatgtagaactcctccatgtttagaaggaatacacattgaggccccgggaaatcaagtgattttctcaaggtcacttagatcaggaggggcaaaattacaacttaaaattttggcttgtgactcgctgtgttactacttaccaatattttgttttcccctggaaatggacagatttgtcttcagcttcagaatcatttcatctgacaccttttatagataagacactagtctcaaacttggctgcatgttggaatcacctggaagctttaaaaactaatgttgcctcagtcccacctctagagattagatttaatgggggcaggggggaagcctgggtatttgagggctatttaaagcttcttgggtggccctcatggagaaccagtgtgctaagggcacttgcgcactttcttatgtgggttaaccgctgtagcagttgtctacatttctggggtgcactttccctaacccagtccctgctgcccttctctcgtgacccccttcccccacccatatgatcatatcattgggccactgatgatgcaaggagaagagtattcacaaaatatgattataacttagttttccttcagcagcattatttaaaaatactttaaatacaacattatcatgtagtcactagaggtcaatatctataggctatatagatgtttatgcatttgctttgtttctaacagttacattttatttatactttattaaatatgtttaaaaagactcatgtaaggggactcatttggtatgtttacattttgggtcttgaggaaaattttcaattctttgttactagaaatgtccttagtgggtatcctggtgcccctggctttttcgtgtgttccagaccttgccagagccctctggggagtggttggaatcctgttctgggtagaggtggagggtgcacgggttgtggtgctcacttggtaaagattttgtggtgtccattcttagcaactagcatttgtgataggttaacttcaataggtacttctctttttgaattttcatggtattattatgattcatataatttgtcctgctgtctagtttgcttttattttccaggcctttggaaacataaacaagatgccctaaacctgcctttgtattttttaaaaacaaagcgttaatgtctgtgaatccctgttttcagttctctgtaaacataaacctacttacgtaactcagatggagaatgtaatgtgagttgccggatttttgctgctgtttccacaggacattgttgtgctgtaggaggcggtattcattttgatgaggaataatgacaataatgttattgagacaaatgcctcaaattgactttatggaacacagcctaattaacttttagttttaatgggatgttagcagtagtaaggatgatcgtgtttcctcctctaagcaagtgtcaattatactgaattgagtagattttcaactgctcacagcagcctctgggccttcctccagatatggggaagccagagtccaggattaaataactcagggactatggttatgtttccaaacaatttgtaaggcattcacttaaatttgacttataatggtaaatggaaacatcccacagtgtcctatgtgggatgattttgcctctgtagccagaatagaagtactgaacttttactagattacaatggttatagtggtgaatgatctcagtcagggccttgcttttgtgtcctagtccagatccggacttataggaattaatggatggaccatgataggctttacctgaatgccagttttaatgtctaccattgggtttcttccttccttccatttcatgttttgtttgcttcatttgaactcttttctgaatgtaggtagagcttcagacctctacttcagatgctttgtttgcttcctttgggctctttctggatacaggtaacttcttaaagatattagtgaatttaatctgctgtgtttcaggctcttgctttgtcaggcaggtatccgcctttctgttcttgggcaggactcagaaataggcaccaactccctggctgatgccaaagctgtgaaggcagatgcttggttgcttgaaatgtgaacaagctgccactgtgcatgctgctacctgtcacatgatgaggaaggggagcagccgtagggacagccaaaaagtgcttgtgatttcagggaacttgtatggcatgtagagacagcactcctctattccactgagggtccctagaagatagctcaggttggttccggccagcacattacctgtgcttattatgtatgtatatacatgtgtgtgattggtggggcagtgcagttctctgcagttcctttttttttttttgtcacttaataaatgttttactatatctaagcaagtgtgagcttcttagaaaccaccatgtggctgtgaggatcttacttgggtcatgtgtttatctgtgtagagtctggacaggtccccacccactaaggtgttggcagtcctgggcattgcttacatggtgagttgctatgtccttttctgtgctttggttgtaaaagtcataaagtggtgaatcaatttgatattatttgagctaaacttgactgatttgtactttgcaagtggtaaatcaattcgatattatttgagctaaacttgactgatttgaactttgcatctagtaacattgaagcaagtggcagggatacaaagcctccttcctgtagtcttcttcctcattggaatggaaagatttcagcagggagtggggtcacatttctcttaccccattatttatactgttacatctgttgctgctattttttaatgcccagttaacttcatctccatataacttcatgaatgatggtatgtgtgaatgtgaatacagttgtatatgtgggtaggtatgtgtattttaaaatattctgtaaacctctccacgtatgtctactcccagctcctagagcaaagcctctaattttatagccgctagttttaaaatagattttaatattctttgtattttagaaaataatttggagaaatttttctattctaatctgatggaactgtaattgataaatagtattaatgggctgggcgtggtggctcacgcctgtaatcccagtactttgggaggccgaggcgggtggatcatgaggtcaggagttcgagaccatcctggccaacatggtgaaaccccatctctaccaaaaatacaaaaaaattagctggacatagtggcgtgcacctgtaatcccagctactcgggaggctgaggcaggagaatcgctgaacccaggaggcagaggttgcagtgagctgagatcaggccactgcattccagcctgagcaacagagcaagaccctgtctcaaaaaaataaataaataaatagtattaacctaaaactcggtattttttgtgtgtcatgatgattactcatgtcgggcaaaccatccaattcagcaaatatttgctgagcatgtcgggtttgtcaataggattttgcaaaggtttgaaaggtgcagagactataatcttgagacactcataatgtaaaaatctaggacttgtatctgggtatatccacctgacagtgcaaaaggagcaactacaagtaagtataaaatgtttgccctatgagtttgttgttttgtagcaaaaacccttaaaggtttgtggcataaaccctaatggcaggtattcacatcctttgccaaatttttttttcctttttcttttctttcttttttttgtttttgagacagggtctcactctgttacccaggctagagtgcagtggtgcattagcgctcgctacaactttgaatgccagggctcaagtgatccacccgccttggcctctcaaagtgctgggattacaggcatgagccaccgtgcccagcctgctttgccaatttttttattgggtgactgtcgtaggcacttgggggcacagaatgaaaggtttctaaaacttttctaccaaattattgtgtagtcagtactgagtcactttcaaaaaagttacaataactaatatctgtataatgtttataatttacaaagtgcttttaaatattatttctgataatagcatcctcccaataacctaaaaggtgattatcattatcacatattgtatgcaaaagaataaacctactctatggtaaaattttgcatttaccagtaattttccagggaaatggcccatagctttcattatgtttccaaagaagtatcccaaaagggtggtaaagagcagctgttctagagcttagcttctgcagtcagatgacaggtgtgtgacaaattcaagaatacgatgccgttcccactctgttgcactttctccagatctaaggctatagacagctattttctgttcctagaagttaccatgcatctgaatggcagtgcccagtcatgcattgctaaacatctagcattcctgacccctacccattaattgccagatgcgatcatcaacaagttcttaggggtgcattgtactgtcatttccaggtttttttgtttgatactgttttataatcttgggtatctattttacatgtaattactttaatttgaaaacagtctacacataggagtttccactggttccaatctcaggatagaaaagtctaggattactacaaaattcaatatttctgttaactagaacaacattgttattagctacctctcatatagcattttctagctaagaaagttcttgtattaatatttgtccttacagtcaccttaggttgttggtgttgtttccctatgaaagctgagtgaacagaagcctaaagaagttttctggatttgttcaagattagacaggtggatttgaagttgaaattaatttttctaaatctctggcagtttttaccccccaaattttagtgtaaaaattatctgagatgcgtatttagaaatgcagagtcccaggcctctccaccgacctcccctcccaagactcaaatttagtagttctgaatagggcctaagaagctgcctttccaataagcatcctaaattgcgatgctctggatggttcaggaaccacattttggcaaactttggtctggactaggcaaccctgaatgtgtaaaggtaaacggctctttatcctaagactaatgggaagtctgtcgaggcaaacctcataagatttgtgcttcagaaggatcactctactattgtgtggtaaatctaatggagaggaacgtgaccaaggagagggagaccggttggttgctttttaagccaagagtcaaacaactgtggtctcagttggatggtaacagtgatgggccagagtaaatggagtcaagagaacttacagggataggccagacaaagcttcatgatttaatgggaaggggacagtcatagatttgcagaactcaaggttgactcttgggttttagccttgggctagtgggaggatggtggtgtttcattgaaatagggagtacaagaagaagaggaggttttaaggaggggctacagagtagtgctttatatgtaagagctgttcacgtgtgttggtgtattggctctgctgcctcttttcaattctttggtgttgagatgatttactgtaggaccctacctacggcccctgtatagttgggttttttgaaggaattttgttctgcactttatgtcgccaggaaatttcttctgtttccaggggtcatccagctattgctctaaaagcatcatccagaaattgcaatgctctgaattgtggagaggcctgattttgaggttgtggattccattccactggctagctaagagacaggatagctgacctgagagggaatgaggctaaaaatcctatctaatggcttctcatcaaatagagtttaagaatgaggtcacctgacccaacagagagctctaatcacaagggcttgagtattttatcatagttttactctggtcctcattttgtcagaagaggatgatgaaacccaaagacatgaattgtagtaaatagagctaggaatagaacctggggatcaaagctgtgtctggcatcccagactggtcattcatattagtaaggatccttgtcctcagatcacgagtcccgtgataacctggttggatgccaaagcatacccatgctagtaatgcaactgaacaattttggttctttttaagaaagcagattgaccattattttggcttcttggtcagcacagtgtagaggtcagcctacttcttttctgtgtaacatgaacattttggttatttagatcctgagccctagagagtagaactctagaagtctgctgctcccgggtgacggtagttgccaatgtccctctacaagccagagattcactgctgctggtcagatgtggtcctggctttttctcaccatcagttacggtttgcgactctatttgtcatagcatcctggtgtaaggcaacaatttcaacacaagaggctataggtgttaaaaacaaaattgctactacccccgcccaaccaccaccaaacaaaacataccttcatccatggcaaccccaaattttctagctttagaattaataagcgatttcatgtgttcataaaaaataatcgcttgtagtagaactggctgaagccgtaattctttacagatgagtggacaattaacaaggtccttgcttaggtttaggtttgagtaatctgagccatttgcctctcccttttgtcccccaacttgtcttgtttgtattagtgaaagtatctagaccatgaatttttttttttttttttgagacagagtctcactctgtcacccaggctggagtgcaatggcgtgctcttggctcactacaacctccacctcccaggttcaagtgattctcctgcctcagcctctggagtaggtgggattacaggctgcccaaccccatgcccagctaattttttgtatttttagtagagatggggtttcaccatgttggtcagactggtcttgaactcctgacctcaagcaatccactcgcctcaccctcccaaagtgctgagattacaggcatgagccaccgtgcccagcccgaccatgaatttttagtggcccaagaacccagttgtattttcattttcactatgtgaatgccttttatgttgattctaagttgtatcaggtggggtctgtgatgtagctttggtattgtttcataaacagcatcatttggtgttctcaaatgaactagtgagtagagcacattagtgttgtttgccttcaactcttccactagatgagattctgttttgtgtccaaatggaagccattgctagtttggtgatgagtaactagagatgtgatcacttggacagtaagatgcaggacacgttccagccacagcacacactttctactctctgggcaaagaaaatcaggattcattgtgctgttgtgtttgtggtgttagcttgctgttttgttgagcagcctgttgtgcagggtttttacagtagcatcctggtaaaaatgaacactctatacagcatctccccagctgttacccactgtgaagtttaacgttaaattagaagagcaaggaaattgagatggaaaagctctgtatttggtttctgccaaggtgttgcagtgcatgctgagccacatgtgacactgcttccaaagacccttttaattaaaggcctcacccagtgaattggggatggaatttcaccctcaactctgacactgactgcatggccaaatggggggtggggggaggtacacatagaacaaaattaagaatggtaactacttatctctctacctattttattgctatgtttcatttttactttgttaaaaaatatgtggatcttcattttaattagaatgtttttcttcaaattagcatagattatgaaaataaagtggatatttatatgcaaaccagtatacaggtactgatatgtgatgtaatatagaaattgtttgggctaaatgtgatatggtattttttaggcaaatcgtctttctacatttttgtttcctgtttcgataaacaattagctgcattttgcccagaattcttctattaccatgtctaaaaaggaattattttgaatcatttccttattaactctttgcttttattaatattttagattttgttaaaatttcaaaacacaaaaatgcaaattaaccagggttcaaaaaatatatatatttattttttggcatttttggctttataatataaatcacctggctctcctgcttgttttgagggactgggttttttgggtttttgttgtcattgttgttgttgttcctgataaattgttctcaggctaaagcacaaacttgcatgtctgaatagagatggagagaatattttatattcaaaatatacctacctgaaaattggagattattaaggaaatgacaggcctggaactattagaagcacgaatgttagacctaaagtagtgtaacccctatatatgtttattctgtacaactagcaattttgaagagtttgattttttttttctacagcagtctgaatgggtgtgttgaagtagttggaaactgctgcaataaaagcctgttgcattaatcatcatgcaccagaatagagggaacagaaaatagttcactggcacatattaaagagaaattgggcctcctttcatgtacttgagtggaactgccttagagatagctgcagaactcctgctcttggaccttctggccttaggtgataggaagggccatttgtcttcagttggtaactgtcttcggcagcagcatttagtaagcacccattgcctggtactgttaagagctctctttagagagacacttcattttctcagctctctggatttgctacaaggtttcaggccctgtgtcttattttctttattcacttatttaggtatcagtttgatttttgttgtctgcctgctctttgtatgcactgtgggatgatctcacccatttctacaatcatctttttcttcatctggtttttggtaggtcccctctaaaaggaacaggcagtctgtgtaggctaacatcatggctccagaagccgactgcctggatgcatattcagtttcatccttgcccgtgtcacccttggctcattcttacctcatttttccatcttcagaacagaggtgatggtaggaccacctcggttgtggagaggattcaaagagatgaagcagggaaaacacaacagtccctgggacatagcatgcacttaataacttagtaaacgttctccttgtgatgttttctctaaaatcctgttatctgaatttcccagatctgtatttctacctgtaccttcagctttcttttgtgtgcctcttaactttttgtttataactgaaactcacttcattccaggtttttcatcatggtcaaccacctcatctctttccccttaagtattttcctttgtggtagagtatcttccccatcattcaaaatgtggatttttgagatatatcttacttcatttatatattcaaatcatcatcaaaattttcttaaagtctcttttcctacctgtccaaatctagttatgacccccttatttatgattttgcctgaggcagcataagttagtagttaagaatctcagttttaaaagctgacatcccttgctttggatcttaactcttccactttttagttgtgtgactttaggctagttacctgacctctctgaacttcaggtgcctctgtgtaaaatgaagataataatcattacttcacagaagtattgtgaggcttaagtgaaatgctgtctttgaagttcttggcatagcccctggtctgtagtgagtgttgaagcattcagcttttgttatcctccatcctggctgatgttcatttttccgttcctgtggctagttcagaatgattgagcagaaccactgtttcatattgcaagagactttagaggtttttaaacctttcacctggacaaaaatcaaagccactgttttttaaatgcctgtcattcatgacctctggtttttacaaccctgcacagtaggtggtgttgtgcctattctgtagaagaaaatctgaggctctaagatgcaaacaatcacctgagctctcccgggtggcagtgtcatgacttctgtttacgctctacccatgcctgttccagatttcttattgtcatcataatgtatggcttccataactccctctattaaagataaggttaaattcttgacatgtgttcctcagcctatggttgaacacgtatttctggtgtcagggaacctgctacttttcaaggtagcccattttactgctgaatagttctataggttaaagacttcttctgtgtactgtgctaaactctgacccctatagcatctctccattttttcaaaagaaatagaggggcagcctaatattttttttacttgatagtcttttaacttttaaatatgtgaatgtaatgattactgcccatattgttctcccctcctctgcacagatgactcgtttacttctgatccccttcattttagaaataaatactattttgtatatgctatatttcatgcatactaaaagctctctgtctctgttttatcccttctgagttgagatctaggagctgtcagtctcttgacaacccatagtatacattcagattttcattaaatagcttttgaggtgcaaaccaggagctttgattttaagtcattctgccatgagtagtgagcctagtcatttatttcaaagaccacacatttctttcatatttacggagtaacctatgtgttagctcccactggcctcctgatttaattttttcctcctttgtctcttggggctatgggaaagagagcaaaaagggagtgaggccaggagaaggccttttagatttggtttctctcctccttggtctctgctactattggtaaaacaatcctgatgctctgggtgtacagaagccctttgccttaatggaaaactttagggaattttattatttttccacaaaaataggcaacagtaaaatctagagcattaaatgcaaattgagtttttatctttccacagctgttaagatttcttagtgtcaaatttattttttaatcaaattcctgacagtagctttgtctgaggttccccatgcagttgagtgaagtattaggagcatgggtagatagagggctggggagtagaaatgctgaggcttgaattccagctttactgcttcctgtcagtgagactttagtttgctcaactgctatagtgaggttaataatagtacctaccttataggcttgcagtaagcattccatgaattaattcctgtaaaatgctttacagcagtgcctgctgcataatacatgcttgctaagtgctattgcatggttgtcatactggttgaggtcatggtttcatttcttcacccggaaggagaaacagtcacgacataaacagatgatcttcagaaggcaacccacgtcttcagaatgctgcttttaaagttggagagccacctaactgcgtgttttcactctgtcctgctatttagagaactacatagatctagcattttgtcttctgtggaacttataatgcccccaatctttaagagctgttggaaatgtattctcaggttgttcatcatcagacttaaaataactttcttactccaacttgaggggtccctgctcatagatgtttaatcatggaagcgtgggcacaggatgtgttgtaacactgtcctaatcacaggtatgtcccctgtcctgctatgtgagcaccagcccccaccttggcatccattcccaatctggaattctggacaggctggtcttagcattgtggcttcctgctttctgaggagatggggttgccagagaaagcggtgccatttttggtataattgtctgaggatctctaagatgttgagttataaactagggaaaatggtaaatcgctgaacataccttctactattgttgagagtagtcttggcttagctagctttagcaatgggtctggtaattcaaaggagactgttcatttactttcaattgaatacgcactgtggtcatttttcactacagggtgtttaacagttgatttcttcttccttaattggaagcactcatatagagaacctcccattgttcaatagctcacgatttgttcattcagttggttttacagaatacttttcactgatgagaatgcctgtcatttattgagcacctactatacatctaaagcattctgctgagctgcatgtataaatgtaagtagatgcttacaggacttcaaaaggttatactgtcttttccttggtaaggtaggtgtaaaggcaggaatgtgaataactgattatgatgtaagatcaaataagacaagttttataattgatattcagacagggggccaccggaagggacatcagttatttccagttataaggcctggttatatttgcctaagtggtaccatttgagctaagcttaaaggaagtggcaggatttcaggagctggagaaaggggcagcagtctacactaggtggaagtaacgatgtgggcaaaagcccaggtgtgtggcaggtctggcaggggtgggcatgggtgataggagatgaggctaagactagttcctctgggggcttgtatgccttgcttcagagacgggtctgtatgatgaagggtcattggagatttccatggagggggagggagtcaggtttttaattctgaaaagcaactttttatgtgtgcatggtagaccacagaggtccagactgcaagcccaagctccagactgacagtcagaaccactgactctcagtgataatttagatgaggtctgaggaaagtctgaaccagtagcatcaggaacaaaaaggaaaaggtgcatttgggcaaactttcaaaggcctaagggacagaatttggtaactggtttactctgggagaaaggaagcttgaacaattcagaatgacagctttctaggtgaggtggccaataaaactacatgcctaataattaagctgtgaacatagaagagagaccaggtttgagcactgggttgggggatctacaatatggggttagcgatgtgtcattttatggcctttacacgatacccacgtggatatattctctaaacagaaattctggtccagcagaaaggaatgagacttgaatatgggagttaagccttagcttttaagaaatccttgagggcttaagagagagagcactctgtctaggagagtagagtgagaagatgtgaggacagagggccaacagatgcttcccatttaaggagccagtggtggaggctccagaaagactgggatcccagaagagagtttcagctgaggcaggctggttcgaaactggcagatggctacaaatgaggagattcttttaaataggataagaactctgattcttactattaaatgtcttatctttaaaatattttaaatgtagacattttcaaactgcaaaagtagaagactataatgacccatcatgcaactgctatttggcttccgttattgcaaatactgtatttcttctttcatctccctgcctttctggggaaggaaaggaagatcgagtactttaaagcagtatcagactcatgtcatttcccttacactttagtttgcacaaattcataaggacaattattttttacataacttgaataaatacgatgtcattatctcactaaaattaaaaattaatttcttaatatcgtctaaaaaaactccattatattcaaataatttgaagtttttgagagccctgttggtgttcctttttttttttttttttttttttttgagacaaggtttcactctgtcacccaggctggagtgtggcggcatgatctcagctcactgcaacctcctcctccccaggctcaggtgatcctctcaccccagtctcccaagtagctgggactacaggcatgcacctccatgcctggcaaatttctttttttttttttttttgtagagatggggttttgccatgtggcccaggctggcctggaactactgggctcaagggatccatccacctcagcctcctcaagtgttgggattacaggcatgagctactgtgtctggctggtgttactttttaattgcatagaagttagctgtcactgcaagggccctgtttgggaaatgagcagagtgttgtgaggaagataataaaatgctctctgcaggaggaatgttccttccatatagtgcacagtgagttttgatgggaggctgttttcttttgtgtacacacttatcccctgggaatagcaacagagctctgtgattggactttctgtcttcagatcattttaattaaacatatgcaatgataccatgacaggtttacctcccctgatccacataccatgcaactacttagagcagtagtccttaatcaagacatatggctctatgcagagacatttttgattgttatgaccttagagggaaggggctacttgtatctagtgggaagagaataggggtacacacgacagccctcccgtaataaagacttaccctgtccaaaatgccaataatggcaaggctgagaaaccctgtgttggagaaatagcagagaagaaccaccactcttttctatctattgttacatcatgtgtttgggtaccaggttgcagttaagaatttttctcttttctttggagagaagttaaagtccctggcagtgtttttcctcagatcatctgcatcacctaagctggggttggccagatctttgaacctacaacacttcattccggttttcattttctttgtgttcatggactctagagagcacggaagtaattgggtttcattgggtagcagagtaaggtagagtgcactttctcaagacatgttcattggtctgagcaaagttctgtctcttggaaggagacagtagcttggtggtgctattaggcagatgagggcttgttagatcaagatgtaaactctctttcttcagtctgattttaaaatgaactgtcatttgtagtaattattaaatgagaagcataaattaagtattttactttctttatttgtaggaaatacaactggagcacgcaaagcaagcctttgtgcaacgggacaatgctaggactgggagagtcacagccatcgacttccgagacatcatggtcaccatccgcccccatgtcttgactccttttgtagaagaatgtctagtagctgtaagttgtaacttgccctaatgaagtggtttaactcagtaaataaggaattataaaaacaattcttataagttatgtagtgttttttttctgttgcaaacactaacattttaatgtgatcacatacattactaaactcaaacaaagagtgtgttttggctagttttagtgggtaggttaatttgttgtctgggtaatacggaatatcttcgagaaatacattagctttttaaagataaaaggaaaaacagatttgtgatctcatgttaattttgttttagattttgaagtatatcaagggctgatttttgctaatcttcttagatgctctaaggcaaaaaaaaaaaaaaaatagtgcacatgtatatcatttgttagagtagttagcacaacagaaactccaaaccttagattccctttcaccgtgtatgtgtcgaggccacagagttacatgtgacagcagagccctgcagttgtgtttcatggagcctccctcctccaggtgtcagctgctgtccttccctcatgggccctggggatgtcctgcaacattctgtggtggtggttcttaagacctgctcgtggagcaccagaatcaccactaaaaactattaaaactacagattctgagatctcttctaggcctatcatacaccatctataggcgatgaggtcttagaatctaattttgtaaagcttctgggtgattttggtaataactcagttttaggaccaatagcccgtggtaactctccttttgttaatcccagggagaatactgttttcaccatcatctgggtttcccacagtgcttaccataggcaggaactcagagtagcctttcagtttcctttcttcccccaagtccttagttctagagacatggtattccaacgaggcctcttccattctggcactgtgttaatctaactccttttcttgggcgcccccttctctactccatactaaactttcatgtcagctattttaaatgattactaagtgaagatttatgtggttgttaccttgtaaagaagtgctttcctaataaaaatattttgccttgctagggaaggatagaatttgaaactccaaactgaagtctcattcataatggacattctgtctgtttcccttgtcccctgtgaagaaatatggtttcttaaaaattctgattatcagaatttttactagtcttaaccccccatgaaagtatatggcatctcataattttaccataatatgcttgtttgctagaaatcccaccaatgtaaagtctgtacctaaatgattatttattactggttataagtaacttgacaagtcttgatattaatgttacattgactacttttcatagtatgtttgcattgatacaatacagtttttcatgcataagcacacacatgtgtgcatatgtacttatagtttttgcatgtttaagcctttaagatttgctcattagatgaaataaaccaacttataaaacatttccaattgaaatttgaactctaaattactactagtcctgttataatcctacacatgtatttatttagttttctaggagttgtgtatggagagtacaagttctggtcatgattagttgcagttgcttctaaaaatcatttatagcttttttttaatgcaaaagaaaaatacttatagtcatttcttcttgtacatgcatttttgattactttcaaactagttttagatgtatgtacttctgaatcatctataaatcttttgtatatttttcttctctcttgttttcaatttatttgaggctgctggaggtaccacatcccatcaagttagtttctcctattttaatggatttaattcgctccttaacaacatggaactcattagaaagatctatagcactctggctggcaccaggaaagatgttgaagtgactaagggtgagtgagaatatatctgaattctagcctgcaagtattgtggtgtattattattagggtgaagaaggcaactagtactttattatttttctatcccattgacacatattaactatatgataacgtgtgtttttcatcctttgatcagacaaacaaaagcaaacaaaacaatcttcaccaagttttaaacaaactgggcccagcttggtgactcacacctgaaatcccagcagtttgggaggccgaggtgggtggatcacctgagatcaggagttcgagaccagcctggccaagagggtgaaaccctgtctctactaaaaatacaaacattagtcgggtgtggtggtgggcacctgtaatcccagctacttgggaggctgaggcagaagaatcgcttgaacctgggaggcgaaggttgcagtgagccgagatcacgccactgcactccagcctgggcaacaagagcaaaatgccatctcaaaaataaataaataaataaataaataaactgaagacaccctttgaataaggaaaacatgtaaagtttcttaaatattttcaaatcttgctacagcttgagctaaattggcaacctctaaggaagccttcaggtgtatatgaggaattccataaagttgcattggtgacagtgtaagttggtctgtaggcttgggacaggatattatcagcattgtaatgggattaagaaaaaaaatcagagccggtgcggtggctcatgcctgtaatcccagcactttgggaggccgaggcgggcagatcatgaggtcaggagattgagacgatcctggctaacacggtgaaaccccgtctctactaaaaatgtatatataaaaaaattagcagggcatggtggcacacacctgtagttccagctccttgggaggctgaggcaggggaatcgcttgaacccaagagtcggaggttgtagtgaaccgagattgcaccactgcactccagcctgggcaacagagcaagactctgtctcaaaaaaaaaaaaaaaaaaaatcagaattcccttaggaattccacaccttcattaatataaccacctaaattaatataattaataatcctaatttaaccagttaattagattaatataacttcccctcctgggacctatgcatatgaagtttcatatatgattccttattttctctgattggcaatttgaataacatcagatgaccccaagcttttaaactgtatattcaagaacatattctgcacacgctttccaaatggatgcaagaactgcaaaaattcttaccttatttggattgacttgaattctacaactgatgataataataaagttttgtgatgttcactcattccagtgccttgagttaatgctgaatttagtggctatttcttcttgaatctttcccttttaacttttcttccatacagaggagtttgttctggcagctcagaaatttggtcaggttacacccatggaagttgacatcttgtttcagttagcagatttatatgagccaagggggtaagttggcttttttttttttttttttggaattagcttaataaaaggaggttaggaggagggcagcaatcaggagaaaaagaagccaaactgaaggctatactgaaatatgagaaatgaaaaaagggatgtttttaaattttataatgtaaattgtaataaattggtatatttgttgcttgtgtttgtttttcccctacagacgtatgaccttagcagacattgaacggattgctcctctggaagagggaactctgccctttaacttggctgaggcccagaggcaggtgagcaaagaggagcaaacttgcattctggggtttccttagcaggataccccaaccctgttccacttgcagttgcctttgcggcattggtatctgacttaaccatttttctgttttgcaccaaaactctcgataaattttaaaggctgtaaagagaaattgcttagaaatggtgtgataaacaggtatttggcatttgctcatttcttgctaaggtggagtgatttcctaactgcaccagaagcctaatgctccgaaaacatgaaggaggtcttttctcctttcttgaagtctcatgttgagagatgtagcgaaagaatcccgtgttggtgtcactgtgcctgtcggcagctgcacgttgctaaatgaaagccgtctttgctctgtggagcagcccttcatcagcgcatcgtctaactgccatgccttccgtttttctgaatatcaaaatgagataattttgtttagtctggagttacagtttaaaggctttcagacctattttctctgtgaaaggattcataagttatatggaaacaattttaggaatgctaaattttattttatggttaacagaaaccaatctcttgaagttgtgggagtcagaaacttaagacatggaactttctcctttaactcttacccagctttctgtagatcaggattagagaagaaaagccttcatagcatgtgttagtaaaataaatggtgtttgtaaaataaatccactcacaggcgagtgtcgtttttagaaaaatttctccttttaggcagagccatctctgaatcctgtgagacttcgcagtttctggcatggagctctgggtttgtacagagacgccagtgtgaccacaatgggttgctgcaggctacacttttaggactgtcagaccttgagccagggcccccttcttttagctctttcccacccaaatgcagcggtgagttttgtgtgcagcatgcaagtcaaagtagtgggtgtgtgctcagtaaattctaacgagcacctctggaaaaccagctggccttgcttaaaagaggaagccgatttctctgagtgcaggagaaataactataatcacgtgtagaggtggaagcaacactgctctcccttccctttgatttttaacactgcttaggagatgattatctcttcgtctgtatgccaccagctattgtagaaatttggggattaagagaagcagagaagttttttttagatccctcctactcttcagctggcagcggcttcccacaatttttcctttaagctctttgcagcttttgagagtttatgatgggtgcttgttgatactggccatgaaagggttagaccagattgatgagatttatagcaggaaatgattcgctgccgcttagaggtttagagcaattcacaatggccttacctggaataggctttttactgcatgaaccctagtgggcccgacaaattcaagcaagggaggtcgtccacctgtgggcacagcgctgcctgtccagcactgtgcagcacttgtagcatttatcctggacagaggagtgaaggagcagagttttgtctcatttcaagaacatgctacagttctggctttggaaaagttaaataaaagtctaggatttcatttgtcttttaggagaggaattaatggtggtggtaggtccctcctccccccaccctctataattttcagagtattttcactcattattttgatgccagaacatttctaagtattgcatatttatatccctgtaaataaaatattgcttctcttttggatgcatctgtcaaaatgaaggtactattgatttccatctatatagggctacagttggaaacaactcatagaatttgcaaaagaaatgttttgtatcttaaagaggcatatttctatgtaaagctattttcagttaagtgactttgaaggagattccaaatgatctcattgtattagaattgtgttacattgacagcaactaaaattcagtgggttgatagctggggttgctgattattttcattgttcactgattttaattatcatggattctgaaaaacaaattttattgaatgtatgtattcattcaacaggtatttattaagcactgactatatgtcaccctcatttgacaactctctgtgacataaaattactgttttatttatgcagacagagaagtgcagcactctgaaatgttctggcatcaaaaacactgtgaggataataggtcaaaagaaccagaaaacaatgactgactgacctgaagtatgaatttagaaaagatggacaaaaaaagagaaaaagtaacgatcaactgtaatacagccacctagttttagctactgtaaatgttttgagtatctctgggtggtagggaggcaaaatattagtattaattttatatgcatatatatgtaaacctcttacaagcatttttaataaaaagtgacatcattttgtatatagtcttaaaaattgtttttaaaaaaattaccaggaaataggtcaaacatttaaataggtacaaagaatcatatgacaaatacctatctacttaccatgctctttttagcctatgttttcttttataattccttgtgaacatttaatatcaaatattcttttacagtatcattttgaatgatagggttttgttttaaagttattatttttaaaggctatagtcctccgttattggacatttagaatatttcccaaatttttgttctttttgtttaaagagcaaaaatttgggaaataatcgaaatttccaataagtactacaaatgttttttaagtgctacattcttgtagcttgttacatgcatgattatcttctatcctaacttttttctttttgagacggagtttcactcttcttgcccaggctggagtgcagtggcgcgatcttggctcactgcagcctccgcctcccaggttcaagtgattctcctgcctcagcctcccaagtagctgagattacaggcatgcgccaccacgtccggctaattttttatttttagaagagacggggtttctccatggtggtcaggctggtctcgaactcctgacctcaagtgatccacccacctcggcctcccaaagtgctgggattacaggtgtgagccactgcacccagcctattctaacttcagaggttatgtacattttaagggtttgggtgtatattactaaacatctctctatttatgcttgctttaatggcaaatttcagaaggcttgttatcaacttttgccaggctgggtattgccacttaaaacaaaaacaaaaatacatacaaaccaaaaacctgccaatttgattgatgaaaaatgatgtctcattgatgtttttatttgctttatttactttattttattttatttttttgatacagtctcactctgttgcccaggctggagtgcagtggcgcgatctcggctcactgcaagcttcacctcacgggttcacgccattctcctgcctcagcttcccaagtagctgggactacaggcgcctgccaccacacccagctaatttttttcttttttttgtatttttagtagagacggggtttcaccatgttagccaggatggtctcaatctcctgacctcatgatccacccacctcggcctcctgaagtgctgggattacaggcatgagccaccgtacccgacctatttttatttttgagatagagtcttgctctgttgccgaggctgaagtgcagtggcgtgatctcagctcactgcaacctctgccccctgggctcaagtgattctccctcctcagcctgagtagctgagactacaggcacatgccaccatgctggtctaatttttgtgttatattatagagatgggctttcaccatgttatccaggctggtcttgaactcctgtgctcaggtaatccgcccgcctcagcctcccaaagtgctgggattacaggcgtgagccaccgtgcctggcctcagtgatgtttttaactgtgcattttttttaatgagaatttgaaaataggcttataacatcatttttgtcaaaggatggttttgattatattgaaatttggttttaaacattaatagcactaaaatctttttattaataagaacttatgaaatccattcctacttttttccttgacattttagttgtatcatggatttagaacccaatgagtaatgtttaaagttaatgtatggtcatttttgttttatcttcttttctgtcacctgttttcctgctctctgattcctgtgcatgcaaagcagaaggcctcaggtgattcagctcgaccagttcttctacaagttgcagagtcggcctacaggtttggtctgggttctgttgctggaggttagtcatggatgagagaaaaattttcacttttgttattcctattctcttttctctgattttccatcttgaaatgttaaaggacaaagtcttctctagtctttcccaatgccagttatcagtttctacctgtgaggtagggcaagagtaaagggaactcttttcccatacctgcatgtgatcagggacttacaagtggcattttcctctatctacagatcaggccttccaaagacaggttactaatgaggttgggctgtagcaatgtgccttaatttaaaatatctatgacatccttttattaggggatacttgaatgaaaaccctcaattgtttattaaagatataagaaaggtagtactgttttaaaatctgtatttaaaattcaaaacacatttcttttctcagtcttgtccttgactttaactaccttcttctttcttctgacctatcttactttcttctgagataatgatattgtttaattttagctgttggagccactgctgtgtatcctatcgatcttgtaaaaactcgaatgcagaaccaacgatcaactggctcttttgtgggagaactcatgtataaaaacagctttgactgttttaagaaagtgctacgctatgaaggcttctttggactgtatagaggttagtgccacatgctcaatacctgttaggtgaaataacactcaaaggtttggtttctcatcttagtgcctgacatgaattagcaagactgcgttaaaatggaaatacagcagattttcaattatccatgctaatgggagtaggctggaggcatctagggcttggctaatcaaaacagcccataatctgaaaattatttatagtgctctgttgtatgttttatttcttaaaataataaattatttttataagcatcttccgtgaatttttgaaaggctcacattgtttgcatccttgaagtactctattctccagctaacagggaaaggtattctgccaccaggacaaagcctactcaggattcatgattttcctggaatacaccacaaaaaagataacgaagggttcagtagagctctcttttgctgcttcatcctgaattaaagttgccccttttcttcatctgactctcaacccaatggagttgattcacacacccctctagccaaggtttccccccactgagacagcctgaaacaggtaatccttctttctccaccttttcctttaaccatctaaggttcattaagcaatggaagtagtagcagagagtatgtcatcactgatggaaaggatcccacagaccctgactgcttttccactggcattggccgaaggagacttctcaactgttctttcggggattgccttctacgagaaggaaacagtgtttctgcatcagttaaaatacagtatcacaaggcagttcaaactcagctgctttataatttggcagcggcaaagctggcagagttttccctcctctcccctactaatgctctctctagatgaagaaaacagtatttagtactctgctgaggtggacggtgaaactggcagacatggaaacctgtgcctctgggcctcttctgccatctgctgactctagtcttcaaattaattaccccagttaaaaaaaacaaaaaggataaacctttcttgaaacctctcaccttagaagccagaaagtctcaaactccagagaagttccattttgcaggtcctattgtgtaggtaggtagcccccatcaaaggccttttgatctttgctctgccctcttttccttatcccctgcctcttcttacaatttggaaggtctttgacctcaggtgattgatgatgaccctttcagggtcactgccttccatttgaaatgcttttcttccctgatggcaacaactttgcaaatgaaatggcttccaagtagtacaaggttaatgtcacagttcctattctgcagtgagtcaggcaaaattggccgccttacctgtccatatgggtggtttttggaagggaaatctcgagtctcaagtctgggcagacatctgagcattgcttcataaactactttttgggcttttcttggtattagattaaatgtcaaggatgcctttagaattgtaagaatgcttcccaacactgctcagtgtctttaatttgcttaagttgattttttattttgagtccttttttctcgatctttgaccatacctggcaggtctgatttttggttacgtctatatttcccttttgcaacctgtactgttggcaactagaagtgtgcctgagtactgagtgctgagctaatgtgggctatgcaaagaggcttccactcttgccgtttcagttcttttatctgtaagatgagagtgactgcttttaacttctcagaggagtagtaagtcaatatattaggtacagacagaggctcactgtaaacacccaagtggcagctcttcacccttttcctggtttagaaatggccatttatctttgggtgccccaaccttaagggcaagagacagagctgtctgtcaggatgatgagtagagtgtgaatataagattagttctaggagtcacctgtgttcatttcttcctgatatcttttctggtaaaccattttaaaacaaaaaatttactgtaaaatttttgtttagtcccattctgtaatttggatcatcttgagagcaaaatgatgactgacagttcaggttaaaataataatgatacataactttgccatgaaaatgacttgttcctattcttgattggtcagggatcagttctctttagtttcttgtacatcatcaataattaataattgtatataactgcatatttgtaagtgcttattgggtaagagagatcagatgaaaatgtaggtaactcatggttattgttgttaatttaaaaaattacaatataagtaaaaaagacctgacatatttctgagactcagtattatcacctttatgtacaaagtcacattatgaaatacctatatgtgattctttgtacatttctcataaaatgtaactttattttaaaattatattattccagaggaaaactgttacgtttaaattaggaaaatatagtattgctgctattaatgctttcacctagcaatatttgagaaggtatcagagtacatctttaattcatacatgtttttaaatattgagcatagtttttagtattacagaattttgctcaacatgtaatttttctctatcaaggcctatgtaattgctcatatttcctgaatgagataatttgggaatgttgcagttgtaagatctttctcctactttaaaattacctttgtgtatactttgaaaaaagttggcatctggcctcaaagaaggtgtttttgtagcatgcgatcttattatgaggttaataaatatctctttttcttataacaagaatatcagaagctgtttttgcatttaaaagcctttccctgtggcattagaatgaaggttattttaaaagaactcttgtagtgctccaccacaagttttgttctttgcctcccccgcagctggctgcatcagaatagttgtggaagttgcttggtagtcatgagagagtgcctagcagtgctcttcaatagaaatatacctcagagagtcatgagaggtgttgtgagttggttaattcctgctctccatgtattggtataactccgttttctttatttccaggagcctctctcctatttttgtgtaagttttagttgctggaaaagagctccttaaaaatcccatgagtctggctctgcaaaccttctctacagtgcaaactacttttttcctaacaagaaaatggcaaattttcctagtttgttgttgttgttgttgttgttatttctgaaaatccaacccccaggccaagcctgtctgtattaagggaaatcacacctgagataatccaggtcttcctgaagtcacttttaaaattctttctctgtttcctccccagtcttcagagtgatttaatgtgctcaggtatttgaaatccttaatgaattacctgacaacttgtttggtttgaatgactggcataaccaaatgaatcagtcattggcctgctatagatctggcgtattaaagaacaacaattgattgggtaatcatccataattaaatgctcttaatgttccaggaataaataatttctgcttttaaactttgttgcagtcttctctctcagatctttcaggtgatgagatgagcagccttagacactggaaaatgttttgggagaatcttggggaaaaagatgtattaagagaaatatggccgggtacggtggcttatgcctgtaatcccagcactttgggagaccgaggcgggtggatcacctgaggtcaggagttcaagaccagcctggccaacatggccaaactctgtctctactaaaaatacaaaaattggctgggcataatggcgggcctgtaatcgcagctacaggctgaggcaggagaatcgcttgaacccaggaggatgcagtgatctgagattgtgccgctgcattcctgcctgggagacaagagtgaaactctgtctcaatttagaaaaaaaaagagatagaaatcagggtctatcagaaatacttcttagacgaaaatttttgtttctattgatgggagaagccctaaagaaaatctcccagaaagagtaattagatcattttatgaattaaacttaatttaagcagtgcttaacctttgaggaaattggcaaaaaaaaaaccacattttttaatcagcccattgatccaagcttgcagagttgtaaatatttctatttcaagttgtctgtgtagtgcaaagcagtcatcttccatcctggaatgttctcaaggtgacatctagaggatgttgtggtgatatctcagggagttattgatacttttatattgcagagggaagttttggcaggcagctagtttaagccaggtcccttatcattgatggtactataaaagggagtatccagattctttagaatcacagtgagattcttcattcttgcataattcatggggataaaataaactttaaaattctggcaccaaaataaaatgattgaaatttccatgactgttttgcattacttaagaacacatgcatcttgaaacaaaccatagttaatctgtgaactgcactcatgtccatccatgtccaccaaaacttttaatgattgcaaaatggataggtttgagtctttattttcttggccaatttctgcacgttttcatttagagcattaagctataaaaatatcagaagacatgtatttggttataggaagccacataagaatgagcagaagatttcaacagatcatttgttgggttagccaatctccagaaatctacagtgagctaactttagtgagcacagggcattgtaatctgagactgaggcgacacacactggatctaaggtgggtgagagaattgttagagacttgagagtgctacagtaacaactgatgaccttagaaaattggaaaaatatgacaaaaagatagacgtgtaggtatcctagagaagaggttaatgaatgaattagttccacacctcaaaaatgataatttataaccagctactgttgctgagactaaaacaagggagatagattaaacctcagtaggagggaaatagtttagatagaagaaaagataaccaggatcctgaacgttctcatgtactatggtgaaaaactgcaggagtatctgatcgttttccccaattctctttacttctagaaagccccagaatagaggagttgaggaactgatttttttccagaccataatcataatcacttattttatgttttaacactttgtctcccaaaggcatcctgagccatagctaagataacagacagtgcttgaaattttgagtgtaaataatttaacctagataaactggcatttaaatcttcatttctgcatttgtccctggctatttccccagctccactgtacagccaccttggggtagcagcccaaagagcctgtcagaactgggttgtaatgaaggctttgaaaggcgatagtgtagttgggaaggtggaaatgcctcatgcctaggggcaatctgagtcaaaagcagacagacaaatgggaggaggaggagggaggaaagaatgcttgagcaagtgaagagagaagggcatggcaacaggagcaggaataaaaagctctaaggcagggcacacaaagtgctgatagctgcagaatgaaggttaatctgatgttgaaagcaaaggggtttctcggggaagatagggacaagtgttctggtttcaatagtgaggtcagaagggtaagaatttgacatcggaggggttgctaccaggtggaaactagataacacaacagtgtgctggctgtggcttcagctacaggaataggggtgtcttctggattaatttttccttccaaagtttactgctcgtctctgccctgaataccttctgccctctattagatgctctcagctgtctttctctggtttgggctggcccctgtctcagttctatgctgagatagaactggtaactactgccttagttaccaagtttcttccttggtagtagcccctccacctctgtggtcctgctagcgttgcccagcgtggtcctttggcaccctggccactctgggttacagtagccgctcagcgtggcttcaacccactcctgaccctgcgccttcttcccagtatattcctgctctcactggttcaccaggttataacctacagcttggctctgacattcagtgccttcgaggttttaaggagtctaatattcaccatctgtagagacgggggaagcatgatgtggatgcctgctacatgggcaccatccctttgttgtgtacaagggtcaggcagggcagggtgctgacccagcctgagctgaggcctagagaaaagtttcagaacagtctagttgggaagaaatgcctttccagggcagaggaggaacttggagcagtaagtctgttagagaaaactggtaccgcagagaattaaggagcacagagccctgatttgagagtactggcaggcctgaattcaactttgagtgctactacatagtcgctcagaagttagtgacttgaaacaagctgcttagcctgtctggattccagtttccatgaaggaggaggaggaagaataagtgatagtgatgatgaagatcaacaacaacaacaaaaatccatttctgtagtctttactgtctgtacttggtactggtctgaggattttgtgagtgttaactcatttcatcttcacgactaccccgtgaaaatggcatcatgattattcccattctacagatgtggaaactaagatacaaagagattaggtaacttgtccacaattacacagctaacaaatagcaaagtcagaattgaagctcagcagcctggctccagacctcgtgttcctaatcacttggctcttttgtcacctggtagaaattacattgtgaaaagttgcttgtcagcagaggttaaggatcatttaagtttttaactataatattttatttcagcttaataacatagttgaaatgtgttgttttgtctgtgccactactttaccttgcccaaagtatacagggcccctggacacttccagaccacatgtgctctcactgcttggggacagctgttctaagataggcataatgtcatgggcacagcatgatactccttagctaatggtggactgtgaacatgattcaggctgaattgcctcttgcaaacaaaagaaatcaaggctatgtattgaaaagataggtagaaagaagcattatgtcttttggaatacataacatatgaggtaaatagtgtctggttctttgtacacttattcatataattatcaaaataaaccaatagatagtaagtagcacccttgttttgccaagagggaacctagaattcaaagaattactacccaagatcactcagtgtgaaagatgcacagacctagcattctagcccaggtctgtccacctccaaagcccatgccctagattgttcattttgctgccagcccgttggaaatagcctaaaattagtttaaattaggccagcaatattgagtttctttcataatcccttccaaccctgaaattccagttatatttctaacaggttcttaagaatagcatgctagccctctagttgaacacagtgggcccaggaacctcttttggggatgtcctgtgaagcttgagttggagacccctgatctgggcttggtccccacaccttcagctccttggtttgcgcaagggactgaattcagaggggatagtgtgatttatatctccaacccatgaaatgtgaagacaaaatactacattaatactgtaccctgtaaatcttttctcgcattagcagccttctggtagagtcgagttgccaaggaagcattgccatatgtgctgatggagctgaactaaaaggagaagattggaaaactaaccacactaataaatttcttttgaggcagttggaaaatggactgctgttttgacaagttagaaacaacacacacatccattctctgtttcaaatggttaaagtgaatttccaggacccaacagaaacatcttatattagaaacctgatttttctgctgaattacccagatgtcagatatatatgcactttagacttaattgtggttgtgatgaagtgcctcacctagactctctgctttaggcattactgggctgtgctacctctcctccctctgaggtcaaggtacaaggagggagtttggaattcccacctctttgacttttcattgtttcacagatcatgaccttcttacaaagaccatttacccaagactcatgttttcaaggcccacatctgtagtgggcctcagattataatccagtcaccttcattttcctgtttaaccagacaaggtagtcactacaagaatggttcttatcaacaacttccgtgagtggcagcatctggcctaggtcttaggaatggatttgtgctttggttttattctaagttgaagttaatcatttaatataaggaagctcggggcctctaatatattaccttaaactcctagtttctctagcttcctcaggtctctgctcttgcaaactatccttcacctgcctctagaactttttactttttgaactttactttttaccctaaaagccaccccatgcatctacagaatttggtgcatgctccttagtgggcctgggagagaagttgtgcagcgtaccaggtaagagcacaggctggagtcggacagcctgggtggaaccccgttcccccatcaaacagctgagccaccatgggcagctcccttaaagtcggcctcagtttcttcttcagttgctgtggataaaacaaaagccactgtttaagtaaggtattgtgtggattaaatgtgttcattcacataaaacacacagtactgtagtatgtggatatagcgagtgctccccaaatattggctgttgtcattatcactactattaataatattgttatttattatctggtcttctgtgatccaagcacagcctccagtgccctgactccatgccatagccttaagatgttggtgcctttgcacaccaactgtttcctctgcctgggtcaccttgccctccattctgctcattgtctcatctttccggggaacctctgctcacccttgaagtcccagggcaaatatctcctcttctttgatgttttttcccctcctgcaggcagaagaactggttctctccactgggttctcatagtcctgtgatgcccctggggtctggtatgcagcacctgctgttgttaggtggtttgtcccccatctggcaggtggagacaactagcgttccctttccctctaaactctgagcttcttagcggggaggcaccagtctcactgtgttcatcccagttcctctcagtaccaggcagacagagaaggcatttggtaaatgtttgctgaacaaatagctacttgttgccttctttgtagtcttaaatacggggttttcccttctgttttttgccgttcacaatgcattactaaatttatggtgagaaggataaatttcagtagtttgaaaggctggctgaagtgattgtatctaacacagtagtcattaggctctgtggcctgtttttttattagtcatttaaaaagactgtcacaggatagttatggagacaagagttcatcatttaaatcacagtgctttcaacccatccacaattttggtctacaatttaatgatgagaaaaatacatctagcaagtaaatgtttaactaagcattttgttacttgatgtgaatacagggagaaagatgaaaatttcaattgtgaagaggtagtttaaacaggcgtatgcccacatattactagtagaaattaatgttgtacttttattaggtaataaccaagccttctcctattatagatatcttactgaaagatcagtgagtgagtgtcatgagtatagtttaggagagaatgcttgctttggataagaatgcttgctttgcccaaatggttgcatattcccgttttttctcatatgctgcctcagctcatttaaattctaaagagcacagccccactcaagctagcaagagcttaggggggcttttgataaacattcacacaagagagaaagaaggtagaaatctcagatccaagagcaggagctgcactggaggctggcctcagtgggacccaaaggtgatggggacaggcgctcccacctgtgtgcctttcatgggctatgtgcattctctttttaatctctattccttttgctccacattctcatctgtccaccaatgcacttcctctgcttattcatggtttctgcttccttgtgatattagcacacacgtgacttccaattggctgctttccttgctccacccatgacatcttttcatcttgttgcttctgtgctaacttgtcccctcttctctaaagactgtcagtcatcctcctggagaaggcatcctaattggccagctctatttttggtagcaggctcaggttgctgaactcttgatttgcgtgtcttttaggtgttttacattgtccagtcagctgtggccctggggatgaagcaggcttagatgttatagttgcttagtgaagggctgcaaactcaggacaggtgagatggctcacacctgcaatcccaacattttggaaagcctaggcaggaggattgcttgaggccaggaatctgagactggtctgggcaacatagtgagggcttatctctttgttaaaaataaaaaatgagaaaaaacaaaaagaagcgttgcaaactcaaatgctgataggatctaggcaggttatataagtgaacaaatgcagctgggtgtgtgagatgcaggtacacatttgcacattaacacagagttgagttgtatataaagatacagattttttgagtaagatggctaaagcttgtatcccagtctcaccacttaacagctaggtaacttggaagaaattactttatctctctatgccttggtttcctctctgtagagtggttatgaagactaaatgagttaatacattttgtaaaatggtacctggcacgtaataaacgtgatgcacttttaaagaaaattttcattaacatcaccatccttatccttgtttaattccacaatgaaggacttcctcccatttttccatgaaaacatgaagctgtattcatctttttagttttccccctttataaggctatgagcaaagaaaaaattttatcaattgtgacgatatcagtaaagcaataaaaatagaaactggaggccgggcgctgtggctcacgcctgtaatcccgacactttggaaggccaaggcaggcggatcatgaggtcaggagatggagaccatgctggctaacatggtgaaaccccatctctactaaaaatacaaaaaattagccgggcgtggtggcaggcgcctatagtcccagctactcgggaggctgaggcaggagaatggcatgaacccaagaggcggagctggcagtgagccgagatcgcgccactgcactgtagcctgggcgacagagtgagactccgtcaaaaaaaaaaatacaaactggcgcttgtcctcattgaggtacgggcctcaaagcagggtgggcaccaccttgcatggtttctgtctgaaggatggagcctcatgcaatagagcagatggctgggatgtcagaaagaggcccggggtcagtcagagttcggtcagaactgagcccatgaactgactgttaggtcagtgtgttcattgatctttttttttttttgaggcagagtctcgctccattgccgggctggagtgcagtggtgcaatctcggctcactgcaacctccacctcctgggttcaagcaattctcctgtcttggcctcccaactagctgggactacaggtgcctgccaccacacccagctaatttttgtatttttagtagagacagggtttcaccttgttggtcaggctggtctcgaactcctgacctcagatgatccaccctcctcagcctcccaaagtgttgggattacaggcataagccaccgtgcctggcctcattgatctttcttacaaggaggtcagattatgtttgaaactttttgttactcaataaaacacacttataggttggatacatatggcattcaagctagtgacctctcaggctgctcctttaggaagagagtgtgggcagggctggtccctcagaagaggctgtgagtggactttcttacatagataaattagaaaattgtacttccaatgaagaatattaccatgaacctctctcagtatgacacagggtgcaacatgctcctaccttcagggttagcttggtgtgtgtttccaagaaaaaacaactgtgatttaatttttttttctttaagaagaacaaatgaaaatgatgacattttttagttcagatacgtagctccactaaatgttctaactgccttccccaaaattggtccttgttttagaaaatcaagtggtccactgatttagaaggcagaagggaaggagcagactttgggggaataatgagatttcctatatcactaatactgttgatttacccaatgtgcaaacgatccagaatgtgagatggaatgtacttgggactgatgcggctgttagaagttagtacttaaacattccatttcaaatattctcattaagggtaatagcagaaaattgcagcagagattaagcagtttttaagtggtaatcccctctgtagaactgttgatttgtttagttaatgctaatttatttaatatacttctactttttgttgatttttaggtctgttgccacagttattgggagttgccccagagaaggccataaaacttacagtaagtcttttgagttggtgcttcttattaagggattttgtacatactcaagaatctagcaggtattcttataggaaacagcaggtttgttttctcagaggtgctagctaatttgaaagcaggggaactcaccacacacattttttcattattctccatttagcagtggacatccaaaaatgtgataataaacttgaggacttttggtggttgctgccatcattgttgtcatcacagcagtagcagctaaattcccttcagtatctaccatattaggcacatgacgtatattacgttttactggtttaatctcaagcaaagcatgatccacagtttacggataaggaaactgaggcctatcgggcttaagtagcatacctgtgttcacacaaatcatgagtgggagaactagaatttaaaatcacacttgtctgactccagagcatgtctttctattacacctgctgtttttataggattcatggttagggtgtgttctataaagccaaatgtgcagggatctgggttctagttgaagttgatcctttatcagattatttgcccagtgcttggctcacatttgacagatggttgatattcagtttaagcgtttgtggaatatacaaatatttgcatcactaaggccacaaagccccagaaagtaaaactctagctttaggttgggctgcgtagctttggagcctgaaattcttcttttaccattttgttatgtgaccttgagatagctaatcttctctggcctatgtctgccaaaaagatatgactgtttcttaaaatttcttgtactacataccattttgagaatattatattaattaattaatgtaatttatgttctttgagaatccttgaggaatttttagatattgaatttcttctaagctgaaaaagtctgctcagccaaatttatctccatgatgagtactgttttagattaattcttgttagaagacttgaaagtgatttttaatcaagccttataaaacagttttaagttgtaagatgtatgtttttattttgtcactattgtcagtgtgtctcccttcttaagctattctaattgcagaacatatttttggctttcatttatcttttaacttttctcctgaaacatcagtgatgcatatatatttttcattttttaaaactattatactattaagagtacttctcaaactattttaagatctgttaaattgtgcaatttatgattactccaatagactgatagaaaaaaatagcatatattgacagatgcatatttataagtgtttaatgactttctttatatttttcatcagcttctataaatatttttcttcaaggtgaacgattttgtgagggataaatttatgcacaaagatggttcggtcccacttgcagcagaaattcttgctggaggctgcgtaagtaccttttgaagctctcttcattgaaaagacttgtttcacatatatatcactaccatggtcaacaggtgtggactaaggcttctgtttaaccacagatcctgcacaagggcagagtctactagggcacctcggcttttcctagacaggcgaaccattccagaggtggaagggtaaatgtttctgaccttactgcctgttaagtcatgcctgttaaattcgtcattgcttatggtttgttctgcaatggaagtcatttgtggcagaagtgtttggcctttgaaaaatctttgctaaccttttctaaagttaatttttagtacattctttcctcatggcaccctctgctgggtcaggcactaaaacttgtagtctgaagtcagcaaccgtagctctctgcttggctttgccttgcaagtggcagaactgttcaagcttccactgcttttgggagaacaatgctgggaaataactggctgagtgtgcgctgcattgtcaaaaatgcttggaatgattgtttccttatatggatgaacaacttgcatcttgttctgaagctcagcaaaacattgtgtctcgttttatctcgtactggtttgttcatgcgaatgtaaatactttaagtaaattaaactcttatacaaagactagtgttatttaaagataagattggttaaataacaggctttgatcactcaggcgatacaatattggttttttttatccgaacctatttcttataaaaaagatgaagtcacttttttaaattggcttactctgggcaggaagtagtattcctaaagtaatttttttcttgaagatccttgaatgtagacgttgggcaatgtttgtgtggaaagggcttattgtcctatctaatggtgaatgatggtttcttaaatgtagcaggacctaagaagtcctagctcctggtattctttagagatggatggaatttggctactgcctgactctctgtttgatcactgacctgttggagatgggcaggcaggatccccttgttctgtaactttaggagcgttcaggatggaaaaaaaggagcctttaatgtcctaaatataaagggcacacaataataatcaaagagaattttagaagttgctcttccccataactactctccatttaaaacaactctgtagtttccatttgagtaagtaggttttctaatttttgagtaggtatatccataggctgtgcctagcctagtccttcaggttgttgcagggcccaggatatagcagggttttttggtaggtcaggtggggttgttgtttttttaagttacattttaaactttctgaaaagatatgattatagatttctgtaagaattaaaatgtaaaattaattatgtgatactactcaagatgttggcaatcatcatggcatggtgcccagaggtttattttctttttaatgaaagcattttgcctgcacatacctctgggtgccaaggagattggttgtggcacgtattttctaggtgccatctgtaggtggtcttgtttttgcatatgcggccgcccatttcaaacacaaagcacattggcatcagaagtggtgcctagttatgtaaagagatgtagcccttttcaaacctgatctaaacacaggcttaaaattggagccacttaggctttacagctacttaaaatatctgtgaaatgaggtttgccatccttcatctcaaagaggtagacagtggtccttagcttttcaagtcttctcccttgcctttttcccccccaatcattactttaagaagtaagagtttattttcagttaagcaatcctgtaggtagcagacaacccaggtccctttagatctctgagtagatgaatggatggttccattttctgtgtgtgtgtttgtgtgtgtgcacacgtgctttttttttttttttttttttttttttttttcagacagagtttcgctctgtcaccaggctggagtgcagtggcgggatcttggctcactgcagcctccacctcccgggttcaagcgattctcctgcctcagcctcccgagtagctgggactacaggcacacaccaccatgtccagctaacttttttgcatttttagtagagactaggtttcaccatgttggccaggatggtctcaatctcctgacctcgtgatccgcctgccttggcctcccaaaatgctgggattacaggcatggggccaccccgcccagccatgcattttttaagtaatagcagcatctttctttgcaggctttggcaaagtcttctctataattggagtcagtcacacaccttagagggttgttgtgagttccacagcctcatctgtcctattgggaatacaaagggttttgtaaggttgtgtcacatgagcggttcctcatcttagttcatccaagcattgctaggtgttgacttttaagtccctggggagctcaccttgcttcatgattactgagaattagtacacatggctgacttttgcacttgtaaccaaagctgctcatttctttgaacaaggcttattctgttttatgatctgttttctgcaaaaatgaggaaagtatgtagggagatctttgtctcataacttcataatgtttagctaaacagcctgttttattgtatatatttttttagaatgaaagtgttagtaaatttggaggggaaaaaatgattgtcactaaaaaggaataaagtttatcccatttcttatttattatttttgatataataaagcctgtaactgaagagatgaaaaaataatcttctgtttcactgacatatgtaaaagggctaactttcacgtctaactttatttttaaactcattttttgcatttgagattagttttagtttagagcactgttaaaaattgacttcagttttctgagcatttttatagattcacactttaacagtagtgatatattcagcatgttttaagacaaaactcgatgctgagactggggtttacaaactctaaatctgaaagaatcctttgtggtttgtgttttctccctaacttgggtttctgcattctaaattagggttgtagttgtgggagttctgatggagacttggaccttcagtcttccctgcatgaggtatatatatatatgtataccttctgtttttttccatcttttcccttcttggatcaaaaacttggcacctttagagggatgtgattgaaaatctgtgttagtgaccgtgtgtgtcagaagacagaggttctgttaccactagccacttccagttaggttcccaatgattctgaaaattgatgtattacctctgaatatattgtttttattgcttttttgctgttactttaagaaaaaaataaaaaataatgtatgtaatgcaatatgatctgtaggctgcagtgcttcattcaacaaagtaagtgtatgacttttatatatctagtgtaatatgcatctaggttgaaatcttgaggagcctgggatctttagcttttgatcctttgatctttaaaaaaaagtcaccagataagaaatacaagtggtgcaatgactagtttcaaggaagaaatataaatatgatgattaatttatttggcctgaaaataaatctaatattactaagaaagaaagtcatgaaagtatgaacatctgtcttataaagccatatttagtaaaaactgtttatataacaagagaaagtaatagtattgtgtagtaatttttggaaagacaaattaacatgttttttaaactatggtcctttgataatgggtccagggtattttttcattgtgatgcacacatgtgtgtgcgtgagtgtgcatgttgtaaatataattggtgtttatagaagtttatattcattttgactgcattttgagttggaaaaacagtttatatgcttgtgtcactggttctaaaagggactggtgagactaacactgttgggaaaacatggaatgaagagtaatcttaattacactcccctataaataagtaggaccctaatgcagtttcctgcctgattcctaccataatggtgattcccatatgcatgatgtgtttatgccagtttgtccagccacgtatcaaatactgtttttaaggcaaggttttattactcatctcatacattacattcagttgcagttaatttatattttgaaaaattttgaaaaacacaacaatacagacacaggtgtgcctaccacttagattggtgacaaacttgacagtgcagttggaggcccttaatgtacctgtccaaattgcttttcattcccttacctctgtctcccaagagaaaactctgtcctgacagtggtgtttttcattctaagcatgtctctctactttttattacctgtgaatatcctaagcagtataaatgtttgtttttgaatgcctcatcctaacccagtgctctaggaacacctcatatgattcccagattgatgcctttgcattttttcccattagtgcaactcatgtgctttgcttatcagaaaataatagtaaatgggagtattacattcaaagtgttggaatgcggcagatactgcgtatgtctgttacagatgtgtgggtttctagatggacttatggttggaacagtgtattcatttaaccaagtttttggttacttggggtttctccctagacaacagtcatttcttcagtcttatgatttaaacttatacatgatacttagtttaaaaatgttaaccctccccactgccagcatacgctccctatctacctatcagcctgccttcccatcatccctcccttcttcttctgctgccatggttcttaccaccttcaaacattctgtataacttacttatttttcatgatttttgtttattttctgtctccttcatggtagagtacaagttctgcaaaagcagggatcttcttattcattgatgtatcctgaggactgcaggcattgcatggtaacctgtagactctttgtaaatattggttaaatgaaagaattttaaagctaaaatcactcaaaagtgatcttgtcaatcttcacagccaatcaacgacaaatctgataatggactcatttatatcttttctttaatgttagtcaaaccccttcccatcattaacaataaaacttatcacctgtctctccaagccatacttaatgataattcccaaatcaccaagaatagaaagcatatagatggagatcattttacaaagtgaaagtgttccttttaaaaccttgccattctaatttttgagaattgccaacagggatgctgctgcttcttttgtgtgtgtgtgtgtgtgtgtgtgtgtgtgtgtgtaaagttaatccttttgaaaatcatagccatttgtagtaaaaataatcacatctaacaagaggcagtccagtttcctgtaaagaacatgggcttttagtcggtttggggtcccaaggccttcacctgccagatgtgaatcaaggattagacaacttagttgacttctctgagttgcagctttcttgtctataaaatttagatagcaactttctctttcagttatctattgctgtgtaacaaacccctccaaaacttagtggtttaaaacaataatctgttctttttcattaatgctgcctcctttccgtggtttctgtctctttcccatggtttcagctggagtggtgaggcagctagaaggtccaaaatgtcctcacacaaatggcaatcagcttggagctcagctggagccatggctgggggaacaggttctccacatggcatatctgcgtgagcttcctcacactatagtgtcagacttaagaaggtgagttctgagagcagaataagaagctgagaaaaatctcaggcccagtttttgaggttatgcaacattaatttagccacagtgtgtttgttaaaacaggttataggccagccggattcagtgccagggaaaataatctacctctgaatgggagatgtggcattgatgttgcagccatctttaatgcaccacagttaccttgcctgattgtgggaaaaattaaatgagataatatgtatgaaagaattaaatcatgacttaagtactagtcttcctcctcttctggtgtctactttttaacttctaatatatatatatatggagagagagagaggatgttgtgaaaatgaatgttttagtttggctttttgggtgaaggggaatggaataggtgtattggagtttggatatggctgttgaggacctcagctacctcaggtgctcctgaaatctctggtcttctttgtgaacctgcttatttgccatttctctactgattgatttcctctgctgggtaacatagcatctttattctaaaaatgactttaatttcatcctgtgtccacagtgcatgccaatcccagttccaaggctttcctcctaacaggaatgatctcagtgtttctccatcattgaggaggagaagtgttctgattatctattgctgcataacaaataatctgaaaatttagtggcttcaaatagatacttattattattctctcttgtggttctatggattgacggggctcagcctgggagggttgtacttgggatccttatatggttatgggctagtggcagctggggccagactcatctgaagggtcaaccgggatagatatccaaggtggctcactcttgtaactgaacagctggggctgtgctccagagcacctgcttgacttctctgtgtagcttggtcttttcaaacattgacaatttgattctgagagggagcctcccaagagcaggcatcttaagagtcctgggcagaaacaagacttcttatgacctgaccttgaaggtcactgccagtgcattctgatggtcagacaagccagttaggctggcccagactcaacaggagagaaattagaccctacatcgtaataggaataatagcaaaggatgttttaactgccactggaggattcagtaagctgtgttgtgggctgggaacatcttcattgcccttcaccttgtgaaggtttcatagcccatctcatgccttctctgagggtctgttgctgatcctagaacccattcattctctagattgcttctggtagcagggggcagaaactcaccaaagttggagttaatcaaatgaaggtttactttaagggtacccattaaatgaaactgaaggctcttgagaattgaggcagcattaggaactggctactctctccattttctctacttggcctttgtctctctcacagtgactttgcatccctctgcacatcttttgactattctaatccataacttcttctcttcctgaagaattggtgttgactttctcaagaattcccttcatgttcttgccagccacctagcctttctctacagtaggagacagcctcttttcatcccttgccccagccccagctaattagcttaagttgttcagttttgttttgttttccatttaattattgagagaggaaatctgattggcaaacctcatctttgtgcgccaggccatacatatggcagccttgagtcatggcgccacccagatattaatgactttgcttaacatttccatttgtttcaactacctgtaagtgtcttcaaacctttcttgtactgttttgtttttagctctgaattctgtaagtttgccctgaatagtattgtgtatactttggtcataaaatatactcaaagtcaccattccttatgattgaacttgaaatcccttaagatttcatactcactcatatcaaaccaggaagaaaatttcctcatataatgaatacatatactctgacaatcagagctgatgagacagattgcctgaagtggatttaagtcttacttcgcgatctttttcttcccaggatttcctgtggatacgtagcctcatagtgtggttttcttaaggtagaatttttatttcactatgcaagtctctgcacatatcttacttataaatataagatgatgtgaggcttaatcattaggttgagtttttatgaagtcactcttgtgtgacatgtgaattaatcaagatacattatgcattatagtgatgctatagcaataatgttaatttttttaatgcttgtatctttacagtcttttgtagttcagtgaaaatctagtgattatattgttttcaaatgttattattgttattgtttggaatattccctgggagaactttttgcctactccgccaaaatgtaagaccatattaaagattttcttgatttgtacttgcactttatctctgccttccatctcctcttgacttggagggttggagactgtgtctggtattatatgacctgctgtctttgtcaaccatggtcactgctttgccacttgaggagatcttccttcataactttgtgctgacaactaattgcatctcacagaccttgagtaaatggctgaactgagacatctataaatatggatgacagggcctgtgttgcactgttacagctgtgtgtctagcattgtgtctgacatatggaagaaacttaaaaaaaaatctgttgaatgaataaatgcttgactacaaggtgtgggtcatagatttggaaaggaagggtagtgactctgtataccatgttactattcatttagagactgatggccagcaaagaggaattaactccaaaaattagtgggagagtaggggtgcaggaattgagggaatagctgtaaccatggctaggtgtctgcatatccaggatatttcacaagaaagtattccatgatcacccagtaatagaaccaacctttataaggctcctatttattttatttgacttcatttctaagaatgacaaataaataatccccaaatatattcagaatcttaagaacaggatgaagataaacaacttggagcatttggtatagcttatttattatggcttgtattttaagtagaaaagactttattgaatgactaacatgaaattatgtcagagtcatgaaggaatcatagaaaagaggagctttaaaaaaggaggagccaattaatagccaaaaaaaaaaaaaaaaatgctaacctcatggcactatctaaattggcagatttctgaaaagccaagaggcagctccatcggttttctcaaaaagtcctccaggcaatgggactaaggcattggtcttgaatagagttccactgcttgcctactccaatgagaggctctttctccagatgatttcaacttggactgagggcaaaattaaaagaaatatctgatggtactaagggctcatgggtgctatagattgaatgtttattttccccacaattgctatgtttaaacctaactcccagtgtggtggtattagaagagtgggacctttgggggtgattaggtcatgagggtggagcctacagtttgagattagtgcccttataaaagggatcccagggaggtccccactccttcctccatgtgaggacacagtgagaagacagcatctgtgagccaggaagcagtgctcaccagattccaactgtgccggcactgtgatctcagatttcgagcctccagaactctgagaaatgaatttatgttgtttataagccacgtagtctatgatactttgttacagaagcccgaacagactaagacagttaaggatagcctccctggctaagggctgccttcagtggctcagaaatgtcatcttattagaggaaagtccaactttcatgctagacactgggccagccagatacttcctttctgtttttctccctttaccttctctgggaaagtctcagagttgtttgactcaacacagttcaaatattgggccatctttctggatttctagtaaatagggaggagtttgttacgataggaaaatctgaagaaagactgggccatagctttcatacagttaaggtactttagacattgaaggtctgtaaatcattaaactattctggtagtagtagtcaaaatacacatgtataacaggcagaccccaaatgttaacatatttgacaggcctgtaagttaattgctttttaatgtcagtcaaatggattccactttggtttcttggccaggcttctatgggcccattaaaaccccatgaagctgaaaacatgaaacttaatatttgtaaaacatgtaaacagaatagcctttttctgccttaccgtgtggttaagaaattaggactaggatatttcagtttggtatctttctcagaatccaattagagtaagaatttattttattatcttttcaatattgttaataatctagtaacacatttttcacttaagagttttattttcataccaaatcaaaagaaaaaaaaattctatattgctttatgtttagagatgtgcatttggtcagacagtctaacttagtgtattcgtttggtcaggctgccataacaaaatgcctcataccacagagcgggaggcttaaacaacagagactggaagtccgaggttaaggtgttggcagttttggtttcttctgaggcctctcttcttttcttgcagatggccgccttctcactgtgtcctcacgtggtcacccctcagtccatgtgtcgtctgtgtcttaatctctaattataagggcaccagtcatattggattagggcccatccatttgacttcatttcttcttaattacctcttaaaaggccgtaagtccaaatccggtcacattctgaggtcctgagagttaggacttcagtatacaaattttggagagacgcaattcagccctaatgctagggtttaagaaaaggtctttctttcagtttgtgaggactcaggtttctgattgcaggagggtgatgatgtatcttgtgaaggcagtgagcccaacacacttcccttcagagctcgacagggtgagtggccttccgacctcatgccacctcatctttgccagcttctttgtgaggttgctgaatgccgtcttcagcacttgtgaacagttttgaacagcacttgactgcaatttggcaatgtgttttaatttattccatccactgctatttgctgaatatctcttttttacctgtgagctctgcatacaataatagttggttacatacaaattattttcatgtctctatttaacattgagttagtaagaaagtaaatggaaaatatgttgaaccttagattcctttacaagtctttattttctaatttattcaaatgtcaaacactgtcatcacttgtgtattcgtcttaatgaaacataaatcactagacatttattactatatatcttgtttgtagttacaattgtgtttgtgtccagataatcaaaataatgtatttgggtttaagtaaaagtctattctataactttatattaatctatttttgacacgtgtaagcacgcattttagaatgtcagtgtgcaattagatattcttagcacatgtcatttgtgaaaagcactttaaatctaagtacattcaattgagcataattaaaatatcaagatacatattcttcatatacattttgcctcttaattttttaagtagctataagtatctaccatgtgaattcaaattaaaggagggtgattaaattacagttatatttattgcttttagtttaaaatatagttgaaattgcgctatattaaaaaatatactgccatgttttctgtggacagcagactgatgatgggtttaatttgttttaatgcaagactattaatagtctctgaatattctcaagactgttgactagaatgattgggggttgggaggcgtaagaaggcttgtatttttatctaatgagttcttttgacttgactcctgaagtctcaagaaaatgttcaggaatactacctcatttaataaagaagcattggagaaagccttgttttgttgatacaaatgaaaggaaatggatcatggggaaatatgaactggagctcctgaacccttatcctttagataatgtatttaggctactgatatttcctatcattgtgaaaatgagcagacagccttggtgagtcagttttaaggcacatgtaactgttaaacctacttgtccacaactgttggacctaaagtatattatgattttagtgaaggccattgttcttggagtacttagagaaaatggggctgtacgttagaactctggattgtgttgcctttctaaaatatttgatttcttaaaattctgtttgtttgtttgtttgtttgtttgttttccaagatagaggcttgttctgtcgcccaggctggagtgcagtggtgtaatcttggctcactgtaacctccgcctcctgggttcaagcaattctgcctcagcctcccaagtggccaagactacaggcacgcaccaccatgcccagataatttttgtatttttagtagagagaggattttgccgtgtcagccaggctggtctccatttcctgacctcaagtgatccacttgcctcagcctcccaaagtgctgggattacaggtgtgagccacggcacccagcccttaaaaatctgtttttaaaaaataaatagctatatcacttccctgtgccaaaccagaagtgtcaacaatgaagtcattatgtaacatggcaagagggattcgggtggcaaaaccgtaaggaggagaagaagaaatcaagcttatagaagcatgtagacactgagtgaaagacgcagtgataggaaccacagtttggtttttttgcagactagcccatttcagagaaggcggtattagaagaaaaaacctataattttactgtgagccgtgaggaccatttcacatgaaaaaaaaacagagcatttggaaataatgatgcttcgtatcagtagaatgctgtgcgtttgagaagcttggcgcttggacttcatgctgacatggttgtagtcacagtcctattgccctttctggttgctctcagcactcctggatgcaaaggtgaatttatgaagatcatggacttccgatacaaattacagcagccaaaactgtcatatggagatgtgaacttaagattgtattggtagataggtgaagcacccattgctcctatcttgaaatgactatgctatatttagacaaaacctacatcagtataattattttgcaagcccatttgaagaaaattaaaactgtcactagttatatatttttgagcctaaaatatttctcacggctgggcatggtgtatcatgcctgtaatcccagcactttggtaggccgaggcaggtggatcacttgaggtcaggaatttgaaaccagcctggccaacatggtgaaacactgtctctactaaaaatacaaaaatttgggaggctgaggcgggcaggtcatgaggttaggagattgagaccatcgtggctaacacagtgaaaccccgtctctactaaaaacacaaaaaattagccaggcgcggtgacgggtgcctgtattcccagctacttgggaggctgaggcaggagaatgctgtgaacctgggaggcagagcttgcagtgagctaagatcatgccactgcactccagcctgggcgacagacggagattctgtctcaaaaaattggctgggcatggtggcgagcgcctgtagtcccaagtacttgggaggctgaggcacgagaatctcttgaacctgggaggcgaaggttacagtgagctgagtttgcactactgcactccagcctgggcgacagaacaagactctgtctccaaaataaataaataaataaaatatttctcaaggattcagatttggggattttactgccaagtagcctggctttctcattattgattaacctacaaagaaaaatttgatatatctgatgaaaatcagttatattgtacctacaaaaacatctcttccatattacttgatgtattttaatgtcactgaatccattggtttatctttatctcttagaagctcttaaagtcacaggaattctagtccatatgatcagattaaccaaaaattcaggcagctactccgttcaaacaggaaagaaaaaactgaaaatgaattgttgtattgaatctgctttttcacaagagacaactaggcgtaatggttctgagcgtgggttagaaattgggcaagtcgcgttcacattcttttactaccttgaagagaagtctctgcctccatctcatctctagaaagatgggaataatatagcttgtgtcagcatgattgggggattgaaggagatgatgtctgtgaagagtttagcacagtgcctcctacatcagaagtgcttgacacgtgtctggctcttgcttctccaggaaggagaggaggggagaagagagagtttgcagggccgtagttattcaagtagttacagctatctcttctttctggtcacactgctgggtaatttgttcttgaaaagtgtctcaagatgactgctcccacttagtagctggaaaatcacatccttccagaaagggatctagagggcagacatgggtgaagtgtacattgttagagggctgactggaaataatcagtgcagagatcactgtgggcagagccacagccttcaggtcctataaagggcagaacgataggaataatctactgcataggaaaaccaaagaaaagaaggaggacgaaaaacactctggggaggaaaaaataattggggttcactactgggatatctttccctctgctagaagatccttcatacataatgaatcacagtttggaaatggagcctttgaaaaaaaatccttacacaactggtaagagagaagtctcataccagccactgaatttttgcagaaatttgggcctccctccgcaagtgtactttcagactcaaattcctccagcatccaggacctcttgattaactatgtactctcaataaagagaaaaagatgagacctctgggaagcaagaattggtagaagctgggcctggtacagtggctcacacctgtcaccccagcactttgggaggccaaggtgggtggatcacttgaggccaggagtttgagaccagcctgggcaacatggcgaagcctatctctactaaaattacaaaaaaactagccaggtatggtggcgtacacctgtaatcccagctacagcaggaggctgaggcacgagaatcacttgaacccaggaggcggaggttacattgagccaagattgtgccactgcactccagcctgggtgacagagagagactctgtcttaaaaaaaaaaaaaagaaaaagatgctgaaatgtatcaaaaccagcctactcgtcatcctcttttaaaagaaaaagatgagtaaaccatcgcattactcattaggatgttaccagatatgtgagttggtcagagggactcctagctacaagtagaaggagtccactctaccattgactgtgtgcaaagtagcacattttatctacctttttaagatactcggccggatgcagtggctcacgcctgtaatcccagcactctggggggctgaggcaggcagatcacctgaggtcaggagttcaagaccatcctggccaacttagtgaaaccctgtctctgctaaaaatacaaaaattagccagatgtcgtggcacgcacctgtagtcccagctacttgggagactgaggcctgagaatcgcttgaacctgggagatggagtttgcagtgagccaagatcatgtcactacactccagcctgggtaagagagtgagactctgtcttaaaaaaaaaaaaaaaaaaaagacactcagtgactctgtgactctacgtatttggatctttccatttatctagtcttgtgctaaactttaaaaatttctgacactttataaaatgtgtgtaaatgtgtactgatataagatcctctacacgattttttattcagaatattcctgtcttcagacatcttcaggaaaccctgttggggttttgtttaggaggattgctttgaatttagattaacttaggaaaaagttataatatttgactgttataatcatttttaggaaaatttgcattttaaatttatagcccaagtgacgtatttgcaacattgaatctaatgatacttatttctctttcattcaaatgtttatgtgcctttaaaacaatacattttttcttcattttgatcctatatatttcatgttaagttattctttattaatgccacttgtaaaagaataaaaatatgtaagatttcttttggtgtaccagttctattgttctcctctaataaagatatataatgtttttgaatgtcgggtccccttttgaaaaatgctacaaaaagtttgtttacactggtgctagtattcaatactaatagagtgggcaataaaatgttcctcagttcctgataatagcctgggtgagagtacacatggcactgaacttagtaatttatcttctacagtcgtgggtgcacacagtgactcttaatagagaacccgctgtggtgctgcctgcagctctgggtcccctgcagccaggtgcaggtatgcagcccagtgcagatgtgcagccctaagccctgtttaaacacatggccacctgctgtaccttctaacctgttttgagttgaggaacagaatgtgtgagcctatgaactcacctctgtggtcatcagctgcttcatcttctcttctgtgttacagatcacagtaacttaatcataacttcctatggagagccagaatattattttactattgattctgaaggggtcttttgttgctgatgtggtttatgcatcagaactttagttgttcttgtgccaaattcgattctgtttgatttttttaaatctccaaagcataaatagtaaggacaactatgatttgtcagtttctgctctgtaacaaatttatcccccaactctgtatgtcactaaagcaaatgcaaactcttcatgttctacctttcactcctccattcagaacttgtactgttatgcgtaagcacagcataattatccctagtagttttatcttttcactctcttccccctagatattttctccttaattaccctaaatgaattgtcattgtctcttgattgctctcataaactactgtcattttctcactttcccttcccctgcaagtagactacacagctctctcattccccagcattctcgttccaatcctaggtcaccccatgtgctggactttgcctccctgtgtcagtagacattgttggtcctttcgccttctcacttctggaagccctgttcttaactcttgtgcctggattgctgtaccaccggtgtatagcagaggtttttcatcacttcatggtctctcgccactttccatttttcttcttcatcctcccaccttatctaaacccctgccttcagttatatatgtggagtgatgccctcatctgtgtctctcatccctcttaactcacccttccactgccttctgaatgtgtcattattcgtctttccaacactttgttcctattacacagcaaaaacttggatcctttctttgagcttacccactctttttgccctatattcagcagccaaatcctgttggtctctgttgcatccattacccagccacctctattcagtatagatatgactgttctaattctggccttttatcactcacctagtcggctaacaacctaattgtgatccctgcctcaggctctgcctcccggatgagccctctcccctctgctccctaggcatcttcccaaggcatagataatgctcagacctctacagctcctaagctgtgtttaccagctctcctgctgctacatagtcgcacagaccatctccagaatgcagcctgttctaggcagcatcctggaccttccatgagttggctccagcaatcttattttcagccaccttctttcataccccttctccatgccatctagagcaaaaggctgccatgataagaactgtaagtgtgccgctggcatccagccacttgagcttggaatccaaggttcaccttcctagctgcatgactccaagcatgttaaatagcctcctttactttttgtagcctcagtttcttcactgaaaccaggattttatttatttatttatttttattgagacggagtcttgctttgtcactcaggctggagtgcagtggcacaatcttggctcactgcaacctccgctgcccgggatcaagtgattctcctgcctcagcctcctgagtagctgggattacaggcacctgccaccatgtccggctaatttttttgtatttttagtagagatggggtttagccatgttggccagcctggtctcaaactcctgacctcaggtgatccacctgccttgacctcccaaagtgctgggattacaggcatgagtcactgcacccgacctattatttatcttattacttaccttataatattatgaagaccaaaaaacaatttttttttttttgagacagaatctccctctgtcgctcaggctggagtgcagtggcacgatcctggctcactgaaatctccgcctcccgagttcaagtgattcttctgcctcagcctcctgagtagctgggattacaggtgtgcgtcaccatgcccagctaattttgtgtatttagtagagatggagtttcaccatattagccaggcttatcctgaactcctgacctcaggtgatccacctgccttggtctcccaaagtgctgggattacaggtgtgagccaccacacctggcccaagaattcttatagaactcttaccacaatccctggtacttagtaagctagaggagcctcaataaatgctagaggatgatgatgttgatctcatcataattatcatccttattaaaatttcgcttggcagaagtgatgctgggtatattacccatataagtgtgatatgcccttgtcactgttcctttgtgcctttctctgcctggactaccaaaatcctaatcacactgtagtccccagctaacatgttaccttctcactggcttaatcacctcccagccaggagagctcttgccctcctttgaactgtcatatcagtttgtctggaccttggatcttatcatataattatctgttctcatgtcccattttctgtatttatgaggcatatagttactgaactccattgaaaatcctttcctctgcttgctggctatatagccctgggtacgttgctatattagtttgctagtgctaccaaaacaaaataccacaaactaggtggcttaaacaacagaaaatttatattctcacatttctagaatctgaaagttcaagatcaaggtgttggcagggttggtttcttctgaggtctctctctttggcttgtagatagccgctttttccctgtgtcttctcttttgtgtcctacatgtctgtgtctcagttttctcttcttgtaacaaaccagttggatgggattacgtcccaccctaaagacctctttttaacttaatttctcttttaaaggccctgtttccaactatagtcacattctgaaatatttgagagttaggacttcaactatgacttttggtagaacacagttcagcccataacagttgctttaatctttctgtgcttcaatttcctcttatgtaaaatctgcaaaaagtacctcttgagtggactgaaaatatgtaatatatgcaaagcaacaccttaataccccataatagatgtttaatgaatattcatgacttctacccttactacttcaagcttcttgagaatgagaataaagcatcttgtgtccttgcagttctaggacaaactttgaattgcttataaatatttggtgaatgaaaaatcaaatagcagaagtgagtctataataattgtatgcatttctctttctctcttagatggatccagatactagatgataactaagatttcaataacaaagagtataccaggaaacatgtagaaaagtcagtgttaccgctgtaaatataatatgccacactgagccagttcagtatggaatattttcccatgtcctacttgccacagactccagtaagtcatagggaaatgatttgtgacaaaattgcacacacacaaaaaaaacagtatcttcacacagccagagctttcaagtgatgagggacgcaaagacattgtgcacaataggtgttcctgtccattgtctgccgattcagctatctttgatctctgcaaaagaggaaccatgggtatggtactgtgaatgcataatagaccaggaattggaagagcggcacgcagtgtgctgctcagtgatcaagtcgtggagagacccagacaccatgcatctgatgataagcatcttctcttggtgccttggagtctctcatttccttccagttcgactccaaagggcctgtttcatcttcagcacctttacaatgtgccactttgagtctgtaggttctttctttcagaggccaccacagataatgggtacatcattatgttttcttgatatcactacattctttcttccccgtgcatctgcctcctgcagctctctgaagtggatttgactcctcatcatccctagtgataactaactctgctttaaaagaattgttatctgttggttggcttggagtcagggagttgagtgtaagttcttgttttattgtatataatgctagcaacttttaccagtgttagtaaagataagagataataagacaattccgtacctaagaattgtaccctttcataacagcaccacttggatatgtagaaagagtttgttgtgagatcagatgtaaaacaaataaaagttattcgtgaaatgatatggaagactgggattagaaactgtggcattcaagaagccagttaagctgattctcagaattgacagagattctagagatggtgtagtgcagatggtgtagtgcagggattctcagcctcactgcacatggtaatctcataggaaaattttagcaaggacagatgcagaaattcttattaaactgtcaggactgaagtccagaggtcactatattttaaaaaggtctgcaagtgattgtaacatgcatctatggaggaaaacatcagcgtaggagaaaaagggaaagaaaccaactggagtaaaggctctgtcttgagcactgtgctggctcctgtacattctccatctctttttatcttcatagtaagtgagatggtttgacaaatagggagaccgaagctctgccttcatgtgggacactcaactgcctccttccctgctgttggcagtgcttggatgaatatgcattgtatgcctcttctctcttccaagaagactggtttctctgattactttgcattttaccctggatagagatggtcttaccctcttttgagcttcaaaaaatcaggcttcaggctaattccaacctggtgaatctttctcagcaattctacccccataaaacaatctttacattttaaatttctattcatttttctaactattcataagattttcgtatgaagagttctggttcagaaacacagagaaaatccttaccgtgcctctcacatggttacttggttaggtgtgtttcaactcatcattctgccaaccgtaaatagctgagtccatatcacatgggaaatgtaggtgcaaattcacaaaacactcacgggctgtaaacaaccagggagttgttcttctcatggacctgcaggttgcagcagcagcatctgagcaaaacagagctgttctgagcagtagggcggggagcagcacgtctttgtgtggaccagaatgcaccagcctgtgggtgtatcatctcacactctacttcctagactaaggccctttcttgggcctttcagtgaatccaacccaggttggtattttgtgttgtcccccaacccaaacaaaaaattcatttgcacttaaggaagaacaagagtgacttgattaaggtatcaagttggtaaaaatggaaaaacaatttgatttagagagttaatgaacgaacatctttctttgattcttttcattaacattacacatattaggtaaactgtgtataggtgtttatttttctttatggaagtcacacatgatctatatagaaaaaatttcaaatacatcaaaaaaaaaaaaggaaaagaaagatacttgtaatcccaccacttcagaagcaccactttggtgtatttcttccacatggtggtaggggatggcagggggaaatgtgtaccagtattttaaacatatgagcatttttacttaaaagtatatattgaacatttttcactgttgactgcatagtatctccatgcatgaacatactcaagttcatttaacccatcccttaccattagatatttatgttgtttctaatttttctttccagcttttataaataatacttcaaaggccatccttgtagctagttctaattagtacagtatagtttggatgatataaaaatttcatatatgtgtgacaaggaataacaagttgaagtacagtaagaaagaatgtaattgcttgtgataaatataggcttagcttcaaaatagctagcttaaaatttcccttatagtgtactttaaagatttcactgatgatcttggaggtgaggcatctagccattgctggaatgaaataacacacgatgttcaaagtttggttggtaattgacttagtgcatatttttgctactttcatataccacttatctcatatgaaaagagcaattctgtacacaagtaatacataaacaaaaattttaagaatatgtaactccataaaatgagatttgatgattgacttgagtttctaagagaaaaaaataataactttcatctaagtttacgtgttcgctggcagtttttgaatcgttgccagaatcatgaaattcatcattcaagagcctttgtcctcctagtccccgttctgttctgtgtctcctcatttggatacgttctgtgtctcctcatttggatacgttctgtgtctcctcatttggatacgaatgcttttcattttattactgcctttgtgcccttggctttgagtcctgtggtggcagttgtttgtgcttcaaggagcatttgtaatttcagtgtgaggacttggggaggtcaacagaaatctctggtctttgccctccttcagcctccacattaaggacatagggcttcttcctaggcagtaactgtattttgattcatacttgtaatccctaaccgttttgattgatgggacaagggctgaaactacattctcttgaggatagaatatttttatccttgagaataatcattcatctcttcctgacccaccttaccatttctttgctttgatcctaaatcttttttgttctttttaggctggaggctcccaggtgattttcacaaatcctttagaaatcgtcaagatccgtttgcaagtggcaggagaaatcaccactggtcctcgagtcagtgctctgtctgtcgtgcgggacctggggttttttgggatctacaaggtaacttttttttttttttagtcatttatttgattactttctcatctcctaatgcagaaactattcttcaacatgaaatccatttttttttgcatttctacacctggagaagatgttctacccaagctgcagaggcaccttcatgccaattagaaggaggtgccccttcctgccatctgccaaaaaactatcctcatcaatacacaaatctaggatgactatgataggaatcgtgccctctagagttgttcagtgcagctctttgcagcaacactggctagaattttatttggatttgttattgatacgctgagttcagttcaaggagaaacctgtatcataatttattttctgatcctatgcatatggtccgatccatgttttctctatatatgtatgccttgtcttaattattataaatcttaatcatttttcatttagaaaatgttttttcagaatgattacaaaaccaaacttctagatgattcttgaaattttttattcatactgctctaccaaaaagttataatggaatttactagaactgtctgcctatatgccaacctataaggctttatcaaacataatgtatacacaagttttcaatgaagaattttttaaaaaaacattttacgctagcttgactaagtaaacctttagggatatgggagaaaaataaaatgtctacttaagatagtttcatttatttacacagaaatgtatacagtcacattatataaaattaatactgctttgtttctataaacacatatcaagaaatattaaaattattcatgaattttgaatcagcatcttgagctccatttaacccactttttaggtcatctgttagcatggttttgcagaatacattgtcttcatttttatcccaagctttgtaatttgaagcatttttgacttttatgtatgatattgttcctgcaaattttatcccatagacacataatattaagacagtcaattgcttttttcctattcccagttaatcctgaatggatataactggtccccataatgtaacaacttaccatattgctagagtaaacttgaaatgacttgttttgacatttgacacagtatttgtgagatcctcctcccagaaatacttttttactctttttctttctaacctgagttttgcaagtgacctcagtaaacatccagaattagtaataattgtggctgtctcaggagaatctcccttccccgaatggtactctgcttctccaggtcaagtgattggaaagagtactccatgatctgagactttgtgaagattgaatataaagtgatgccctcttttctgggattaattttagcaggggaaaattttgccttatatttaggcatatgtggtacttaggaataaacctgctgtttttttaagtagaacttaaaatgctcaatctgtgattctacaatataacacaatgttctatagctattttgcttaccaatttattacccagctgtaaaaaataaacactgttgtcatgaggcatagcattgatcaatttgaagaaaaatcatcttttctaaatttttaggctcttgcagtctgtaatatgatgtagcagcatgtcattttgacaagatgccaggagtctttcaatgggttgtctggtaaaaagcacttaggtactgtggcagtgactgttattgaaatgtctagatgagtaaaatggtaggaacttgtttgctgatacagaaacagagactgttaaactacctgcaaatgatacaatactgggacttagtgcttttcatcttcacattatttaataatcttaatcccctttaacacttcttggaagtagttggtatcctggttttgtagttcaggtgaatagaggctgccaaccatggtatctgagctgaaattgaggctcagaagtttcttgtttccacttttgtgctaaaattgctttcctgaaatgagcaggattgctcaagtttgagcaagagaactctcccatatgaagttagtttaattactagtctagtagtttaatctagttcagaagcattccacagggcttggtgctcccttctaaaatgctgtttttggtgtactggtaattaccaagaaaatcagtaatgctttgagcttctggaaccttgattttgttgcaagaaagtgacctagtaatctctatcttcctgttggtcatcagtatcagctacattcagagacccgggagtcaggatttcattcagcagatgttgacctctgtggtttggtctcctttcagtctgattagctcttgtattacaagtctggttggtcctcatttatatattcccagcattctgtcttgggctttgtttcatgtgaacctctcttctccagccccaccccacttcacctttacgtggtcagacatcacagcaggttaagatccatctttctagggagcatcacagcattagcattgctttgtagtttaatgtgtttttgtttcaggatagcactttttagtaataaagcttttctgtttctagtcctggttggctagaaaaatgcaaatgactaggggtgacctcacacagtacttttaaacctggtatgtgtccctccaggtgggtctttaaaaagaagaaccactgtcctagatttagttgagacaggtaatctttctccttccctctgttcttttgtttctgttgttaacattacaatgccagacccaagaagggtgagtggttggctctgtctgtgtgtttaggcctgctgagctttaaccttacctaaattggaaaatcaggctttctgtttttcttctgtattgacttgcaaaataagcaaactattctgacttcccagtaagtggcaattagaatacttgttttagaaatacatttgcaactgaaaaaaagtggaaaatggtaaacattttgcattcctaaagtaagaaatagtttagcacaaatatagtaaacaatgtaaataaagcccccctctaaaatgctaacatttagagagatttagttatagcacagaggatgtaggtgactgaagtgaaggcagcataattaattgcctttgaaagagctatttgaatgtaatgtagctaagaaaacaaatctgcaatgtctacttctttttaaaaagaattatgagaatgtatttccctttccctgcataacttctgttttattgcataaacccctggagcataaaaataaaagtcaaataaacttaacatagcaaaaaaagttgtatccatctacttttgaacattaccttttccgtaggagctgtcagagcgttaatgaggggacaaattatactttaggaatggaatgaaacttatcatttaacagtaaatggcagcacagctaattaggccaaaaagacgcttcgttaggaagcagtggaactgtccatgtctctttttgagtacaaaacatggtcagtgaagcaatgacagctgggatccatcaagcactgttgaaaagttttcaaattctataatcacaaattaaaccttgattctaccttggagggtcacttaggaatatggactctgtctgctgtgttctaatcaaaggcgttgtttttttccactgcatttgacagtattcaaagatatttttatccatatacataaatgttgtatacatgtgttcatctataatgtgtgtataaatgattcattggagctattgttcataaactcagaaagcaagttatgatatatcagtacattcttatttattctgccagttatctcaaagagagattgatttttttagtttaaaaagtaaaatataatttatatttcaaaaaaatcaagtaatttagaaaggtgtatgaagaaaagtaaaattatctctctaccctttactgctccattctcttcaaaggatagccactgctgaagattttatattaatatatccttaaaaaaagaaaaactttctgctcagattagtatttctctttcaaaaattttacgaatatcagcatcagaaaagtatgtatgttttccatagcaaagacatagaatcaccctaggttaccattaacaggagattggataaggaaaatgtggaaactacacacaatggagtactagacaaccataaaaaagaactaaattatatcctttgcagcaacatggatgcagctgcaggccactatcctaagcaaatcaatgcagaaacagaaaaccagatatcacattttcacttgtaagttggagctgaaccttgggtacacatgagcacaaagacaccaacaggaggaagggaaagaggaaaggaggaaagggctgaaaagcttcctttcaggtactctgctcagtacctagctgacaggattaatagaagcccaagcctcagcatcatgcaatatatccttgtaacaaacctgtatgtgtaccccctgaatctaaaattaaaatgaaaggagaatattttacttttcttaagtaaaattgtgttttaacacaaatagaatcttttcaaacacaatatatcttaaagctctttcctcattttatttaataactatggaaatttttttgtttaactgtttgctgttgatgaatatgtttctagtttgaagatatatcaagcaatgccatggtgatcatccctatgtatattttgacatacttttgtgattgcttagaaaagataaattcctagcattgaagttgttaggtcaaaggacatgtgcactttttagtgttaatagattttatccagtttttttcagtttatcccttttttcttggtaacatataagtactcataagattaattcttcagtttatcatcttttaaaaacttgtatttttacgtgctcacagccggacctgaaggaagcagttgtttagtctactttgagaacacattgccattctagttttctgatacccagggacatgctgtggttttacaaccagcctagtggtagttctcacccatccatttctacttttatccttcatctgagcatctgtgaaagcctcttcagggctttctttattttgtctcttgactctcctaaatccactgttgccacagcagccaaagtgatccatttaaaatgtaaatcatattaattcactcactcaacacactcattgagagcttactgtgtgccaggcactgttccagcctttaggagatggctgtttaaagccaagtccctgctcacagtatattgggtaggacagggcagctatcaagagaacaaagatatggccgagcatggtgccttacgtctgtaatctcagtatttcaggaggccagggcaatctcttaatgccaggaattcaagactagcctaggcagcatagcaagacaccatccctccaaaaataaataaatataagttagcggggcatggtggtacacatctgtagtcccagctacttgggaggctgaggcaggagaatcacttgaacccaggagttcgaggctgcggtgagctatatgattgcaccaccacactctagccctagcaacagagtgagatgctgtgtctaaaaaaaaaaaaaaaaaagaaagaaaaaagaaaggaatgcgcaaaattaatatgacatcagctggtgctaccgtgaagaaaaagaagctgattttaaaaatgagcaaaggactagaatagatatttctccaaagaggacataccaatggccaacacgtatgtatgtgaaaaaaggatgtaaaaaattttcaacatcactaatcatcagggaaatgcaaatcataactacaatgagatagcacttcatacctgttaggatagctattagcaaaaaaaaaaaaaaacaaaagataagcaatggtgaggttgtggagaaattgaaatctttggtggtaggccaggcgcggtgcctgacgcctgtaatcccagcactgtgggagaccgatgcgggcagatcacgaggtcaggagatcaagaccatcctggctaacatggtgaaaccccatctctactaaaagtacaaaaaattagccgggtatggtggacgtgcctatagttccagctacttgggagactgaggcaggagaatcacttgaacccgggaggtggaggttgcagtgagctgagattgtgccactgcactccagcctgggtgacagagggagactccgtctcaaaaaaaaaaaaaaaaaaaaaaaaaggagatccttggtggtagaaatgtaaagtggtacagtctctgtggaaaacagtatggagttttctcaaaaagttaaaatagaactactatatgatccagcaatcccccttctgggtgtacatccaaaagaatggaaatcaggccgggcgcggtggctcacgcctgtaatcccagcactttgggaggccgaggcgggcggatcacgaggtcaggagatcgagaccatcccggctaaaacggtgaaaccccgtctctactaaaactacaaaaaattagccgggcgtagtggcgggcgcctgtagtcccagctacttgggaggctgaggcaggagaatggcgtgaacccgggaggcggagcttgcagtgagccgagatcccgccactgcactccagcctgggcgacagagcgagactccgtctcaaaaaaaaaaaaaaaaaaaaaaaaaaaaaaagaatggaaatcagatatctgaaggagatgactaccaggttcattgcaacattattacaatagacaagctatgaaataacccaaatgtctatcaacaaaggaatgcataaagaaaatatggtatattatagccttaaaaaggaaggatatcctgcttttgcaatgagatggataagtctggaagacattatattaagtgaaacaaggcagtcacagaacttcaaatactgcatgattctattcatatgaggtgtctaagtgtacatattcttgatgtatgagagagagtgactgagtcttttcacaaatataccaacatcaaaaattgaaataagtaaataaataaataaaaatgttgtgccttactcctgatggacttttattctctcatttaaggaaggatttttagaaatttaaggagagggtatcaagtatacctcaaggagtcaggttttgtatctaatatgtgtgaacatttgaaaaatactacaggtcatgtaatgtccataatctctgcttaaagcttgtattaaacaaaaactggaaaaaaaaagaacttttaaaaaataatttcaaattttattttacattggagggaacatgtgcgggtttgttgcacaggtatattgcatgatgctgggatttgggatatgaatgattcagttacccaggtagtgagcatagtacccaatacttagtttgaaaaaaaaatttttctttttacgaaacttcccctgtgcttcagatgaatcattgactcgtgtgtagaaagaggataataatcatacctacctattcatagtatcgttgtgtggatttactaaaataatgcatgtaaagcatacaggatagagttgagcacatagtacacatgatgtgttagttgttatcaacttttcattattgagtgtcaactaagggattcttgcaggaatacctagtttcttccacattattccagtcctgggtaatttccaatgctgtgtggtcaacaacctctccaggccaggtcttctgctttgaactttagaatagcaaattaaaaggagatggcttgaaaaatattatttttataaaacaatgcccagaggaattgagtgtgctaaagacaccagaaaaaaaggattccttaaagtaacagcaaatgatcaatttttttaaccattcttttattctttcaccaaatgtatattgaatgctaacactattagatgctagagtaccaaagatgtgtacagtatcattgccttaaaaatgatctatgttaaggggcaagagaagagaaacatataattctagtgccagcactttgggagtgcaggagttcaagaccagcctgggcaacatagtgagacctcatctctacacaaaaatatttttttaattagctagacatggtgtcatgcacctgtagtcccagctacttgggaggctgaggggggaagagcacttgagcccagggggtcaaggctgcagtgagccatgattgcaccactgcactctaacctaagtgatagagcaagactctgtttcaaaaaaaaaaaaaaagaaaaagaaaaaaatgcaacaaattgcaggtgtaggataattgaaaataatccagactagacacatcagaggaaaactgctgaacaccagagctagagagaagctctttagtggccagagaaaaaaagtcaatttgccttcaaaggggcaacagttgaactgacggctaacctaaaaatggcaacagtggaagccagaagacagttgaatggggtgtcttcagtatgtggaggaaaaaaacttttcaacctagacttgtataccctgtaaaaattgcttttaagaacaagggtaaagatattttttagactagcaaaactcagaaagtgtgtcaccagtagaaccttaatgaaggaaattctggaaggtgatcccaggtggagatgtgtcaggaatgaatagcaaaaaaagtggtaaatgtttagtcttgttaaaagtaaaacttcagccaaagtaagggagtttaattgtacaatgaatgattcgtgaatcaggcagcccccagaatcacagcagagagtgctgaggcgggcagatcacaaggtcaaaaggtcaggaccatcctggccaacatgttgaaaccccatctctactaaaaatacaaaaatttgctgggcatggtggcgcacgcctgtagtcccagctacttgggaggctgagacaggagaattgcttgaaccagaggtggaggttgcagtgagccaagattgcaccactgcactccagcactgtctcaaaaaataataataataaagaaataaagaaaaggtggaacatgttttacagatgagctttgtgaaggtgacatgactagcagcttcaggactaaaattccatgtgataacattcctctgtaccatgtctaggattttcagtccatctcagtgatgagcattgttgatggcaaagcagtgtacaatactagaacaatagagaactagcactgacccaagcagcatttcctacaagaaacagagttgtcaagatgattttgttagaattgcaatgaaattaaggagaacccatatccctaaagtccctggattaaagaagccaagtaatagtcattcatatttcatattcaaattgaagtaatttccatgttcactgatatcaagtcttcaaatgttggctggcttatttggttttaacacaagtgacacaatcacataataggtcttggcaccattgctatttctcagcaagacactcaaactcaccctcctcaaatctcagccatgtaggtggggtctaaccatcctttgactgggctggagaggcactgccaagctgtgtatctaagggttaacttgcttgggggaagccaagaggaatgctaagggatcaagtcatgacatgctgcccattgtttgtagctctgggatcaaaatatataattatacatgccaaataaattctaaacctgtaaggtaggaaaagagggctgggtggctctgacgacaggtgccagaagcattgaataaccttctcagacaaggtgcaccactgttgtcttgaatgctgcagggtccccagtctggcattttccccgtgctagacaatgtgcattcactgctggagtctctgttaagcctccgtctcccagacctgctggctcctggtgcccggcccgacacagaggtgcctttgtgagtgtaattacctttccctgtattagaaatagtctgtttagagctgtgtttgcaggtacagctagaataagcaggaattagcatgcaaaaagacctgccctggccctgacttctttatcagcaccatccttcaggactggttttttccccactttggattgattgggcaggtgatttaccatccaagatgaagagttttaaaagaagaaaaagagacatcggaaattgctgtgcatgtgcaacagcatgcgtgcgagagaaagagagatacaaatcctgttgtgttatatctattgacagtttcataccaggcagagctggcaaaataaacttgagtggacgatcctagcaacttgagaattgattaaagcttccttgggctttcagcacagtgtccacatcaaaaaggcatgagaagcaaaataaatgattcttttgccatgatatgctgccgccagaatctctaagcctatctaattggcctgtgtcaattgtggactattaatttgaagttaagtgaggcctacccttaaagaagcttttctagatcttaaataggatgatgatggagagactttggcatgatatagaattggaatggaggcagagttgataattaaactagatctgagggttttttcccagtttataacgtaggtctaccctgagatgatttttgttgtccctgtctggatattagtgtgccttttatttaaaaagaaaaacccaatagtttatcatctttagagagattagatgattgtattttgcatttattaattttccccaactgattatagtatatactgaggaaattcaggaccaatcagagaatgtttaagggcagagctgcctagaaaaccagtttaaaaaaaaaaaaaaaaaaaaccaaagcaggaaaatgtggggattttcttatatggcaggaatgtttaaatatttttttttaagtggcacacctttgtaacttattaattctcaaatggccaaagtaatatttttgtgttgctgatgcaggctctagggcagcatggaatgtttccctttgttataaagttgccttttcagaatggctgatctcttggtaaaaattatacatggaacaagtagaattcaagtcaaacaggtttatgttttgctgtagtactggagaatgggtgttcaccacaaagtgaaggatttatcaaggaatctgggagagaaacattttcccccttagaactttaagtctttttaacatcctgcttcccttttcattgtgcaagagcaacaggtcaggtattgcctaaggcagtcttacaaattggcacctgcctttatgcctaagacctaaaggaagtggtggggaaaaagaggccagggaaatttaataagtctctgtctttccttgggaattgggctttgatgcctggggtgcaagagaggtgaagggccgcctcctgacgcaactgggagaggtattttctgcagggagacaccagagaaggtgctaggagaggcagggagacacagccctcaggtgaacacatttgtgtcctttaatgtttgtaatgcagtggataccttacaaggactttcacacatattacttcattcattcctaaagtttcagttgtcccagtcacctgaagaagatggcctttggtatttttgacaggtgaggaagcttaagagcttgatttctacaggtgctcatcacatggctaggggtgacaggatgatcacaccaggtggaagttcttttgcttccttgacttttccatttcttcctttttctcaggtaatcagacaccaaagacttcttgcatatcctaacatttgttctagtctgcataaacactttgaccacattgcttgattcctggaaaacgaaatacaacccatttctaggcatttttcctttagtgttgcaattctaccctttcctcagggttatatatatatatatatataaaattgtttgtatgtttggtttttaatcaagccatttctcatctcagccatgtagagttgttttccagcatctcttgaagtacatctcacatctcttgtagatgccattgtaacagggatacatgatttactgtcatgatttcaggaaaggaagaagaaggaggttctcagaaggtggaacactcagtgggtccttcttcagaagacccaactgattcttcatgtgcctttactcttcctgtgcctcagggatgtttataatttcgagtcatgtcttcccatggccttctgatcatactgaagccacatagcataagacaggttaatctgcttctctttctcccctcgccccctttttttaaactttaatgtttcaatacaaaattagtgactgtttcctcctacgttttgttacattcccaacaaataatatgtctttgtttgaaaagctaaaagtggccaggcgcagtggctcaatgcctgtaatcccagcactttgggaggccaaggtgggtggatcacctgagatcaggagttggagaccagcctgcccaacgtggtgaaaccccgtctctactaaaaatacaaaaaactagctgggcgtggtggcaggcacctgtagtcccagctactcaggaggccaggaggctgaagtaacagaatcgtgaacccgggaggtggaggttgcagtgagctgagatcatgccactgcattccagcctgggcaacctgggcaacaaagtgaaactccatatcaaaaaaaaaaaacaacaaatgaaagaaaagctaaaagcttggttttagtttctgatatgtttttccaagaaataatgttttttaatttttattttttatttatttatgttttttattaagatggagtcttactctgttgccctggctggaatgcagtggcatgatctcagctcactacaacctccacctccgggttcaagcgattcttctgcctcagtctcccgagtagctgggattaaagtgatcttcatttgagttgattatttgatgtctaatttgagtatcttctggactgaatctacatgtggatgaatagctagcagcacttacaagaaggcttggggcaaaaagggaaaaggaaggaaaaacagaaactaaacgctgatattgttagccttatacaataacagcccgaattataactttttaaaaaactagttgtaagaaaaggattggatgttacacacagttattaacattatactgtatgttttccctttgaaagagctgggagaagtggaaaaaactcttagagtattgagttttggacttgtctctggaactacctccagggtgccctctgaacaagccaagggcatagccctcggtaaatgcacaattgatagattacccatccaggacgatagattacctgtccaggacgttagtttgtacgtgcctaaaatgactagcttgggtgtggtggatattgtgattcttaattagacatctaacactttgggggtggacaagatacagaagcctgagccggttggcagtacatgaggtagatgagtgcttctctgaatacctgtatacacagagtgaacagaggcatgcttacacatccatgggtaagttgactgaggaagagccaacatgacagaatccagattccaagcatttgttctggttggcaggatgagccaaactaggatgcaacttaataggattaaatctgatgtcctgcctgtgttacttgtgtgaggcaactaattaagttatagtagacttgagttaatagtaattcatatgaaaaagactaagggttttattacccacaagctcagtttgagtcaggagtgaaatgtgcgtgtcaggaaaacaaaggctatagtaacagatacatagtgttaaataactttgacagtttggagcatcagacagaaatacccaagatccagcattactaggcctcaataagtgtcactgggtgtggctagatctgttgactctggctggattcattattttcttttgggaatctctgtatttggtggaaatttttagttattagaaatctgttaaagaaatggtattaaatcattacatgttgaaaagtgatgatttccttcctattcaccctacccaaaacacaatatatgtgttgtggttttcatcataatatatcatatttctgggcactcatcaattcgcggggcctctgcatggcattatgttggcaacagaaactatttgttgaagactttgctgtaggaactgattgttctacacacagctttaaaatgtatccgaattattgtgaatatttcaggctttagagcaggcatttatcaatgtttcataaaccctgggtggcaggtaagtaagtatataataaaattagaaggatccatgaaccccctgaaaagatataattttttatgtatgtgtaatttctttctgggaaacagtccaaacgtacaaaaagcaaaccccttttccccccacctgtataatttgtctacttcctagtgtgtaaacaaagaggcatcttgactgccgttacccgtctttggtgagaccagagaacagatcttccttgaaatgccagtggcttgccaccagtagggatttaaaaggatgtcacaggcagagttccaaaaaggttttaattgaagtcttagcattagaataaatgagaactgccctcctcccatcacagcacacaacaaaactagtttttgttttaaaaacaaagtttagatttattacttgcagaatttgggttatttttttctgttcccctttcaatgtgtgagtacaaatttggtcttctccaggaatattttgttctgaggtgagttccagagaagcttgatctcctcaatgggatatgtgtttcatgtggtttttcttcctttgcaaatgtgcagggtgccaaagcatgctttctgcgggacattcctttctcggccatctactttccgtgctatgctcatgtgaaggcttcctttgcaaatgaagatgggcaggttagcccaggaagcctgctcttagctggtgccatagctggtgagtgtcccccatggagttctcttacttccctgacccttgctgccccccttccctagctgcatgctactacattgaaatttttttgctgatagttcttgacagggtatgtgtgagtttgctagagattgaagagctactgaaaaaaaagggaaaaaattaatcttcattctggcagatgagattattagacaagcttaatttcttaactctagaaaaggctcattaaatattggcttattttgtggtattgtggaactccaattcaagttccatatcatttcatagtctcacttcacagcataagaataactgtttagctggaagtttttaaagatttgaataggtttgtcttaaagatgtctaaaaaaaatagtgcataaaagcctgtccagaacttaaacaatagttagagaaaagaaatgtagtagaaccagaaaagacctgggccaattagagacacctgtttcctccctgtgttacggggggatggtggtaattaaatcacagatggaaataactatcttctttttttcagtgctccattgaaaacatcgatagaaaataattaaccatgccagggatcagttcattttttgatgctgcttcttttcaagggtccctaagagcaggaacagtctggattagctctccaagtggtgacatttaataagttaacaaaccctaaggcggtcacaggatgcctggatccaaacatttttgatacctgtgctattctcatcagatatgtaactagagtctccatgcttttctcaaagatagcataagaacaactcccagctttgagaagttgtttgctgttttgtgcacaccccacctaccctggctgcagcctggggaacccctggatgcaggaacctgtgtagctcctccttaattcttagttaatccttttccttcaaaggcagtgatattggtatataaggcagggctactgtttcctggctgcttagaaacctcagttgtattagcagcagtgataccactgtatctagagcaagagatcatgatttcaggagttgagtataaaattcccaattttaattccagcttgactcatggtggcctatatgtaatttctcatatatctgtaaatgagaaaatgttttgaaccaaagggttataatttatttcaaattatttacttgaaataaggtaggacctaatgagaataactgagtaccacttattaatgtgtgaccttgggcaagttacttcacttcttgtaagctttggtttcctcagctataaatggagatcacaactgcacctgctacagagtgtgtgtgaggctcaaatgagaggatccatgtgaaagacttggcatagttcttagcatacagtaaatgctcaataaacattagccaagtattacattgaatccaaaagaatctgtctgtaaatcactccaaaaaataagttgtgaaattagaagttaagtagtagagctcagatcaaggtctaggactctttcctaagcctcactttcctcacaccataaaaataccatctttaactcttttcttggagaagacaggtacccagaaacgattctgtctctgtggaggtaatccattctaccagagctatagaaatgactggtgagattttttttcatttaaggtttatttttctccttttttaaatgattttgaaactaatattactcattataaaatatttgaaaagtactagaacaggcaaataacaaaaatattattcattatttcactactctaagataattgctatttaacatttttactcatttttcctattcaggtttttcacagagctgtaatcacactttgtatagatagttttcacttaaggttgtgtcttaagcattgttacccatcatggcaaagtagttaatgacatgtgcctgtggggtcagactaccaatgttcaaattccagtgtttccaccctgtgtgaaccacacacattattcattccctctctgccatttctccatctgtatttggagataagaatagtcttaccttacaagattattatgagaattaagtgaattaatagatgaaaagattaaaatagtgcctgatatatagtaagtattcaaaaatgttccataatagtaattttattacatattatttaaaactttccgaacatagtttctaattgctgcatcttatgtatttctcaattttagatactttaattttttccaaaaaattttaaatagctagtagtatgctttttcccctatgttgaatcagttatttttttttaagagaaatagattatctgaagtgagtttgttggtaaaaagcatggttgtttttcggtcattgacccattattcttgagagttttaagtagttggcatccctgtggtgatgttagttcagccctcttgccatcctgttgtctttataaatgccttctgtatttgttatctattactgcatgccaaattccctcaaaacttaatcagcttaacacaactaatatttattttctcacagtttctgtgagtcaggaaacaggtgtggggtagaagcagctcactgggtgcctctggcaccaggtctatcatgaagttgcagtcacagtagcagccaggcttgactgacattggagaagccactttcaagatggctcaatgacatagctgttgacaggaggcctcagttccttgtcatgtgggcctctccattggtcaacttggataccctcacaacatggcagtagattccccagagcaaagtctgagagagagagagagagagagagagagagagagagagagagagcaagcaaggcagaagctgcagtgtcttctatgacttcacctcaagatgatagagaagcagaggcgtgaatgtcacaagggtgcagatctttgagggccattttgggaactggctgcctcacttactatagagcattgacttttattattattattattattattattattattattattattattatactttaagttctgggatacatgtgcagaatgcgcaggtttgttacatagttatacaagtgccatggtggtttgctgcacccatcaagccatcatctaggttttaagccccgcatgcattaggtatttgtcctaaagagcattgactttcctattattatccaccttcctcctgatcccccgtttctggtaaaatgggaaaataccgagtttgccctgttgattttagtcttcaaagagtgaataagctacaaagcttgatggtctttgtgtattctacaaaactataaaaactgtgtaatgcgaagtaagctactttcttaatttaataacagatatcagaagccagtggtcaatgtcatagttaccattccaattaaagttaggaataagacaaggatgtctctctcatctttgttattcagccatattttggaggttccagtcagcatggtaaaataaagtaaaaggcataaataaaagaagaaaggaagcagtcattatttataaatgattatttacctgaaaatcaaaattaaaatgtctaagaagtatattagaattaggaaaaaagattagtaatgcattttgttataaaataaacataaaaaatctatatccagtgagcaggagtgatgtcatggggtgagcagggctgagtgtggaaccttgctgagatgctcaggcagagctgagttcagtgtggagaagggcaagacttttgtcagaagtgtgccccgtgcaaccccaagaagggcagtgagcaagcacaaatgtgcactaatcctgaatgggctgttgggtggaggacggatcaggcccccacattccctttgtggttgccaagaagagcaaaggcatttcttagggagaggatacatggtattcagagaatcccagaaagtatttaataggagaaaagcttctttcaaaatacaaaaatcctcctttttagatggagtttcaggcaactacaatgaataattgttggcctctaacttataaaacaaaaatgtctcatggctatttttatatgtaccatatttaaattgatcacttatacataaaatattttttgctgaacatcagcctattataaataatatggacctgtgattaaatgaatatgaccacgctttctatgtttagataataatttcaattattcagtaatgttatctcactgttttctttccaaaaatttgattagccttgaggttagattgttttagtaatatgtagctttttagcaaaagtggttattggtatcctcacctagagaatgttgggttttggtgtttttgtttttgttttgttcatgtatctagttataaactgggactatatttaaatactggaacatctactccgttatttcacaagatagaacaagactaaccaatatttgaattcatgttcattggccaaagtacatcagctttgtcagaaagtgaagaccgaagcgggggtcctgaaattaagaaatcaaattctaattatctataattaacatggtgctttatcattaatgaagggcatttcaatacaccttgtgaatgatatcaaataaaatatatctaatactcaaattttatagaatgctctatcataccagatgatttttatcagagtgataagatagaggaacaagtcaaactgtaatgatggtctcacctttgaattaattagcttgagattaagttgtaatacagaaatacctttaaaagctgttccagtacacagaagtggaagtgtgttatacatgtgtgatcatgatgcttttgcaaacattagattgtgtattatgagaaaactactgttggtacaaatttgttaattatgtggacataaagcttaagttataatagtttaaaaccagtccttaaacccttaaaaaaagtaatgaagaaattgaatcaagacaatagactgagcatattcatccatctctcctgtcttcccaaataccttaaaatgtcaggaaatgcatttttaaaaaattctttattggcactagaaaatgctaatctggccctcagcagaaaggaaatagccatattgactctgaaactggactgagagatgccccagtccaaaacacagcaggagaaactacctctaatgcaagggctgaactggagaatgttaacctttgagtgaagaatagaatgcctggggtggaggtggaggttttagggtaaatcattaacatgagttaggcaactatactttcttcaggattgccaggcttggagctctctcctggttttcatatggagcttcaggagacagttgtatccaagttaaaagctcagagctcaattttaaagaaagagaccacttccctagagaggataagtgtaaggaatggacagaaagtagggcaggacttaaggtaattcaagacttctaccacagatgcaggaaaaaataaagtgatggcagcttttcccaagaagaattaaggatttaaaataaattcttctacccccaaagtgaagttccctacatttcagcagttcggagggtccacaccctgccagcatatcctaaccccttgcacccagttacacaaagcccatagaccctcccattcaggagagagacctgtgggtgaagcatacctagaatatggtagaagtcacccacaacatttgtatataatactaatcagcctatcctttgaacttgaataatatcaatagacaaccagagatccccagccatgaaggagcaacaaagtaagtgaacagaagaattagagagaaaacaggcaattcaggggacagaagacaacttttaagaactataattaattaatataattaattagagtcctcagagagatttgaaagaaataatcagtaaagaagctttcttgaaaagtaatagaagaactgccataattaaatatcaagcgttagttctgaatgatataatggatatgatcaaagaccaaatttagacatgtggaaaataaagacatgcaaaaaaaaaaaaacccctctagaatgtaatgtgtagcaataatatagagatagaaaaggagagaaaatttaagatacaggtagaattaatcttggaaatctaacatctgtttcataggagttccctagggaaaagtaataaggaaaaggagaatagaaaatgaatcaatagaagattgacttctcatcttcttatctgtaatactggatactttcaaaatcccaaggaaaggatgtcttgagtcgtaattatgttcctgggcacactaacactcaggagggggaaggcaaaactaaagttagtttttcacatgcaaggactcaaagctttcttccccacagaccttctctgaagcaattaaaaagtgaatttaagggcccagcacagtagctcatgcctgtaattccagcactttgggaggccaaggtgggcggattacctgaggtcaggagttcgagaccagcctggtcaacatggtgaaaccctgtctctactactaaaaatacaaaaaatagccgggcgtgctggtgcacacctgtaatcccagctactcaggaggctgaggcaggagaatcacttgagcctgggaggcggaggttgcagtgagccaagatcgtgcgcagccccagcctgggcatcaagagcaaaactcagtctcaaaaaaaaaaagtgaattaagaaggaggaaaatgtaggatatatgaaacagcaaatagaagttaaacctgtggtaggtctccattattgctgactttggtatatgtattcatgcaagaatggttggtttttgggagactgacaaatgaaaggaaggacaaaagtgccagtgcgccaaagtcctccccttgctggaggatgcaaatgctaattaattgcacctgttgtaaatgtacacctatataacaaatgcatgtaacgtttaaatatatttagtcagggaagtggtggggatcaaaagggaaataactggaagcagagaaaatagcataatataggatggcagaaataagtctagtagtcacaagcactgtaaatgaattcagtacccctagtaataacaaacactttaagatgagttttgaaagaaaatctagtcatatgaagtttcataaaacagtgacatagaaagattgaaagacagctgattgaaaaatatgtaccaggcaaatatcaacaataagcaagtagcaatattaatgccatactgaatggaattcaaggttttaaatagcgttcagaagcacacaggcatattttataaaagataaaattcactatgaagacgccatcaatttctatgtaatatcaatgtataatgtcatctctcagcttcaaagtatgaagaaaatgcgatattttctcatacctgatgaaaaactttatcacactgcttttagaagctgacgtattaagtagataatatagatagagatgcaaaggggatttggaaaacagccttgatccaaaataaatagatattaacctttgtattcaataaaaagaaaagcactttccttataaatataaatgggatatttataaaaattaacgatgacttgtgccctaaagctgtattttgccagtcatgttttctttttgttgtaaattatattctactctagctgggccccctttgaagacttgtaattttttaattggttgagacatgccccaagttactcctgtcacagaggtggtggatggcccctgggtctctgtgtttgtcttgtcattgaagaatcaggcagcctgccagtccctttcctgctgagggacctagaggaagcatctctgtttcccagtctcctcttgctcccctgtctttaggaatagagaaaattcagaccacttgatcagcattggcttagccttttggaatccagaagagagcaggcagatctaccagacgtccctgccaaccctggcccccaaaatcaacagctctctggtggccaagttcttgccagtatctgctgctttcccagccttgctttagggcagcctggtgcagttctccaggttaacttagcaaatcctcacactggaaatctcctgtccaccaagatgtccaaaattccttttaggccttaccagatacctgcctaggagaaactggagctgacaatggagatgatgggagttatgttcaagttgccatattctagcattcgccacaactcctatcagttttgccaggcaacttactaggtgtctttcatacctgcttccttcacccccagtacctctattttcataacaaagaagagtttatgaaaattaccctagccaaagggaactttttgcccattttattgcttgtatgtctttcacagtcacagtctgacatgcctgcccaccattgcaaggcggcttttattgcatgtctaaagcaggctgtcttgctaaactctttctaaaccaggaagtaaaacaaaatcggtggtgtgaacacagtgggtttctaagcatttttcttgtttccttccattatgttggaggataaattcctggcccaaagttaaaataattcctacaaatgaacaggaatttcagtatgacttatccagtgaagcactggatataaagtgagctttttgcatgcagaattgtgatgtattttataaaacctcttgagattaatgtttgaggagctaggtaaagatggaagagatactccttcagtaatataaatggaagcgtgtagtatgcagatttacaccccccttccaactcactgtaactttaaagctgtctgttagaaggatgaaatgtagttgtgagccagaccatgttggtttggacagaaattcttacagaattattaagccttaaaaaaagcaaaggagatttatgcatctgcatttgaccaatttggtttggaataagttcataatggaaaagtaataaaaccataagagacagtgtcttctgagtacagtctcgcttttaaaaaatctaaacatgcactgccctattttggatacagtgactgtagaaaaatttcccattggtaactttgggagggttttctgttgttgttgttgttcctttttcattgattatcagccagtataaattttaagctttctgtcaaatatttttctggagatgtcagtcttagggaaaagaaatcctaaagtgttatctgtaggagtctccttctcccaatttcaccccctccccgaaacctccacctcccaccccccaacacacatagtgttttttagatatcagtaaagtctttttctggtgtaactggagaggttggggtttggagagtagggggtggttgaatgtgtgagagaaagcacctcctgtgactgccagcagccacagaagaccatgaagaggaaacgcataacaagcttcacctctgaaaaatcggacctaataacttcgcaagtttttgatttcaacaggaaagaaaaagaaaagaaaaccgctttctccacttattctcaaccacttgaagtagtgttattgataaacaatttcttaaaaatatttaaagatttaggaatagaaacaaaggaaatgaaggctgagtgatttgggcaagggaaggtgtgagtctggtggggaggggtgtaggagcagacatcttgcacacaggagaggcatggttgcatttcccatagaggacagcaaaataggcattttattgaatcggatttttaactttctttccacggccagcagttcaaagcacagttatttttatatagtgagaatgtgaccagactgagatggtgttgtgtctctcctgcaggtatgcctgcagcatctttagtgacccctgctgatgttatcaagacgagattacaggtggctgcccgggctggccaaaccacttacagcggagtgatagactgctttagaaagatactgcgtgaagaaggaccaaaagctctgtggaagggagctggtggtatggaaataatgtgttcttaactaactctttggtatcaggtaaatttttaaaatatctaattatatctgtgatttctccatttttttaaagctcgtgtatttcgatcctcaccccagtttggtgtaactttgctgacttacgaattgctacagcgatggttctacattgattttggaggagtgtaagtatcatgctaaatctgctgctaaattttggctgctgctaatgctctgttgtcgtagggaaaggtacctcagtctagtctctataataaaatagaagagatttagggaaatgttgaaattgtgttaacaaggtcatttccaaggggaacatacaactgatgagaatgtatcaactcctttacattaaatatttgaacaggttttgaatgttatttttatcaagttaaaacaaacaaaaaatacagcttcttactctgttttctcttcttttagaaaacccatgggatcagagccagttcctaaatccaggatcaacctgcctgccccgaatcctgatcacgttgggggctacaaactggcagttgctacatttgcagggattgaaaacaaatttggactttacctacctctcttcaagccatcagtatctacctcaaaggctattggtggaggcccataggaagatcagccctgggatagtgctgtctttttgtgggtactgcagtaaagaacatccctcctgggaatgaagcaatgcttcatcccttttacgtccatctcttgtttaaattcaagtccaggcttttttatcatgtgaaatcattcattttctgggtgttttcttaaccagatcattgtgaaattattcataattattatttggccctctgcccagaaacctttgtttgcatctgaaaattgatgggatttggtcaacactaacatgatttggggaaaggagcaagtcagaatagaaattagtactcccctccttgaactaggattgtagtcccaaagaggctactgtaaggcaatcatggtgctcagagcagtgtttcgtgtgtgttttaaactggtaggaaactaggtgcatatttataaaaataaaaaacactgggagaaatgaaaaaatatatatcaaatatattcagcctggcttcaaattgtaagcatgcacaaattctgtctctggattatattatgaagcttttatgtgaaacatgtttctttgtaatgaaaaccacattggagatgtttagtaatcatattgttactggtaccaagactactagggaaatgcctttgtactttagggaagtacttttggcattttactgtacagacagaaaaaactgagatgtagcccctctcctggaagtgctaattttgaaaaactgctcatatgatgtacatgtactgattactgcctattttaataaacactcttgaaaaatgcatgttgccctgttgctgcctgccctattctcctcatctccccatcattggtacccacttgcttttaaaatccactttatcttgaataatgtaagacaaatatgttctgacataagtatttaattcatgttgccttgcataatggtcagaggcgcatgaatttgtgaaggtggaaataaactatttgtaaagtga

SEQ ID NO: 15810 - DNA, 201927 bp, Homo sapiens
aatgggcgggcagcatccacatgacccgcgccggcgggagggcgtggggaggcaggccaggaacgcacgctgcctggccgtatcgccgcccccaccgccgccgccgccgggactagaagtgagccgcccgggtcccaaacgccagccagccagtcagtgggtcccgcagtcgcccgcaaccggggcgaatcatggcggccgccaaggtaaccgcgggcccgaggccggggggagcgcgcctgccggatcagcctgggggtgcgagaggctcgggcgctcacgtgtctgggttggtgccacaggcggagcaaaatggggtgccgggcagccgttccaccttgcggctgctggagggagggggccactcctcccgggcagcacaggcggtcggtgcagagaccgaggcccgacctcgcagcggaaactttgtgggccggacactcccacttggccggggagggaagttggtgcctgacggggctgagccagggccgacgaggaggagcgggcgcgactggggcctggtgcaccctgggccggcaagcgctgggggtcctctctaccttcccagcgcgctcctgctcctgaccccgctggttgttgactccggcttcttccaggggccagagcccgggctgaagcctgatcctattacgtttcaagggctccgccctcccgcgggtggggaagttactttgacttccgttttggaaactgcctaggagacttggtctgcgcctttgtgaataaaaagtccagggactctccccctccccgctttcccatcattcccatcttccccctccctctctccatctgacaacacttagatacccgcctcggagcatttgagaggcttctttttgggaacgatgaaacagattgtcctgggagcctgtcactcctgtgaagttgtacttgaaaggggttctgtgtaatgtgaatcattcactaacccagaggaaaggcaactccaacacttgacctttcctctttcaccatttcttgaaacctggacaccatttcagtctctttggactgcatttcaacttctctggcagaataccatatttagtcccaatcacttgaatcatttggaatttattgcttttaatttaagttcacgaaggcagccctctaatcaagcctatacaacttcttagctcattttaagtgcagtgaacttaaatatacctaacatttcaaacatttgtccttaatcaaaactctgtgataaccctcaagaggaaaacatggccaacacatcatattcctatttattcaagcaaactaatcacatttgcaatggaaattgtaagcagacaaatatatttaaatgctgttctatgacttaagtctctccaggctccccaaatccgtaggcttcttcatgttgttagtttctgtggtctaagtggcatttctcttttctgtaattactctgagtttcatccttaggaaagtactctgggtgtgtgggctcatgtatgtttgcatatgaacacacaggtgtgcgtgtgtatatctatctataacttttcagcagtttctctgagcatcactaggattcaattttggaagctgccttaaccctttcaagcccaatagcccttgaccttttttttgcattaaatttgcatgcaaccaaggtacaaggcttggtatgaactaattccctagagtaggtgggactaggtacccattctttactgttagttttatatctgcaggtaatgtaaatacttttactttattaggagataaggtaattgaggaacataaattgagacgtgtgcatagaaatggagtataagacttgagtaatattaagtaaaataagtgacctggtgctgtggctcatgcctgtaatcccagcactttgggaggctggggcgggcgggtcagttgaggccaggagttcgagaccagcctggccaacgtggcaaaaccctgtctctactaaaaatacaaaaaagttagctaggcgtgctggtgggcacctgtaatcccagctactcaggatgctgaggcagaagaatcgcttaaactcaggaggcggagattgcagtgagccgagattgtgccattgcactccagtctgggcaacagagcaagaccctgtctcaaaaacaaataacaacaacgacaaaacataaaataagtgatatggaagttagttcaactctttggttgtacttctacataatagtagaagtgtcacatatcaagggcagttgatttttagctaagtattgagtcagggaaaatgaaatgttcatttttactacttgggagcttgtgtttttgtttatgtcttcatttgcactcacctctttctgtgatatctgatggctcacatcatatatacttattttgcaatccaataagatatataaaaatcaattccaagtagatgggaaaaacaggacaaagggaaagtaagacaaagccaggactaaggttagtggaacattatgtgcttactagaggtgattgcattttctcccagccaaagcaaagaggaaatgatcagtgaggtcatttacttgggagagaagtctccttatactgctctctgagagcagttttttttttttttttttttttgagatggagtcttgctctgttgccaggctggagtgcagtggcatgatcttgcctcactgtaacctctgccttctgggttcaagtgattctcctgcctcagcctcccaagtatctgggactacaggcacgtgccaccacacccagctaatttttgtatttttagtaggccaacatcatgttggccaggctggtcttggatctcttgacctcgtgatctgcctgccttaacctcccaaaatgcagggattacaggcatgagccaccacgcccagccgagcagtttcttttatatgctgtgagtgaacggcatttgaatctaccttgtgaccacagatatatgtctgtgggttacataaggccatttcttatcatgtccttcattataactcaatggcagtgcagtaaatgtggccttaaaaggtccctcaatgaagctgctggtctaacttattccaagaatgtcccttattgaactgcctttgggcatcacctttatcggttgattctgttggcagcctgagttaaaggctgtgctccttgctttttccctggagcatagctattccatgttgccagctgaacacagagccataggggtagggttggcattccctcttaaaagttgaggagcctggataggagaggacttcacctcaatggactgttaggaaattgggctgagactctggggactcagcaactgtgagaattccaacactcactacactcactgtgacaaattgtttgaatatttaagcagatttggtattttctggatagatgtagccacaactagcaattagttttctgatctgtttctttctttggtctttatacttatttaaatacagctaattattcatgaccttcctttaaatagttttaatggggagatggagaatctagtctttggctgctttttattttgaattttgctatgaagattactagttaatggttcaagaagtgtttgttttctttcgtgaatgaacattaatctaaaactcttagtattctgagattatctcaaaaagtgtccattctcttgctgcctacgtttgtaggaataatccttgtgggttcccttgttagatctgcctgtactgtttgcgttgtttgaatatttcttttaaacatttcccaaaactgccataaaaaaacagttttaaaaggtggtaattgagaggtcacccttttcttcgtctctgcccttttcttggttaaaggagagctttcttcttcgtcattggttaaatttatgcgttacgaatgatgtaattaacctatatgaacctactaaaagttagaatatgctcccttgagttcagacctgtgagatgttctggggtaaaactgaacacagaccaatattagcctagaaccaaaagaaggaaatttgggggcacattaaagcattaataataaagacaatttggtctgtaggactagtacactttgtattgacttttcattcttggatgagttgttgctgtgatcattgattcatttatgtgtattgtgttctttccagtgttgcaaatgggacaaaattgagaatactaaaatgaattgttagctgggcatggtggcacgcatctgtggtcccggctacttgggaggctaaggcaggaggatcacttgagcccagaaggcagaggttgcagtgagctgagatagcaccactgtactccagcttgggttacagaacgagatcctgtctcaaaaaaaaataaaataaagtaaaataaaataataaaataaaataaaatagaataaaataaataaaatgaattggactccattttgatgttcaagaaaaccaaaaccattccagggggctaagttctctgatggaaatgctcccactacaaggtttgtgggagcagtaggagaagagcccatttctgaggagatgagggaagtcttctgaaaattgctagtatttcagaaggaatggatggggaagagtaaagatccaatccagtggttggaaacaaatgaagggctgggaggtgagagcacaggctacatttagttaacagcaggtaataaaaactaaaagcagctgacacttactgagcgcttactagataccaaattcagttccaaatgtgtttcattgttgattcatttaaaattcagttccaactgtgtttcgttgttgattcatttaatgcctcagccttttgagttagttactatcatcctttttttatagatgaaggctctgagataccaagaggtgatgttagtggcctaagatctgataagtatggctgggtacggtggctcacacctataatcccagcaccttgggaggccgaggcaggtgaatcacctcaggtcaggaatttgagaccagcctggccagtctggcccatctctactaaaaataggaaacaattagccgggcatagtggtgcattcttgtaatctcagctgctcgggaggctgaggtaggggaatttgcttcaacctgggaggcggaggttgcagtgagctgacgtcgtgccattgcactccagcctgggtgacagagcaagactctgtctcaaaaaaataaaataaaataaaaaagatcggataattaggaaattatcgagctggggttcaaatcctgccagtctggctccagcagctgtggcctcactctgtccaccatgtgtgcctggtagtttagtgtggtggagaataaagtatatgggagaggtgtgggagatgacttaggagaggggtaggtgtctcagtgtaaaccagacttttatttgagaactgccttacctagtgctttttgcatgccaggtacttttccaagagccttacaaatagtaactcaattaattttcttaattctaagaagtaggtgctttctgtttttgacttcaacttacaggtgagaaaactgagttaggggaggttaagtaatttctcacgcttgtgcaacaggtaagtgctacagtcttgatttgaaccttgccaatgtgtcttcagagtctctgctcttaacctctgcgctgctctcccaggtcttaccaagagttccatttgcgaaggtgtatgtgtgagagttcacatgccatcgggtatggatgtgtatatttcctgatcatcccagtccagtagttcttatcttagaacacctttgtcactctgtatatgcttcatttcagtgtttattaagtgtatttctcatctctccaaccagatcgcaaatccctgcaggacaggaattgtcatataccttttatttaattgctttattgagatataattcaagtactatacaatttacccatttaaagcatatgatttattggttttcaatatatgcacagagttgtgtaactgtcaccactgtcatatacctttaatccagtttccattaggatttggactataatatatatatatatatttgggacagggtctcactctctcacccaggtggaagtgcagtggtgtgattattgctcactctagcctagacctcgtggatacaagagatcctcccaccgcagcctcctgaatagctaggacctcaggcacacaccaccacacccagctaattaaaattttttttttttttgtagagacgggggtcttgctatgtcgcccaggctttgggctgtatatttaacctccatgtcttccacattgttcacccatcataaaaccctcttcagaggtttgtcattgaggataaaatatattgaggttattaaagatattcttcaaatggcagggttttttctcccctatgtaaaaactctactaagtatttggtgatatcataataaaacaaatcagtttttgtgctaggaatggaggaaagaaggtttgagttgtttttatgctaccatgatgatgattattaaaacaaatatctatggctccactgtttgggttttaggggttcttatcttgttggagctggatggccttggaatttatgttaacacaatgatctttactctttccttcctcagtcctgtccccttttaccaggagagtcctagaaatggagtcccagaaacatttgttattggtccaaattcccatgaatgcctttgcttttggcactgctctaggccagtgattccctacatactgaagtcttctggactggtataaaaaactgctgatgcctgggtctccctccagagatcatgattgaattggacttgggtgtggcctgagcctcaggatttttgaaagcttgacaaccactgttattttggtgcacattgcttcaagagacctgctggctccttcttggagtaagaatggaatgcagtgagattaagttaaagtccctggtgtgtcagttcaaaggaggggtatgtaggggtttctccaaatttctcttctttcttgacagctttgtcttagtcctgcctggtgtctccagggtgcttaggcatcaagtttatacagttttgtgataatcctggaatagaggttttaatcccaaacttgactgaaagctccatttgtctcctgcagagtctcagtggttttttgtgatcagagaaggtgctggaggagggaagcattacaaagagcaaacctggtctcagagccctctcctgggctaacctcatccagggccatgtggtgccagtgttccctggcttaggtcatatggcttcacagcaaatagagggttggaaaggtgtggggagagttgaaaggtgatatgtagcgtaaaaaagtcagggagcaggtcttttttggatattgagttcttttagaagattgtccgaggagctctgactcctctgtgctttggtctcttagacctttagtcccatgaccagtctctgcttttgatgaattcttagagggaaccattcctccctttgttctccactatgtgtgaggattatctattatggcattcctgctgagcgcttcctcctctctggttggcatttgctgcctcataaacacctacagatttcctcataagactctgtgggtttgccttagggtggaccttgcaacagaggaatgtgtgacgctgagacatgtgttggttctgcttggaggtaaggagggggatatgcctttgtgtagtgatacaattcctttagcaaagtatttaacagctactgagcaaactctattttcatggcctgtttaaccagacagaccctctaattgggtgaaatgaactaaattaaatgtccttctcctaaaagtcaccagtaacctcagttctaaacctgttggcttgtcctcatttctggcctcacatgaccctgtgtcctaccctttctttctcgccatctgctttcatgatgtcccctctcattattggcctctagcatctcatattacccctttattctcctttgcaggcttcttcttcttcttccttcttcttcgtccttcatcctttctcctccttccttcctccttcttcctcctccttctccttccttcttctttcttctttcgtcttctttcttcccagcaaagatatatttttattttagtgtttagcagcatgacatatgcatatagaatgatagtacactttaccctaatcttcaaaacagaatgtactagtttaccaatgaggaattttggccaaaaatgtagtgtttttcccttccctgtacaggtcaggtatatgtaggtccagcactaatgctgcaccttttgagaagcattactttagcaaaaatctagaaatctttcactttttctgaatctaacaaagggtcttactttctttttttttaaatgtacattttaaaaaataatttcaacttttattttagattccggaggtacatgtacagatttgttacctggatatattgcatgatgctgaggcttggggtacagttgaccccatcacccaggtactgagcatagtacccaataattagtttttcaacccttgttcccctccctcctccctctagtagtccccagtgtctattgttgccatctttatgtccatgagtacccattgtttagctcccacttataagtgagaacatgtgatatttggttttctgttcctgcattaattcacttaggatcatagcctccagctgcatccatgttgttgcaaaggacatgattttgttctttttatatctgcaaggtattccacggtggatatataccacattttctttatgcaattcaccattgatgggcacctaggttggtttcctgtctttgctactgtgaatagtgctgtgccttgtgggcttctcttcattctgcctggacacctggaaggttagtgtcccccaaggctgtgcctgagattgtctcctccctccagttcctgccgcactacctgcccccttaatgggtattggctccttaacactcctcagcctgggtggctgtctcaagctctagccctgcacttttagctgtttagtttgagctggaagactcaacttgtctgtctcaaagatatttcaaactctgctgacctagaactcaccagttcttataactgaatccatctttttggtcattcctgacttcatcctgcagcttcactttcctgataaagtttctagttagttcaattaagtacctgttatgggcagataggagagacaccatcagcctgaattggatgtggcaaaagaggtggatcagtgaaacccttctacggccatggagcatgtatgtcctatcttctctgttcaaattcagggcctctttattttgtagctgtaccattgctgtagctcccactgatccccttgcttttgatctcatccctacaccttcctctccattctgtccagactgccaaaggacttttctaagattggctcttgttgccatgataatagcactaccgtgttcatgggtacagtacttagcagctttaaaaagtgcattcaagggcataagtgacgacgactgtttgtcagtgcctacactgtgctgggattccaaaaacaggtaagctactagatttgttttcaagaagctcaaagtcttcagggattaatataaccagataatataaagacccaagcttcattatttgatctttataatcatctacaaggtagcagggaacgtgttgataacctcatttgtcagataaagaaacctaaggctcaaaaaggttatgcaaataataataataatattagcatatgtttatataacacttgtaaaagccggacactgttccaagcactttatatctactaatgcaatcttcataacaatcctatgacatgtaagtgctctcaccttcataatatacatcgagaaactcatttgtacagagtagttaagttctttgaggtacagagagattacataacttgcccaagatcacatggcttgtaaataggagagctatgatttcaacacaggcagcctggctccagagcccaagcacataaccagtgtgctgcattgccctctttaatttatcttgctatgcagtgtggcttctgttgcctgcagaataaaatttaaactctttagccagctaaaatctccttggtcttggctgcattttcaatacttttaatttagtactttcccagtattaccccagactcattcgattttcatattcttcacagcagtttgtgaacgggacataacaacctctgttcatatttcttgccataaagctatggcaacagggtagcaggataaaagagagcctgtttatttgtttgtttaacatagaggtcagtcagagacagaaatgtttctttttttttagcctttgtcagaaagaaatacttcttttcatttctctgtattggtgggcagatatatatatatttgtctgagttcttctcttcagttttcagaaggggttgtggttctattttcccatttcttgaagtccctgtaggaatgctaaaacccatgtcctaagattacagtttttatagttggtttgttctaatcaatattcagatatagtccacacatggctggttgatacgtcttttaaatcttgttaatctataggttttcctgccccctttttggttgtttccttgcagtttatttgatgagggaattgggtcgtctttcctgtaatttcccacaatttggactttgctgattacgtctttgtggtgttgcttggcctcagtatttcctgcaagtgacagtttaatctaaaagcttgatcaagttagagtcttttttggttttggctagaatacttcctagatggtgcttagagcttcccatcacattgctgggtacttggtactgggtactcacatgaggaagcacctaattcttggttgtttcttgtgatgttacgttttggtcagtggtttcagatgttgttatcttaagtccaccagctttttgcataatggttttaattagctaactttaaatattaacatttgcccttcctggtacattgagttaaaagtgattttcattatttaaatacacactcttgtgtgtatgtatgcatattatgtatgtatgtatgtctatatatgagtatatatcattgttataaaaaataatggcaattaaaattcaattggatattaatgggtttagagtttatgtttgggatgatgaaatgggtaatggtgatgtagaacattgtgaatgtacttaatgccactgaattgtatacttaaaaatggttacaatggtaaactttatggtatgtatattttaccacaatgaagacaaatcaattggaaagggattgtaacacatggaattaaaaaaatccaacacaacataatgagtgataattattgctccctaaaaggagccaaagtgagttggagaatagactgataaagtttctttactgaagaatgctagctaataaaggtagaagctatgctagaattagaaaaaggaaaaaaaattgactttgccacctgcaagtaataattgattcaggcatggatcatcattggatgctgaagcctttcagtaaaagactgttggaattcccattgtctgaatgcatctcctagtaaattacttgctgtttacagaggggaaaaagtacctttacaatggagaaatctgcttcaaccaagtgatcatcagcaaatgggataaactagcattatgttaccgactgatattatgcattgggaagtatacaacatgaacctaaaaatgttcttgccaaaaatatttaatctggatctaatcgtgaggaaacaatcagacaaatccagaaagtaggacatgctgcaagacctctggcttgacttcaaaaatgtcagtgttatgaatgaagaaggctggaataaaggaaactcccaaagagacctgatgaccaaatacaatgcttgagcctgggttaaaaacaaataaagaaaagaatcgaaacagctggaatatggggaccatattaaaagatattgtattagtttgctagggctgccataacaaagtactagagactggatggcttaaacagcagaaatttattttttcacagttctggaagttaaaagtctgagatggagaccccagcaagtttggtttctcctgaggccttctctccttggcttgtagatgggtgtcttcatgtggttccttctctgtctgtatcctaatttcctcttcgtataaggacaccagtcttattggattagggtccccttcatcatctcattttaacttaataaccttttcaaagaccctatcttcatatatggccagtcatcttccgaggggctgggattggaacttcaacatatgaattaggtgtgggggacacagttcagcccataacagttattgaatcatttaaaaatggcttgggtgagataatgatgtcaaggttctgaagggaagtgatctttgctgctgatttattttgtttcctcctagattttgaactcttgaggacaaggaccttctctggacacagatatgcctcagagtaactgttgcatagcattcagacactgctggttgaattgtccatttacttggcatgccaacacatggcaaagtaaagggggaaggagattttctgctgcatgtatgtggtttgttgtaaacctttttctaataatccatttgctcaatcctctccatcccccaacaaagtaatatgatgagaatttggaaatacttgaggagttgtgcatgggtaatcgccaggtgagcacatcatggagaatcagaaattcagaacagaccttggcaggggttgtgctgtcccaaggtagatgaatctctatgactacagaaaggctgcttcaaaaggaggcacctagagaaactctcccttgtgattaaaaaagcccaggtacattagagggcaaaattcccagcaggtccaaacaatgtgttccattgctgctgtttcagccctgctagtctcagtagtaccctgggtcatcagatggcttgaaggacaagagggtgatatcctgtctcttctttgactttgttgtgctcactggcaaggagtttcattcacttctgagaattcacacactcattttattgcaggctgatgttgattctgagtttgaggatgccaacatcttttcattgcctcccagctcagttccagaagtgaaagctcagtcctagattctttttttatggtggttcatgaagatttcagttaatccatttgtggtgtccaacagcaacttgagaagagcctggtcttgacctttgcccaattttctattggtttatttgccttttcacattgatttgttctaagagcgcttgtaaatgaagaacattgcccctttgtcctatctattgcaaattttgttgttgtttttcttctcagttgttgtttaactgatttatattcactttttaaattgttatgtcaaatatttatcatttttttctttatggcttctggattatatggcttctgagtttgtcatgtttgaaatcagcttccctacttaacattacataagaaaccacctgtgcgtttttctagtactttttgaaattctctctctctccttttaaagattaactctgatccagctgtagttcttttggtataagatgaaaggtagggagccagtttaatttttgttgctcaaccccaggagttcgtgacccttcactagtgccacatcatcagctagagagacctgctgctaattcagcctgaatctgctggttcagccttcagaggaaatctgattagttcagaaagccaagatcacctccccacaggggtcaggtatctgctgctgcctcaatcagctaggctgctctgaatatgaagagtaactgggaagcaaggcgctgctagattgtctcaagttgtgctgttttcattcaattgttattctctattctcttacttttagcagatgagaaaacaagaggtcatgctgctggttaacagtggagtcagattttttttttttttttttttggagatggagtttcgctcttgttgcccaggctagagtgcagtggcacgatcttggctcactgcaacctcttgaaccctggttcaagtgattctcctacctcagcctcccgaatagccgggattacaggcatgtgccaccgtgcccggctaaatttttgtatttttagtagagactgagtttctccgtggtggtcaggctggtcttgaactcctgacctcaggtgatccacccacctcagcctcccaaagtgctgggattacaggcgtgagccactgcgcccggccgcagtggagtcagatttaaatgttccattgcaaagctcatgaaataggaaacattctatgaggggaatctggttggagaatcctggaggaagaggcatttgacttagtccttgaaagaacagcatcattttttaaacttctcattatggaaatttcccaaaaagtgcaaaactggaatagtataattaaccctcatctccctatctagccagtagtaatcatcaatttatgtcctcaatattgtttcatttatgccatgccctctttcctccttccatccctacttttttttttttaattaaatttttgtttttggagacaggatgttgctctgtcacccaggctggcgtgcagtggcgcgattatggctcactgcggtctcaaccaacagtcctcccacctcagcctcctgagtagttgggactacaggcacatgccaccatgcctggctaattcatccccatatgtttttcaaagcaaactcagccatcctatctgtaaatattttatgtatctctaaacaagatttcttcaaagcacaatcacaatatcattattatactttaaaaaattataataattcttcaatatcttcaaataggtgttctgtacacattgtacacatttcccgtattgtcttaaaattttttaaatagttgttgaattgtgatgtatataaggttcatgcattacaactgatgtgtcttaattttctttatttttttttttaaattacaaagctacctttatacttttaagccccacaggaataaaaaacactgggaagggctaaccccctcaccccaggagtggcccatagggagagaggctacctgaggggaaggaagtacaaaagggacccaccgcagactcatggcaaagggaagccatcggtgctgggacctgtggtcactacaggaggaaatgcgagtgtggtgggactggctccaggcacacaagtgaagggcaagagagattggagtgaagccacaaagctacttgggttcctccttcttctcgtttgcctttttctgcttctgctgcatgatctcctgagtccctgggggtagagatgatagggcactaggaggtatcagagggcaaaaagaacaaaatgcagagggatgaagggcacaaaagagaagatggaagtggatgggactaagctcaccgtttggctgctgtactcccatcctaggagaagaagaggaagagagctgaggctcaaaaggcaatcagtctccatcctgcagttgcccaagaggtcagaagtctggccacataggcccaaggctctctaccgtttggctgctgtactcccatcgtaggagaacaagaggaagagagctgaggctcaaaaggcaagcagtctccatcctgcagttgcccaagaggtcagaagtctggccacacaggcccaaggctctctattcttacaccagtaagaaggttgggagaagggaggagaaccgggaacagcaaggagggccagaagcactgggctgtcataaccacaggtgtatctgaaatgggaagctccctgcccttgccctgaaggtcagactgggggatgctcagaaatcagactcttgtgtcctaattttcttttgatctctggattctcttgcctgctcaatactgtgctttcttttcctctgaaggacagtgtcacataatggctgaaatcatagatttgcaatcaaattagggctctgccacttgctaactgtgtgacttggggaagttactcaacctctctgtgcctcagtttcctcatctgtaaaatggacataacggtgtctactcctcagggctgttgagagtgtcagtaagctaatgtttgcaaagcattagagtcatgtcaaaagctgtgggctgtggaatagggcccaggagggctcactcaagtgagatggtgtgtcgtctttgagatgagcctccagctgtgcagagagcccctttccttttcctttttgcttccttctggttcttgacgtgcttcagttagatgaggttgatagcaggaatttggacaggtaaggcatatttaatggaagcaacttctttattgtcctttcatttttggcttcctcttcctctgtatttattaaattagcttttctctctcagaagtgtttaactttttatggcattatctgggcttcagcaacttgtgatctcctaagtagagcttttcagcactttataaatacgtcatatactttttatattcctttgttccccatcaggaacatagccccagtcttcagaatagcacaatcagtttttattcatttaaggagcagtagtaatttgacacttgctaatatgtaacaaattatattgggcgtggtaattacaattgcagctggttcctaattatactgtaaccttgatgcttacaaaaattgagactgaattcagcataaaatactggagaataatattctgcactaggcatttctgccttctactgagccatgggcatttatgaatcataatgccaaattaaaaagaatttattttaaattggttacaattacaatgttgtccagtgtctccattcttaaaggtagctttaaagtccccctttttgcttgctaaactctgggaatatccttcaggtattataattagtgtctaaataacctgagctcaggggtcatttctggctgtgtgatctactggtattcatttaagactctttagtacctcagcttctttatttgaaaagtggggatattactcactcttccccttaaagagttttaatgatacagtatataaatgaaataagataaaaagccattagcataatgcctggcatagagttaaggacccagtaaaagttagctggtcattgttatcgttataattaataataagtgatccggctccaaagactgcctctgtgaccctcaactttagcagaattagtgtattaattctcctgccactctgccttatgatagcatgtatcatcatacattttgtaccaaccacttgtcgataagtcagctttccctgcttggggcagggtttctgatttattgggtgttttctcctcggtgcctggcgctgggcctagtacactgcagctttcccataggtgattgtgttgcatggatgagcaagtagagcatcaccatctaaggagtggttgttagctggggggtggggtagtttggcccccaagaggatttcttttagcaacctctggagacagtttcttggttgttgcagcttgttggggaaggggttgctactcccatctagcaggtagaggtcagcttaataacaataatagtaaaatccagaactagtatgtttcaggctcttttggcataacagaacccagctaaaacaccaccattcattcttaactgttatactctgcctcttaatatcagaattttaatgatgatggctttctagtttatgttctacaacagagcagagtgaaatctaacatacatcacaacctactgaatccttctgataaacatctctagtgcctctgaaatgactcgctgatgtaattacccagtgggttaacatttgtggtgtctgatactttataagtcaactgttgagtgaaatgaagttttgccagctgattacatagaaatgttgtggtttgaagaatgcttaacagggcatcttgtctttgtactaatttatatttcagtaacttttcccataatgactgctcttcatttattaggtcgtagggaaactgtaggatgaaggatgagtgactcagtggtttcaataaaaaattattttcttaagtttgagatacctttttcttcttctcaagttaatggtaactgtggttttagggaattccaaactttcttttgcaattactgattgtatcagtcagggctcactcgcagagaacagaatctactctagctggtttaagcagagagagatttattacaggatattaaatggcttacacaatttgttgggaaggtaaagaaacagacttgaggttgagctctaaagaatgacgtctagagtctcaagcagagcaggccaccaagacagcagtgacctcctgtgcagtcacaatgctgcctgccaagtggagagtgtttcaggaccatgtggccactgacatgggagggcaggaggttgccacaggaaaactagacacttccagcaatggtgcgtgcttggcagaaacagcagaaggtgccccccaactcccaaacatttgccaaatctcactcaatttcatctaattgatggcacataggccgcatagcagcaagggagtctgggaattgtagtttcagccttctagtgtctttagtataggaagataaagaaggagggtgggcccctgcttctaagtggttaggttacacccaagaatacttttctttgggattcagggccatctactgcactatttcctcaggttcaaaagactatgcaggactgtttctccttctctctccgtttcctgcttgtcactgcatgcttatttacacccacccacccacacacacacccagaagcttgcttttgatgagctacctctttgagtttgtagttcttatctaaggcaaatatttactttatgatagtagaattttcagtgtaagtctgtgcttgtcttggctttcagatgtttcaggtttgggagggtgactggggaagtattgctgaggaagggctgtgctgtacagttggtgacgtagcagctgaggttgggcctcgggtcctaacgcagttgttctcagtccacccacacatggtaatttcttgagggagctctaaagatatccattctagaaattttcatttgattgacctttggtatggtttgggttttgtaaaacctaaaagcacctcaggggacttgaatatgcagcgaggactgagaacctacatcttataatccgtacattaaaattggacattatctaaagctgtggttcttaaactttaactgcatcagggtcacctggagggcttgttaaatcataggggattgctgggcctcacccagtttctgattctttgggtctgggatgggtgtgataatttgtatttttaaaagttcccaggtgatgctgatggtctccacactttgagaaccattggtctgaagagagttgcctattttcattgtaaatgtcagatttttactgacctgaaagactttattctatattcagcacttccagagaatctactttgtttcctgatctttgccagagttggggttgatctgaggagtaaggtgccctcacagagatggtggtctcacatctctacagcctcccagtgaaagaggagagctttgcttttctttgcattttatttttcaaattagcatttcttattttcgtgtaggttttcttatattcttccccaccatcctctcttagatctgacaactattttgaatacaccattctataccactgtgatttgttaaagtaatgagcctgcaactgtggcttgattcccttgtaagaaagtctgtttaaaaaatattcctacaggtaggaattttctggtgaccccctacctatggctgctctaactcatattaggagagtgaattcatttgtcctgaaagatgacttttgtattcttcttgccatgttctcccctaccccctgcctttttaaaaacaccagttcttgaaattgtgttattgtttttctttttatttctaggatgtacctacctagtatgtgttttgcaaacgctattgatgacttacacaattataaccagtgtttatcttgtcaaaaagttttacatattcagtgattctcaaattttgctcctgtggagcatagactcattgaatcgacctgaaatttccatactaaatttaaataatgatagacttttcccagtttatggaagaaactatgcatagagtttttctgttccaacattgccactttctgggccaggcatggtggctcatgcttgtaaacccagcactttgggaggccaagatggaaggatcacttgaggccaggagtttgagactagcttgagcaacatagtgagactgtctctacaaaaaaattaaaaaattagtggggcctggtgacacatgcatttagcctcagctactcaggaggctgaggtgggaggattgcttgagcccaggagtgtgaggctgcagtaagccatgatcgcaccactgcactccagcctgagtgacacaatgagacccccaactaaaaaaaaaaaaaacaaaacaccaaaaccctctctttttcccttaaatttggaatcagagtaaaatgttatcaaatttcaacaaaattctttatcttgttagcaaataatatttcatagtaatctgtaaaggacccctttcttcttagtgaattactctgtatgtttgaaaaccagttacttgatttaaaattcttgatataaaatttttgttttaatgttggaatccattcttacaaatgcaaattcagaagaagaatcataaagaaaatcaggcagttataacaatagtagctgtaaatatttgcatgctattaatatatgagaaaaaaatgtaacagtgaaagtaagccttctggaaacaatctaaagtttgatgactcttctaaaccccaagaatgaacgaagtctaataattccaggcttctaaagcccaagaatgaactaagtctaataatcccaagcttatgtgatgcaaagtatgcatgctggacagctgttctgaattgactttaaaagggtggctacatttctgtggcttcctttttccagctcatagaacttcctgggtattggttttgccaccaggtagaattcattgaaatacacctttaaaaaactggtacatctcatggtaactttgcattgtcttcaattaagttgtgtaagtgttcttcattcatagcaaatgacacttaaaacaagaagataggaatgggaggtagcagtataaatggaaattccgaacagccacacagcatttgactggtgaataatagatggaattactatagagatgaggcccaggaggctggtagtaatttttctgaatccatcccctgttgaaccatacttatctatccttaaatagaatgtaccaggacctgagccaaattttagtgggcctcagagaaatcttgtggtgatcattaaccatttgctgtacctggaactctgggttgggggtagggtagctgagacaattatcagttaggatggccacaatgtttatttagtggtttggtgagtgtgtttgaagacccatgagtttctcttctcttttgctaatttatcccttctaaattatgagccagtttacccatcatttagatttcttaaggagtaaacatggtagaacataaacatctttggataaataatacaaatagtaatagataccatttattgagcactttaactgtgtggcccttttggtgctaagcactttgtgtaattatctcatattacttttctagctgtctaggactccccattttataaatgaggaaagtgaggctgagaggtcagggcctccaagtcacatggccagtgagtttatgaggttggtcctgctccctatttgaggatgatctgacactaaggccatgttctttttttttaatgaagatggggtgtcactatgttgcccaggctaatctcaaactccagggctcaagtgatcctcccaccttggcctcccaaagtgctgggattataggtatgagccaccattcctgtaagatcatgtccttaatcacagcattggacagacactacacactgttaggagaaattgggagagttttgatttttaggcttgtactatattgcagttatgtaccacataaggatgttttcatcaatgaaggactgcatatatgatggtggctccataaattatagtggagctgccctgtacaggtgttccactttttatcttttaaaaccatatttttaccacaccttttctatgtttagatacttgttttacagttgcctacagtaatcagtataggaacatgctgtatagatttgtagcctaggagcaataggctatctcatttgcctaggtatgtagtaggctacaccatctaggtttgtataagtacactatatgatgttcacacaatgatgaaatcacttaacaatgcatttttcagaatgttatcctgttgttaagtgatgcatgactgtattatattgccagctaatgcaagttatcaacactttgaagctgcctgtaatgtgggtctgtaggaaggccactacggtaagagatggaatatttgggatctgatctcagctcagaaaacatttagaaatgtcagcacagattggcacttaatctgactttttgggggaaataattgatgctttctgagctttggtttcctcttctgtaaaattagggcagtaatatccatcttatctgactgatttgcagtgagaatccaacgagataatagtcttgcttagaaaactgtaaatgttaggcaacatgccttataagtgttgggtcattctctgtctttgttttgatttgtgttctctgccctagaccctgagaaggttacaaagtgaacactttttttccccctttgaggtgtagttctgatggggagcactgaatatacatttcaggatccttaagcagaaatgtgctatgaaaattgagggcaggggaggttcactctgaaatagcattgcccaggcaagaccttacaaagttcatggcataaagaattaattctattttagaattacgaagaatacttcattttgtggaaaatttattttgcttttaagaggaaaacagttaagaacttagggtaccatatgcttttgaaaaaagtgttatgtacttccatgagatgtgggactcttaccatcaaggaggagatttttctgctcttaaagtggaggatgggggcattttatgctgtcccatcttctcttgtgttcgtcctaccctacctttctcagaatagagacctgagaggagggagtcctctctgaagcttttagggcagcagagtcattcatcttaggttaactagcagtacattttcttctcctctattgaacagcagagaacacttactaattcaggatttttaaaaagattaaaaattcatggctgggcacagtggctcatgcctgtaatcccagcgttttgggagtctgaggcgggcagatcacctaaggtcacgagttggagaccagcctggccaacatggtaaaaccccatctgtactaaaaataaaaaattagccgggcatggtggtgcatgcctataatcccaactacttgggaggctgaggcaggagaatcgtttgaacctgggaggctgaggttgcagtgagctaagactgcatcattgcactccagcctgggcaacaagagtgaaactccatctcaaagaaaaaaaaaaaagtattacaaattcttatgaatagccttggtggttacaagcactcagctgaaatgaagagttatcagtcttgctttgggaaacaaggtgaccaaccatctggtttcagaaagactactcccattctagtgattagttaataaaattattcctgacagtggagagcctaggagctcaggcagttccatatttagagacagagaactcattgtccaaagatctcagaacagccttcactagctcacagaagggatttaggacaatttgcataagtttccctgtggatagcaacatgggtccagtgttgggtggttccaggaacctctccttggcttcatcatggggtggctctgtgcttggtgggaacccagtctcatgatgttttttgctaggaggattgggtgttgggacattgaataaacccactgtttggttccacataagggctcttttgtgttggcctgaggaagccatgttgaagtttgtcttgcttttccccagcaatgtttttggactttgtggcctgcagaattaagcacaacacccattctgagctaatctgtcaatttttgctcttcaaagataaccacagccacttgtatttctaaaatatgtagaataatatcatacctttggagacctatgatttattaattaaaaactgaggagaggaggagaggttctttggcatgcccaggtagtgaggtatacatgcctgttcatggtgaaactgtgagaagtaactcccttgagttaatatgatttccctagttcactgacttctttaagaaatatgttctcttggctgggcacgatggctcacgcctgtaatcttagcactttgggaggctgaggcgggcagatcacttgaggtcaggagtttgagaccagcctggccaacatggtgaaaccctatctctactaaaaatacataaattagctgggagtggtagtacgcgcctgcaatcccagctactcaggaggctgaggcaggagaatcgcttgaacctgggaggcagaggttgcagtgagccgagattgcaccactacactccagcctgggcaacagagagagactgtctcagaaaaaaaaaaaagaaatatgttctcttgcatagttgacaaacatttgtttacttaaattctcctgtgaaagggcatggtttacactggattataagtaaaaaatgacaggtgtttgcaatgtttcaccttttctttttaagaaatgatatacattcaacattagatattaagagattttgctactggttccttgcataaaattttatcattttagaagctgcataaggagtctaatttaaaatgggaagggggcatagtttatgcactggggcaacatggtatttaagtacaaaaatgaaatgcactaatttttaatctgagatttattttcctttagtcggctagcttgatttctcagctttgttgtaataacataaacatttttatgtttatttataggtggctttaaccaagagagcagatccagctgagcttagaacaatatttttgaaggtcagtataaaggaatctattttgtttcttgtttgatttgtgttctataacttttaaatattattttcaaacagctctttatttcgttgttatattttgaaaaagtcccaaagtgtcagcccggcacggtggctcatgcctgtaatcccagcactttgggaggctgaggtgggtggatcccctgaggtcaggagtttgagaccagcctggccaacatggtgaaaccccatctttactgaaagtaccaaaactagccaggtgtggtggcacgtgcctgtaatcctggctattcaggaggctgaggtgggagaatcgcttgaacctgggaggcggaggttgcagtgagctgagatcgtgccactgcactccagcctgggcgacagagcaagactgtctcaagaaaaaaaaaaaaaaagaaaatcccaacatgtcttaagaggggagagccttacaaatacgtctgctttttaaaatgtaggtgactgtgatgacaacatggcttatattttaatttcttttatctcatgtggtgtaaggtatgtgaataaaagcggttgctggagtattcagttttgcaacccatttacctttccaggattgacccgtatagctttttctcctaggaagtttaaagctcattgtaaacatctcagtaatccttcactcatccatgggactatactgtctctccctggtagaagcctattgttgtggtcatcatcattatcatcactttatgatgactgcggtatcctgagaggaggctccagtatggataatactagatactagagcacaacagacaccatggaagtttgtgtcttatactggcatcttatatttccacctattttgtgatagtgggcagtgaatgattaatagaataaaagtctgtctcaggttccagacaccgaaacacctttatgttattcagctgaaattaaagtactcagaaaagaaaaggccacttttgtaagataatatacacacatataatatatatgtatatatacacacacatatatgatatattattaataacatatattaatatacacatattttatatatatatgtttttctaaacattatgaaaaggcagctgagttgtatggaaagaggaccagggtgtcaaatgagaaatttgatgtgtactgaatatggtgtagaaaggtattaaatctatgaacctctctttcctcatcacaatgtgttactattaaaactaattgagacatcaaggactttgaacatggacaggatatttgatattaaggagttggtattaatcgatgtttaggctgataatattctcattatgggaaatatagagtctatgttttagagatatacactgaaacatttttacagatgagactaccgtttctgagatttgcttttaaataatccagttttgttgagttgaggaaaatgagtaggcagtatgatgataacttttgaaattgggaaatggaatattgggtttattacactgttctctctactttgtatatgtttgaaaaattttcttttcttttcttgttttctgagacagagtttcactcttgttgcccaggctggagtgcaatggcgctttctcagctcactgcaacctccacctcccgggttcaggtgattttcaggctcctgggtagctgggattacaggcatgtgccaccacacccggctaattttgtgtttttagtagagacggggtttcaccatgttgatcaggctggttttgaactcctgacctcaggtgatctgcacgccttggcctcccaaagtgctgggattacaggtgtgagccaccacacctggtctgaacatgttcataataaaacatttttttaaattgtaacgattcagtgaggtaacttatatgaaaggtgtcctgcatctgatatgtgttatgtattgattcagtaaatgcttgaaattaagtaatgatttaagtaaaggagaaataaagactccaaaagcaaatgaattaaaagcagggatagttttgtggggaggaaaaaaaaggacacatttgtaaggagatttagattatacataaaaaatcaggattctggacacctgtaatcccagtgagaggctgaggcaggaggatggcttgagcctaggaatttgaggcttcagtgagctatgaatgtgccaccacattccagcctggatgacagagtgagaccctgtctcttaaaaacaaagcaatgttctttataaatttgtttttagcccagaaatacagtgtagagtttcttttttttctttttttttttttctgagacagagtctcactgtgtctcccaggctggagtgcaggttgcgcatgtcagctcactgcaacctctgtctcccgggttcatgtgattctcatgcctcagcctcccgagtagctgggattataggcatgtaccaccacgcctagttaatttttgtattgttgttattattatttttttattatactttaagttctagggtacatgggcacaacgtgcaggtttgttacatatgtatacatgagccatgttgatgtgctgcacccattaacttgtcatttacattaagtatatctcctaatgctatccctccctcctccccccaccccacaacaggccccagtgtgtgatgttccccttcctgtgtccaagtgttctcattgttcaattcccacctatgagtgagaacatgtggtgtttgtttttttgttcttgcgatagtttgctgagaatgatggtttccagcttcatccatgtccctgcaaaggatatgaactcatcattttttatggctgcatagtattccatggtgtatatgtgccacattttcttaatccagtctatcattgatggacatttgggttggttccaagtctttgctattgtgaatagtgccgcaataaacatacgtgtgcatgtgcctttacagcagcgtgatttataatcctttgggtatatacccagtaatgggattgctgggtcaaatggtatttctagttctagatccttgaggaattgccacactgtcttccacaatggttgaactagtttacagtcccaccaacagtgtaaaagtgttcctatttctccacatcctctccagctcctgttgtttcctgactttttaatgatcgtcattctaactggtgtgagatggtatctcactgtggttttgatttgcatttctctgatggccagtgatgatgagcattttctcatgtgtcttttggctgcataaatgtcttcttttgagaagtgtctgttcacatccttcacccactttttgatggggttgtttgtttttttcttgtgagtttggctgagttctttgtagattctggatattagccctttgtcagatgagtagattgaaaaaattttctcccattctgtaggttgcctgttcactctgatggttgtttcttttgctgtgcagaggctctttagtttgattagatcccatttgtcaattttggcttttgttgccattgcttttggtgttttagacatgaggtccttgcccatgcctgtgtcctgaatggtattgcctaggttttcttctagggtttttatggttttaggtctaacatgtaagtctttaatccatcttgaattaatttttgtataaggtgtaaggaagggatccagtttcaactttctacatatggctagccagttttcccagtaccatttgttaaatagggaatccttccccatttcttgtttttgtcaggtttgtgaaagatcagatggttgtagatgtgtggtattatttctgaggcctctgttctgttccattggtctatgtctctgttttggtaccagtaccgtgctgttttggttactgtagctttgtagtatagtttgaagtcaggtaacgtgacgcctctggctttgttcttttggcttaggattgacttggcaatgcaggctcttttttggttccatatgaactttaaagtagttttttccaattctgtgaagaaagtcattggtagcttgatggggatggaattgaatctgtaaattaccttgggaagtatggccattttcatgatattgattcttcctatccatgagcatggaatgttcttccatttgtttgtatcctcttttatttcattgagcagtgatttgcagttctccttgaagaggtccttcacatcccttgtaagttagattcctaggtattttattttctttgaagcaattgtgaatgggagttcactcatgatttggctctctgtttgtctgttattggtgtataagaatgcttgtgatttttgcacattgattttgtatcctgagactttgctgaagttgcttatcagctgaaggagattttgggctgagacgatggggttttctaaatatacaatcatgtcatctgcaaacaggacaatttgacttcctcttttcctaattgaataccctttatttctttctcctgcctgattgccctggccaggacttccaacactatgttaaataggagtggtgagagacggcatccttgtcttgtgccagttttcaaagggaatgcttccagtttttgcccatttagtatgatattggctgtgggtttgtcatagatagctcttattattttgagatacgtcccatctttacctaatttattgagagtttttagaatgaagtgctgttgaagtttatcaaaggccttttctgcatctattgagataataatgtggtttttgtctttggttctgtttatatgctggattacttttattgatttgcgtatgttgaaccagccttgcaccccagggatgaagcccactttatcatggtggataagcattttgatgtgctgctgaatttggtttgccagtattttattgaggatttttgcatcgatgttcatcagggatattggtctaaaatgctctttttttgttgtgtctctgccaggctttggtatcaggatgatggctggcctcataaaatgagttagggaggattccctctttttctattgattggaatagtttcagaaagaatggtagcagctcctccttgtacctctggtagaattcggctgtgaatctgtctggtcctggactttttttggttggtaggctattaattattgcctcaatttcagatcctgttattggtctattcagggattcaacttcttcctggtttagtcttgggagggtgtatgtgtcgacgaatttatccatttcttctagattttctagtttatttgcgtagaggtgtttatagtattctctgatggtagtttttatttctgtgggatcggtggagatatcccctttctcattttttattgcgtctatttaattcttctctcttttcttctttattagtcttgctagcagtctatcaattttgttgatctttcaaaaaaccagctcctggattcattaatttttggaagggttttttgtgtctccatctccttcagttctgctctgatcttagttatttcttgccttctgctagcttttcaatgtgtttgctcttgcttctctagttcttttaattgtgatgttagggtgtcaattttagatgtttcctgcttctcttgtgggcatttagtgctatagatttctctctacacactgctttaaatgtgtcccagagattctggtatgttgtgtctttgttctcattggtttcaaagaacgtctttatttccgacttcatttcgttatgtacccagtagtcattcaggagcaggttgttcagtttccatgtagttgagtggttttgagtgagtttcttaatcctgagttctagtttgattgcactgtggtctgagagacagtttgttatagtttctgttcttttacatttgctgaagagggctttacttccaactatgtggtcaattttggaataagtgccatgtggtgctgagaagaatgtatattctgttgatttggggtagagagttctgtagatgtctgttaggtctgcttggtgcagagctgagttcaattcctggatatccttgttaactttctgtctcgttgatctgtctaatgttgacagtggggtgttaaagtctcccattattattgtgtgggagtctaagtctctttgtaggtcactcaggacttgctttatgaatcttggtgctcctgtattgggtgcatatgtatttagaatagttagctcttcttgttgaattgatccctttaccattatgtaatggccttctttgtcttttttgatctttgttggtttaaagtctgttttatcagagactaagattgcaacccctgcctttttttttttttttccatttgcttggtagatcttcctccatccctttattttgagcctatgtgtgtctctgcacgtgagatgggtttgctgaatacagcacactgatgggtcttgactctttatccaatttgccagtctgtgtcttttaattggagcatttagcccatttacatttaaggttaatattgttatgtgtgaatttgatcctgtctttatgatgttagctggttattttgctcgttgcttcatacagtttctccctagcatcgatggtctttacaatttggcatgtttttgcagtggttggtaccagttgttcctttccatgtttagtgcttccttcaggagctcttttagggcaggcctggtgttgacaaaatctctcagcatttgcttgtctgtaaagtattttatttctccttcacttatgaagcttagtttggctggatatgaaattctgggttgaaaattcttttctttaagaatgttgaatattggcccccactctcttctggccagagatctgtcgggagatcagtttctgtcgagagatctgctgttagtctgatgggtttccctttgtgggtaacccgacctttctctctggctgcccttaacatttttttccttcatttcaactttggtgaatctgacagttatgtgtcttggacttgctcttctcgaggagtatctttgtggcgttctttgtatttcctgaatttgaatgttggcctgccttgctaggttggggaagttctcctggatattatcctgcagagtgttttccaacttggtttcattctccccatcactttcaggtacaccagtcagacatagatttggtcttttcacatagtcccgtatttcttggaggctttgttcatttcttttttactcttttttctctaaacttctcttctcgcttcatttcattcatttgatcttccatcactgataccctttcttccagttgatcgaatcggctactgaagcttgtgcatttgtcacatagttcttgtgccatggttttcagctccatcaggtcatttaaggacttctctacgctggttattttagttagcctttcgtccaatctttttttcaaggtttttagcttctttgctttgggttcgaacttcctcctttagctcggagaagtttgatcgtctgaagccttcttctctcaactcgtgaaagtcattgtccgtccagctttgttccgttgccggtgaggagctgcgttcctttggagcaggagaggtgctctgatttttagaattttcagcttttctgctctgttttttcccccatctttgtggttttatctacctttggtctttgatgatggtgacgtacagatggggttttggtgtggatgtcctttctgtttgttagttttccttctaacagtcaggaccctcagctgcaggtctgttggagtttgatggaggtccacaccagaccctgtttgcctgggtatcagcagcggaggctgcagaacagcaaatattgctgaacagcaaatgttgctgcctgatctttcctctggaagcttcatttcagaggggtacccggctgtgtgaggtgtcaatctgcccctactggggggcgcctcccagttaggctacttggggctcagggtctcacttgaggcattctgtctgttctcagatctcaaaccctgtgctgggagaaccactactctcttcaaagctgtcagacagggacatttaagtctgcagaggtttctgctgccttttgttcggctatgctctgcccccagaggtggagtctacagaggactcctggagctgtggtgggctccacccagttcgagcttccaggccgctttgtttactactcaagcctcagcaatggtgggcgcccctcccccagcctcactgccaccttgcagttggatctcagactgctttgctagcaatgagcgaggctccgtgggcgtgggaccctccgagcgaggcgcaggatatattctcctggtgtgccgtttgctaagaccgttggaaaagcgcagtattagggtgggagtgacccgattttccaggtgccgtctgttaccccttcccttggctaggaaagggaattccctgaccccttgcgcttcctgggtgaggcgatgcctcgccctgcttcggctcacacttggtgggctgcacccactgtcctgcccccactgtccaatgagccccagtgagatgaccctggtgcctcagttggaaatgcagaaatcacctgtcttctgcatcgctcacgctgggagctgtagactggagctgttcctattcggccatcttggaaccatccaccaatttttgtatttttagtagagacgggtttccccatgctggccagactggtcttgaacttctgacctcaagtgatctgcctgccttggcctcctaaagtgctgggattacaggcacgagccaccatttctggccacaatacagtatacagtttctaagttggaaaaggattctggaggatgaaagtccagaaaacagaaaagcatttgttccttacctaagctgatctctatggttgtgcatgttgggaccaccatggttggaatgaggtctgtatgagagaaccagagaaggtcttcgtatgtgcatttaaggtgtgttgatattgtaaaactccagtgacagaaatctgaaagatcacttgcagaaaagtaactaagtgggctgccaaagatcctatcaaaatggaaagtagctcattagcttaagctggtaaagaagtcatcgttctttgaaccgaggacctatctgttacttctgttttctaaacaagcaagagtggtgggcatccttctgacaggaagtgggaacaccatagagggtgtctcaatacatggtgcatcttacaatctcactggttggtgtgatccattgataagactccacttaaaggctgtgtccacctttcgaggaggccacatggtccctggagaagctaggctgagaccttagtttggaacgatgtatctttgtcagctgctacatccactttcagcagccagcaggactatactgggggagagtctaattgatcaggtagacctagagagggtgagaattcatgcagagttctggagagacacctgtagtgtttctgtttaagtgcacttgaaggccgagggtggaatctttggtataaatggggaagtactctcttcccttggggtggctgggactatgtgacttttgagtaacagtttgtgtggcttggagtcctaagagatgacgtcagggggaccatacctgaagaaaacagcagtcagcagtttgtggaaaggattgtggatctggcaaaagttctggtgatctcaccaggcctggatagtgtggtaccaacccaaatctgccttggcttagcatgctaaggatgtcaggtttaccatttatcacagatggtattgtggtgaggggaagaacgggaaacacagcaatgtggggaccgtgccaggccgagcttcttagttaattatggatcagcagtaagcattctgtaaacctgtctactttgctgattttctgtgactttttcctgacttgactttcttcctagtaaaaattccatgtgaaatatcccagccttctctctgctaacctgtgtaaagagaggattcttctttagcttgggaggtggaagggagcttcattgcagccttcacaccaggtgtgatggtagcaggaaagttggcagctctgtagatcagcgacagccagtggaactgagccagataaggaaagagggctcctaggggattaaaatgagcccaattctgcccttttcatttgtttgagaatttagaatcagttccactgtttttttgaaggtacctagatacagtgtcatggactgggtgtgtatcaatgcatacatcatggctcctgtccattaatatcagagtgagaactgtgtgtaagtgtaaaaaaccccagaagccatgatatgattgataagtagtgtacaggattaattagcagaagatggtgtggtctaattatatctttctatggagagtcattaagttatggagaggtggtaatgtttgaattacgctcgaagatgagtaggtagagaagggtttgttggcaatggaagacctttttaggcaaagaaaacaacacatacaaagtaaagagctgtcagagtgccacaggtgtggagggaatggctaaacacttgggctggctcggggcacaggatcctgggtggtggtagtcaggacaggacttgttataaaacatgtggggctaaggcatacgacagattttttttttttttttttttgagatggagtcttactctgtcacccaggctggaatgcagtggtatgatcttggctcactgcaagctctgcctccccaggttcatgccatcctcctgcctcagcctcccaagtagctgggactacaggcgcctgccaccatgcccgggtaattttttgcatttttagtagagatggggtttcaccgtgttagccaggatggtctcgatctcctgacctcatgatcctcctgccttggcctcccaaagtgctgggattacaggcatgagccaccgtgcctggccaacgacagatgttttcttatggaggatgttcttgtggcaagtgtcaggtaatgtttcatctagatgtagaagttaaagtctaggaagtcagttttgtttctagtcttaacgacatgcgtttttctgtttgcctagtacttttggtgttgcttcctgttagtttaaacagatgtgtattgagtgcctgccatttaaataaaacaccaggaaactctgtggtgagtgggaggtgcaaaagatgtataacaatgaccacatcttaaaggagctcagattttatataagagaccagatggataggcatgcaggaggtaacaaagaatcttaaagttggcataccccaagggcctgcgttgtggttaaagcaaatgctgtaggaggtggaaggagggagcagcccccattgtggagagtggtcagggaaggcccttaggagagagaacttggggagtctcagggacaagttggagaggcgacaaggaacacgtttgagggaaggcctggagatgagttgaggagaaaacaacctctgcaggttgaaggagtattgctcatcctttaagtgtttatttaaatacaactctggctcaaagtatgctgagtatcacagggtgtgggtgacaggattggaaaggtaattgggggtttggaattccactaaacagtaggaagcattcgaggttttttgacgaggagatgggtgtgagatttgattggtgcagcaaggccacaagttaggcagccttagggttgcggcagcaggaggaatggagaatggcaagatagagtcactttgaaagaatatttgattaagatggctgattttttataatggatgagagagagcagagagaaaatacggtctgagtgcagagaggtgccagtaataagaatagagaaagtgagagggagccagtagctcgagggaggaaaagagatgatgcgtgctattgtattagtaacagagaaagtgagagggagccagtagctccagggaggaaaagagatgatgcctactattagtaatagagaaagtgagagggagccagtagctatggagagcaaaagagatgatgtgtactattgtattagtctgttctgttctcatgctgctaataaaggcatacctgagactgggtaatttatcaggcaaagaggtttaattgactcacagttccacatggctagagaggcctcacaatcatggtggaaggcgaatgagaaacaaattctcgtcttatattgtgacaggcaagagagcttgtgcaggggaactcccatttataaaaccattggatcttctgaaacttatggggagaccgcacccatgattcagttatctccacctggccccgccctggacacatggggattattacaattcaaggtgagatttgggcggggacacagccaaaccatgtcaactgtttagaagtatatagtctcaagtaactaaatctctgtagcgaaagatgggaaaattggggaaaagggctgaatgagaaacagaagacatattacagagtaacatagtgaattacacttggatttttataattgttttgtcagcaaaagcatgatatccacttttaaaatgtctgtaggcaaattttgaaaaacagttaattctgtttttggaaactttttatcacatcaattttatatgcattgaaaatttaaaaggcagatacataaacaaaagtaacttgtgatctttgtgtaggaagatagatatttatatatttatttatctctcagtctatgtgtctctctgtatgtatataattttttttccccttaggagaaaaaaatactgttttctatctagttttttcccttacctgctatgttacaaatactttttcctataattcagtgtgcttctatattttttttatttttgtaaattattttgtttcttccatgatgatttagaggaactacttttaaaccagtacaaatatgtcataaataatatctggccatcttctaaccagttgagtaatttcttgcgcagtaagttacctcacatcttttggtaagcaatacgttaaatttgattagtaaagacattatacagttaattaggacacaattaaaatttgctttaaatatttctttgagggagtggacaccacatttttacaatccagaggtctttttttttttttttttttttttttaaacacctatttgccatgaagtcataggaaatagcttccagcaatgcaagctccttcccgtgagttctcacaaagtgtgcttctctgcgtggagcaggctgacaccaggtacaccttctttttctgatcatttttcttcatgcatttcaggaagctatctcagctcttagagtgcttaatgtgcccagcacacacattgattctcttagcaagagtcttgcccttaacttgttgtttacaacagtgccaacagcatgctgggggcattgtagactcctctacttttgccatggtaacacttgtaaagcattcctttttgaacagtactcattcccttaatgtctacaatatcacctttcttatagatttgcatatatgtggccaaaggaacaactctatgttttctaaaaggcctacagaacatatattgagtgcctctcctctttccctttgtgttcatcccattttggtgaattactggaagatggtggttccagctgaaaggaaccctactacaatatttttaatgctgcataatattcctacatatggctgtttctgttttgccctaacttattgaagcactatttaattattgaatatttagttgtttcctgtgctttactatcatgacagcactgtaatgatagtattgtacctacatttttgcatatagctagcattattttcttaggataaattcctagaagtggcaccattgggttagaatgggtttagaacatattaaggcttgtgattccccttggtagactgcctctcatgaaggttatttcaatatttattttgggtgggaacacggaagtgttcatttcctacattatatcaactcagattattatgagtttttgttgcagcagcaacaaaaaagactttatgccaatctgttggttgaaaaattgtatcttatttaaaattttcatttttaaataaatagagcaatatgtttattggccatttatgtttcttaaatatgtttttaactttattgtgacaattttcagacatacagaaaatagaatagtaaacacccacataaccaccatctgatttaaagtaatacttgtcatgttagtttatacatttttttctgatttatgttaataaatataacttagctatcactataattcaccctaaataatttagcatagagcttcaaataataaaaacaatctcctacacagtcataataccattgtgcacctaataaagttaatgataattccctaatataaaatacccaatccagatgcaaatccttaaattatattttgttccatccctataacagggaatcaaagtaaaggatgggcagatgcagtgacctgttgtgtgcaccttctcagtggttggaaaacaatgtaggggatttgtccttcagtcccaggatatgagtgattcatgacaaaatgggtagctggatgattatggttctaccctggctcattcacagcttacaaacctttatcaatttactgtgactgatggtgagcaggccagataggacccctgccctcggggtatgggcatttgtagtgataggttccttctggtttcctttgctgtcatcttcactgagtatggtggtatttcttggtgatgacaataagtattatacaaggttgcatgaggaatcctaaaactcttcccattttgcaggtgtatgtttaatcataataaaactcctgaaaattgcaagggaggaaggcttcagctcactagtgaaaaatattcccaaagaaggattaatgacattttaaagatgtggtggatataaggatatagtccgttccccctatagggaccctctgctcactgctgcagggagagcagagctgcatttatcactaccctcatacatatttttattatggtctgcctctgtccatcaatcctaaggagcaacctttgacatgtttacttaaatcacagagcagactgcccagccgtggtgatgagcttgttttaaaaactggagaaaactatttctgtgcccagattaacatgctcttatatttaagaaatgatttctttattgcatctaaaaaaatgaagctgataatatctctcaaagacttctaaaatgtaaactgttgaaatataaattgaatgcatacatcacaaatgtacagccatgaatactcagaaagtgagtaggcccatgtaacgagcatcccagaggccctctgatgccccttctgatcagcacccaccaagggtaaccagttgtctgaattctggtcactgtatgttaaaactaactgtatgtaagttttgcctgtttatttcactttgcgtgaatggaattatacgctaggttttcttatgtttcttttcttttacccttaggattcgtctgttgtcatatgtagttggagttagtttattcttttttttttttttttttgagatggagttttgcacttgttgcccaggctggagtgcaatggggcggtctcagctcactgcaacttctgcctcccgggttcaagcgattctcctgcctcagcctcttgagtagctgggattacaggcctgtgccaccatgcctgggtaatttttgtatttttagtacagacggggtttcaccatgttggccaggctggtctcaagcgcctgaccttaggtgatccacctgccttggcttcccaaagtgctgggattacagatgtgagatgccgtgcccagctggagttagttttttctcattgctgtgttgtattccattgtgtgaattcaccacaagccattaatgtatcctactattggttgacatttgtgttatttttagttttttggatactacaaataatgccgctgtgggcattttcacatagtttttgtgtatatgcacacttctgttggtgatatacttctgattgaaattggtgggcttgtggttgtatgttcagctatagcagatactgcccagcatttttctaaaatggtttactcctttattctcataccatcagtgtgtgagagtaacatttgctccacatttttgccatcacttattattctttttcgttatcttgggggtatggcatggtattgcattgtaggctttttgttttatgttttgagacagggtctcactttgttgcccaggctggagtatagtgatgcaaacatggctcactgcagcctcaatcttttgtgctcaagcgattctcctgcctcagtctcccaagtagctgggactacaggtgcacgttaccctacctggttaattttttattttttgtagagatggagttccgccatcttgcccaggctggtcttgaactcctgggctcaagcgatctgcccaccttggcttcccaaagtgctgggatgacaggcatgagtcagtgtgccctgccttgcattgttttattttgcatttcagtggaatttttttagggagcagcaacttgataatgattctaaaggtcatttgtggaaaatcaaggagtgatcatggccaaaaaaatttccaagtgtaaaataattcaatgtcttttttaaacctttcattcttttaaaaaaatatttatttgaacatgtttcactatctaccaggtactagtctgggaatttgaggacacagcagtaaaaatgagagaaaaaaaattctgtcctaacagaactttccctctagttatagcatgtaatcttgcaagagtagacgagacaattgaaaaggatggtcctgaaacatctctgactgcagtgatgacaagagctgtcattcgatcccagcattctcccatggagcgtaggtcagcctcagaatacatgttggccctaggaagcctttgccagttcatcagaactggtactgcagatggagccattttgtcacgcctttccctggtgaccatatgataattaagtatgtgataaacatggcatcctaaagacctggaagagagaatgatttgctttgtgttcgtgggacaaccaagagattaagtggaaaaattaaagttgggggattcttaccttagatcacacacaaagataaagtactaatgtactaaaacttaaaggtaaaagataaacctactttaaaaaaactcagataaactctctgatatttagtcttgaaatgaagaaagactggtgatatggcttggctgtgtccccacccaaatttcaccttaaattgtaataatccccacatttaaagggtggagccaggtggagatcattgagtcatgggggtggtttccctcatactgttctcgtagtagtgaataagtctcatgagatctgatggttttataaatgggagttcccctgcacaagctctcttgcctaccgccatgttaagatgtgactttgctcctcattcgccttccaccatgattgtgaggcctcccagccatgtggaactgtgagtccattaaacctctttttatttataaattacccagtcgcaggtatgtctttattagcagtgtaagaacagactaatacagctagtgtctaagcttagaaaagtaatggaagaaatttcaaaggagaaaaaaattctatacactcaattatataaaaatatcaaactggaaaaatatttgcaacaaatataatagaccaaagtgagtaaagggcatgttcacacactgttggtgggagtgtaaattggtacaatcttttccggagagcagtgtgataataagtaccaagagcccagaagttcctctcctttgactcaacaatttctcttctgggagcctagcctttgaaaattgccaggaatttggacaaatgttatattcaaagcttactaccttagctttatttaaaaatacaaaaaactggaaatgtctactggtaggagaaaagttaaattgtatagtaaaataaattattcactatcaggggcaaacttaggtataattactaagtcataagattgctgtaattagcagtgatatttcctttatattttcatcttgttttggctcagttaggaaaatcaaaatataattctttacatgtccaaaaagccgaattaaatgctaactgaagaatagtaggatcactggggcatctttgagcctttcccttgtagtgtgctaaaaaaaatgttaactgtaagacaatactatagaacatttatttaatataaagtacttattgtgtatagggcgttgtgctaagtatatgacatgagtatctcatttaaatatttctagcatcagtcttatgaagctgtaatgttattctattcattttgcaaatgaggaaccagaggtaccaaaagctttagttacttacctgaggccattcaagtggtaagaggcacagtccagacccgtgggatgccaaagcatattactactgagtatctgagcaaagccttagtctgcattggaattaaaatgtagaaataacaagtgacttttaaaaacagttttaatcaggtttaactcagattagagagagaggggagacactgccctggcacttcactgcgcaccctccatcactatggctaccagtgtggttcttatcacccagctaggcttgttcttgtagatgcactatccttgcctcctcagtccccaaaccactgctttgtccccaggatcaagaggccgtctcctgcttcataaggacaccacatgatcccatgtcgtttctcagcatttctgcccttagggctccatgcaacagaaattaatgggctctctcttatccaggctggagtgtatcacattaaaggccagacctaggagaacactgtgaggaagcgttgtttgccacctaattcttactgagcatttctgcatggtaatgccttagaatggagaggacagtaactagagcagcatttactgcctccctccataagattgcccaagatgacacgcacttagtagtttgctgtccagcttagcttgtttgccatcctttcttgtatcattgatgctcttaaagcaggaatggggcaaaggaattaggttgtttgcctccatgacttcgtaattccactttttttttttttttaaaaagctatgtgcctttgctaaaaaacaagacatagtttgtctttccaaatttctataaaccagggtttctgaacctggacactgcccacactttgggctggagaactgtctgttgcagggagtcatcctgtgtattgttggatgtctagcaacatccctggcctctacctgctggagccagtagcacccttcctcacatgttatgacaatcttaattgccatcagatattgccaagtgtccctgtgggaaaacattgctcccagttaagtttataaacataaaacttgacttgttttttctttgaactgttgggagataatggtcattatgaagcgtacatgatcatatctgatattttatcgtttggatattttcaactttttcacatatcactctcatgattatatactgttgaaaatcaaatatataaaatactgtttttcttttttttaaacagtatgcaagcattgagaaaaacggtgaatttttcatgtcccccaatgactttgtcactcgatacttgaacatttttggagaaagccagcctaatccaaagactgtggaacttttaagtggagtggtggatcagaccaaagatgggtatgtttatttttaattattttatttaattctttttgtttgaaacagctttcttttgctctaatgaccaggaagtcattaaatgtataccttcccatctcttaggaccattttctgtacttactactattattattacattatttgagtaataatgtagttccttcaatcattgtttcaagttggggattcaatatgtatatatttgactcttttaaagaatgctttatcgtatcagagaactattattgtcaacaaggtggtgatgtgcagatgtatgagagtatttatatgcctttggtatttttcaaggcagctgtaaaattgtgagtaaatgtacaacatagctctatgaacgttacttttctataatctttctttctgagcaaatcgcctttaaaaattcacaggtgattccaaagccccaagaaaggcactctgcaaaagctagaggaaagaaactgtaccatatagaatcaaataggacacgttgcagaatgcctttggattctttttttccctaccagtcttctctgcttccattttgttggaacttttttccctccttcttttgaggcaggttctcactctgttgctcgggctggagtacagtggcatgatcttggctcagtgcaacttctgtctcccaggtacaagctatcctctcacctcagcctcctgagtagctggtatcaaagccgtgcgccaccatgcccagctaatttttgtatttttttgtagagacgggattttgccgtattgcccaggctggtctcaaactcctgggctcaagccatccgcttgcctctacctcccaaagtgttgggattacaggtgtaagccactttatctggccttctgcttacattttaaaaatgggttttccttaagctgtataagattgcaatggcttttaccattacacgaagaattttggactctgaactcttgctaatcaaacaccaatgtctgctaatagccaaagtataatgtacaagaactaaccttctctaggtaaactgtaaaggaccttgccttcttccttctctaggtaaactgtaggagactttgcttctgtccctgctgcttgccagcacccttttgacagattgcagttacctatcactctgaggtggagttctctagctctgaattttctctatttattggaatcttcatgtgtctgattttcccacatgcagcagtttgagatataacccatgtataatgtctttatgtacttcgaatactctcagttttcactagcactttccttttcttatttatgcacttgtcacccaatttttttattatactttaagttttagggtacatgtgcacaatgtgcgggttagttacgtatgtatacatgtgccatgttggtgtgctgcacccgtcaactcgtcgtttaacattaggtatatctcctaatgctatccctccccactcccccgaccccacaacaagccccagtgtgtgatgttccccttcctgtgtccatgtgttctcattgttcaattcccatctatgagtgagaacatgcagtgtttggtttttttgtccttgtgatagtttgctgagaatgatggtttccagcttcatccatgtccctgcaaaggacatgaattcatcattttttatggctgcatagtattccatggtgtatatgtgccacattttcttaatccagtctatcattgatggacatttgggttgattccaagtctttgctattgtgaatagtgccacaataaacatacgtgtgcatgtgtctttatagcagcatgatttataatcctttgggtatatacccagtaatgggattgctgggtcaaatggtatttctagttcaagatccctgaggaattgccacactgacttccacaatggttgaactagtttacagtctcaccaacagtgtaaaagtgttcctatttctccacatcctctccagcacctgttgtttcctgactttttaatgatcgccattctaactgaactacaaaccactgctcaatgaaataaaagaggatacaaacaaatggaagaacattccatgctcatgggtaggaagaatcaatgtcgtgaaaatggccatacaaggtaatatatagattcaatgccatccccatcaagctaccaatgactttcttcacagaattggaaaaaactactttaaagttcatatggaatcgaaaaagagcccacattgccaagtcaatcctaaaccaaaagaacaaagctggaggcatcatgctacctgacttcaaactatactacaaggctacagtaaccaaaacagcatggtactggtaccaaaacagagatatagaccaatggaacagaacagagcccccagaaataatgctgcatatctacaaccatctgatctttgacaaacctgacaaaaacaagaaatggcgaaaggattccctatttagtaaatggtgctgggaaaactggctagccatatgtagaaagctgaaactggatcccttccttacaccttatacaaaaattaattcaagatggattaaagacttaaatgttagacctaaaaccataaaaaccctagaagaaaacctaggcaataccattcaggacataggcatgtgcaaggacttcatgtctaaaacaccaaaagcaatggcaacaaaagccaaaattgacaaatgggatctaatcaaactaaagagcctctgcacagcaaaagaaactaccatcagagtgaacaggcaacctacagaatgggagaaaattttttcaatctactcatctgacaaagggctaatatccagaatctacaatgaactcaaacaaatctacaagaaaaaaacaaacagcgccatcaacaagtgggcgaaggatatgaacagacacttctcaaaagaagacatttatgtagccaaaagacacatgaaaaaatactcatcatcactggccatcagagaaatgcaaatcataaccataatgagataccatttttttttttttaatggaaagaacctcctgtaaaatgaaggccttgatgactgggagggagcaggcagggaattaggtgatctacttgttgcagtattctggaggattgttggattatgccttctctctctgttccagcggcagaaggtttcctttttaaccttcttacctttgttttctaccctaaccccaagggggattctttgcttggtaggaaaatgtaatgtatgagcagggtggtgcaggaaaaggctgggctatatttcacactagttcatttaagctgaaactatgcaaaacacagacttatgccagcaagcatttttctgtggaaaatctagttgttttttcacctcctagaatggctcatgtttcagaggaagtgtgaccaagttcacatgcaacatggattatctgccttaatatttgagatcagttttttgtaatttggaaaaattttaaactacagaaaaaaaaatctgagtcacaaaaaagttgagagaagaatatggtgagcacacaatctatacccttcacctagattgactttttattaaaatttttaccatctttgtgctgtctttgtacacacacattttctacacacaaacacgtacacacataatttctttttatggttggaacacttaagtgtaaattgtacacatcacaatatttcagcatttatcttctgagactaagaacattctcctacataaccccccatgctattattgcacttaggagaattaatgatcatgtcaagtatcagctaatgtctattccatatttaaatatactagaactttcaagtatatttgcagatctggtgtgttcacctcccttcccaacctcaaatggctctttgcctattcttgtttctttctttttttgttttttgattgaagattatactgcagttagttatgtctcttttactctaaaacagaacagaaatattatattgtttttcgtgatattgacttttgaaatccaggcgagttatttggttgaaggtcctgcattctggacttgtctgattgtttcctcattgtctgattcaattcaggataaattctggggtataggttaggagctattctatactacccattgtatctcctcaggagggatcgtgtccaggtgttggtgatgctgtttgataagttggtgaagctggcatccacctgatatttccattgtaaaggctacattttgttgttatatgagtagataatttgtgggatgatatgtcaagatcacatggatattttctccagcaacctttcacctgatggttttagcatccatgatgattctttgctgaaccggttattctattgatgtttaaaaggtggcgatttttctaatcctataatttctcctgtatatattgtccaacattccttggtaaacagaaactttctttcctcttcccccttttctttgtcttttaatcttttttatcaacataaattactggatttgcatactttaattctgtattatactccattaccagtatgcccttacaggcaaagcgtctcataactggtcagtgggagggctgggcctcaagctggcttctcattctcagctttcaggtgctccttgcttttggcaaattagttgttccaggctcaccttggaccgttcctgcctttgacctggaaatcacttttccccccaacaagaagctctgattccttttatttaggaatggtgcttaggaacaaagctctgggcactggcttattgttaccagggtgttactgcttctctgacttttcagtgaaaagagctgggaaatatataaactttaaaaaattgaaagttcataataacatctccttttaaatttaacattacaggatttttctttgttttttaaattttgtgtctctctctgcgaaaattttggttgctacatacattaatatgtttatgggcctttatttgatagaattggaagacctctgaaggtataagaaagagcaaaaatgtttaaaaaataaatgaataaataggctgagcgtggtggcttacgcctgtaatcccagcactttgggatgccgaggcaggcggatcacctgagatcaggagttcgagaccagcctggccaacatggtgaaaccccatctctactaaaaatacaaaaaaattagccaggcatggtggccgtaacctgtaatcctagctactcgggaggctgaggcaagagaatcgcttgaacccaggagctggaggctgcagtgagccaagatcacaccattgcactccagcttgggtgacagagcaagactctgtctcaaaaataaaataaaataaaataaataaaataaaataataaaataaattggaataccttctgatgtgctttgtgttctattttatcccccttcccattaatagacatgctttttctttttttaaacatataatatccaaaaatacagccttacatttatcagataacaatgtgtaatatatattttacatatatagtataacataatgtgtgtattttctcaaaagcttgtgacagatttgaaaggccgactttgttttcttggttttatcgatgagataactgaagctcttggtatttaagcagtttgtagctaaaaggtgctcaggcctgtcaggttttaaattccttggccttttcagtgttctgagctgcctcttctcataatctcacagtcctcttttgacattttcttttagattttgtattatcttaaatctcagtgttttactgtgacacagaaaatgttagatggccttaatcctttgccctataacaaaccttttagttgcaaaaactgtgaacatctcagttatttttttcctttcatttctagttggcgtgtagtaattgtacatattagatacagagtgttagttcagtacatgtatataatgtgtaataatcaaatgagggttttatatcaatttgttgactaaatttagttaagtgtactaagaagcatttttacgaaagcccgggaatagaagctgtattttgaattctgttactcaccttaacaggctgaataatggccacccaaagagatctattcctaatccctggaatttgtaaatgttaccttatttggaaaaagggtctttgcagatgtcattaaatcaagaattttgagatgaagatattactctggattgtttaggtgggctctaaattccatcacaaatgtcattagaagatagaggcaaagggagagttgacacagaaacagggaagaggaagagacggggtgaccacagaagtagaggttggagcgttgcagccataaaccgaggaatgcctggagtcaccagatgctggaagaggcaagaggggattttccgcaagagcctttggagagtctgtggccgtactgaactcttgatttagggcttctcatccctagaactgtgatagcataaattttgttgtgttattatgggaatttgttttgtttatttatttatacttatattttattttatttttagacaaagggtcttgctctgttgcccaggctgatctcaaattcctaggctcaggctatcctcctgctttagcttctggagtagcagggattacaggcatgtgccactgaaatcaggtatttatatttctcttttttttttttttggagatggagtcttgctctgttgcccaggctggggtgcagtggcacgatctcagatcattgcaacctctgcctcctagttcaagtgattctcctgcctcagcctcctgagtagctgggattacaggggtccgccaccgtgccctactaatttttgtatttttagtagagacagtgttttaccatgttggccaggctggtctcgaacttctgatctcaagcagcccacctgccttggcctcccaaagtgctgggattataggtgtgagccaccgcactcagccccagctatttatattttctaattgacaaaagttgaatatatttatgatatgcaacatgatgttttgaaatatgtatacattgtagaatggctaaagcaagctaattagcatgtccattacctgatatacttatttctttttgtattgagaacacttaaaatctactcttagcaattttcaagtatacaatatatgattattaagtatagtcaatatgttgtacaataggtctcttgagcttactcctctaactaaaattttatattgttggaccaacatcactccagggcctttccccatactgtccccttcccccaagggaggccctggcaaccaccagtctgctctctgtttctatgagtttgacttttttagattccatgtgtaagtgagatcatgtagtatttgtctttctgtgcctggcttatttcacttaacatattgtccttcaggttcatccatattgtcacaagtgagaggattgcctttttaaaggcttaatagtattccattgtgtgcatgtatcacattttcttcatccgttcatctgtaatgggcacttgagttgattgcatatcttggctatggtgaataatgctgcagtgaacctgtaagtgcagatgcctcttcagtgtaccagttttattttcctgttgtaatttgtcacagcagccccaggaaatgaatacactcatgtagctgttttttccgggacgttagaaagcttatagttgtgaagaattttctttgccaagggccagcctgatccggaaaaaaacctttttctagtggtagttttggcttgatccagacattttccagtcagtgacccctgttgtcaactgtctctgtgagggcatggctgcttcctaaagacttcacctatgtgtgggctgggatggaactctgggcagggaatttaaatgcctgtgcacttacggccttaacacctccagcttgctgagagagggatcctgttttctgtagcactcttgtttctagtggaatgatgcatgagtgccttgggtacattggtcagccttccatgttggagcttctctctgaacactctccagttattcagcagctctttgggaacctcatctctgtgcttggcacagttgtgtatattgaggataacatggtgaatggaaaaaaaaacacagtgcttgttgccctcttggagcttctaatttaatggagcagacaggtattcatcagggagcctgaaataaatgtgaattgatgtagtgatactgctatgaaagagagagatggtgtgagtaacaccaaataagggcttcatttggactgggaaattgggaagactttccatgagtgacatctgagttgcaggagttggaggtgggagtacagaggacagagagttgcaggcagagggaacagcagttgtaaaggtcctgtgttttgaaatgcagaggctggcttgcctggagcatggaagtgcagggcatggtggtgggagaggtgggctgtgcccagactgtgtagggacttgtacctcatattaaggattggggttctttatcttgagagtgctggagagccatcaaaggctaatttgaatgaggggattggcacgatttgcctgtgtaacagcatacttgctgttaatactctttgttgtgtttagacctccctgcattccactgttttaatctacttaatgatggatttaatcaatttatgaagttccgtaagggagatgagaggagactttgagtgtctagggctggaagccttttgtttttggtgggccttaatgaatgaagagggcttgtcccagcatttgaggaggaggtgggactctaaggacttctcagggcctagaccttactgtaccacgtaactgaactgtaccttttagatttggttgtgattattattttttcattcaaaatgagaataaagctttgtatatcttctaagtataatttttatacattgttcatacaacttacctgttaagagcaaggtgaaaattcttcctttgatctttgcacacgttctatttgttgttgttactgactgttatctcgttaaagggagtcaaggctaaagaactgtcttcacttgtgactgaccttctcacctgggaagaccacatgggactagaataagctggaggtgttgagtgcctgacttactgagggttacgggtaccaagcactgtctgtgaggtgggcaccgggtggctcagggatccagttggcttgctagggtcacaaaggaatttaccacacatatgtctttcatctccagtgtggaacctctttgcactccatgtgcaaacagaagttggcacttcttttggaaaagggaatgttagatatctcagtttgctagtgatgaagctgacagattcaccataccgccttgtcagccccctgccactttgttgtaccaaaatgacagcaatataatcaaacccttaatttttttttttttttttgagacagagtctcaggctggagcacagtgggatgatctcagctcactgcaacctcccttactgggctcaagcaattctcctgcttcagcctccccagtagctgcgattataggcatgcaccaccacacccggctaatttttgtatttttagtaaagacggggtctccccatgttggtcaggcttgtctggaattcctgacctcaagtgatccacctgcctcagccctcccaaagtgctggaattacagacgtgagccactatgcccggcctcagataattcctttctgttcagagtaaagagattgagtcctgggacagttcctgttttgatgcatgaagaataaaggcatcaaagaagaaaagatgaaaaagaaatctaaagtttagaaatatgtggcctatataaataaagcatgttctctgcctttcctatgtttgctattctttttctgaggaaagaatatatggccttttaaagatttcacaaggtgaaggaggatataataatgttgatgataaaatcatttttatatacctgttttcattttgtgaggctgtcgtgatgaaatccaggccttggccacatgctgggagttaatgaggtttacaattggcaatacttaaagaatattagggtaatatatttaaacatcagcagttcacagcctgaagtgctcatcatctgtcaagttataatacagaatcaataaggggaggtctttcaatttgctaatgaggaaagttttctatactattagggtagacatagatttcagataaacatctaaaattcataaactatagaatttggcgaaagcatctcttcgattaaaaagaaaccttgataataatcaatagcagtcacctgagaagcttagattttcttcttagtcatcagactcccaaattaatctaccaaaacaaaaagcctcattaacagctctcattgaatcagtgttattttttcctttctctcaaggtgtctgattaaccccctttctttttgcattactcactttgtgttaatatttgatgtctgaaatcatggggcaggggaggggttgtgcaatgtggtggctagacactgtctacaagcagtaaattaaaaagaatttttaaaaaggtttgtattatgttgctgatgtattagaaaatctctaggaatgtcaggtgcctgggttttctttttctttttaatttcagaaagggttgattgctgattgggtgctgattttgcttctcattcatatgtacagatagcgctcctcctcctcttacccagctcctcttgcttaccaatccaagccttcttttggagagttttattgaaaaggaaaggtgagaaataaggccataactggagggaaaagggaggttgaaggagggtcttttctaggtgaatgccaatgggaaagactcacttgagagtagataagattgacaatgtaggagagaaaggaaagacattctggagcattgtctaggaggttggcctcttgtaagagcatggagagttcatccagaacacctgacctcaaagtgtagccagtggactcctggaagtccctgagaacttttcagaagtccaggaggtcaaaactatttgcacagtagtaaaagcatgatctacctttttcaccatgttgatatttgagctgaggtttctaaaagcaatagtgcgtaaaacttctggtgtcttaacagcaaataaggttttgtctgaacattgatgtccctccaaaattcatgttgaaacctaacctgcatggtgatagtgtgaagaggtagaactttggggaggtgattaggtcatgagggctctgctctcacagataggattagtacctttgtgaaggaggcttgagggaatctgtttgccccttctgccatgtgaggatggagcaagaaggcaccatctatgaaggagaaagcttttaccagacaccagacctgctgctgccttgatcttggacttcccaactcctagaactgtgagcagtaaattctgttacttataaattaccaagtactaggatattttgttataataacctgaacagaataagacagacaccaatccaaacagagtaagcaatcattattttcttcattacacattcatcatcttcgtcatactgattctgcttcagaatgtccttgaagaagcagtcaaaatcattgattttattaaatcttgctcttgattacacaagattacattttaaaattctgagtaattaaatggcaagtatgcataaagaactctttaatgtagtatggtggttgtctgaggaaaagtacttgagcagttgttttgaattgctagttgagctagtcttctactagaggatacgggataccattcttatttgaaagaatgacttttttgaaagatttaaaattttcatgtttcatcttcctaatacttaaagactttctgatgtcattggtggtgatgttaatgaatgtggcttttaaatatagtttaatgaagtttcctaacatttggatgatctgcataatatagagaaacagtattttcccagttgaccggtgtgcatggtgttacaaaattatgcatgggtaacagatagtttgaaaagtgctcatagacccatgaattttaaggtaacagagaggagaaaagttcactgatacagtttcagattgcacattgccactagtctttaagaaactttacttgttgggatttggtgttgtatcaaagaagaacatccccagttatctaaaaaggccattaaaatacttctttcttttctaactatgaatctgtgtgaggctgaaatcctttcatattcttcaaccaaaacaacatattacagcagattgaatgcagctgttttccattaaagtcagacatttaagagatttgtaaagatataaaactgcttttctcactaaattttctgttttagaaaatatagttctttggctgggtgtgctggctcatgcctgtaatcccagcactttgggaggctgaggcgggaggatcgcttgaggccaggagtttgagaccagcctggctaacatagcgagaccctgtctctacaattaaaaaaaaaaaggtatagttctttttcatacaaatatatttatattaccatgtaatagagttactttttaatgaaataaatattttctaaatttcccaattttaatttctagtatggtaaatatgatagctataatccacataaataaaagctctgtggggacctcaacaatttataactgtgttaagaggtcctgagacctaaaatttttgagaaatgctgagctagaagagaagatagagactagagtagagagagagtgtagatgtagtggtgagatttggggacaggttgtcttttggtttctttgatttttttccaggaaatagatgagatggaggtgcaggttgaggtattggcagtttgtggagagagattcgtatactacatagttatctagaagtgggagggtgaatgtgtgaggaacagcatgatggctgggcaggacccacttgagtgcttacctgaggattagtggtcatgaaatttaaagtgagaccagttagtgtggctgtatgtttttcagataaggccagtcgttcaggcccaggtagtaagggttggatgtagctagggttgaggtcatggccactgaataatccagagtaggtgaggttccagggaggtaggtgcaggggcgtgcaagggagtaattatgatgatagactatagatttagtctgggcaaggagcaaagagaggacattgggtaggacgcaatgagggatggtgagaaggtgacatgcttaatgaattgtgagtttcagcatggttgaaggttgttgatcaattgggatgtgtttatgagggactgaacaggaagactagaatatagtggccataaagtgagatgcatgaaattgagaaaaaggagtttttggtaatggcaagtaaagtctagagtgtgaccatgggagtgagtggctgaggaaggatgaaagaaaggccatcggaggagatgagttaatgtaattggaggccttagtgtttgaaggatcagtatattgaaggataagtatgttgaaaatattgagaactaagatagaagttgagagagtgtcatcgagccaagagctaaaatacggggtgagaggggaatccagggttattagatcacagaaacaagaggtatgctgagtggtatagtcagatgatgggaatatttgaatgggtgggggttaggaaggagaatatgggatctacccaacctgcttataggcctggtgcaacctaggactgcaagaggaaagctcatccctacacgtaagaggggtctacagtggaagcattgtcctcaagggacagccaggtattggttagagcaagaaagtgaagagatattttatggaaggattgaggaggagattttggtcactatacactgaattctagagaacacagttggagggtttctgggagatggtgacagaataggcaaagtccagggcctctcagggattagacgtgagtggtaaagggtaacctgggtgtccgggactgttggtcaaggctgacattcacggaataaagagaagaatgcagttagtcctggtagactccagattgtgcctgctggttgatagggatctttgcagagaggcaaggaagcttggagaggggcaacttttattacttaaagaacttttaaaataaaaatattttgtgagcagtagctctgctgtttttttttttttttttttcctagatggttggaccaaaggatgaaggaaatgaatagttactgagcatatatagggttccatatctggtgctaacaatttccacctgttttcttatttaatcttcatacaagaccttaaaataaatattttcactgcccatattataaagggaggtggagaattagagaggttaaataatttgctcaaagtcatatagctaatgagtggtggaactagcatttcgacccagttctttctggcttgtgctcaatctgctctaccatgaaactttctatgcatagagaagaatatttaaaattgagctttgcacgagaactttgcttatgtctttgcttagaagttctgatggcctttgcaagattctttgcccttgagactagtcatttagccctcatatttggccaacataaggtgaatataaaacctccatgagaggctcttcgtcacccatacccacacttatgaaaaactggccttgcttacctcttactctttttttttaaactgaggagtagtttttggaacacttttccctttttactgttcttatattgaaccttgagttaccattgcgtatcatattctcagaataagaataagtatcgttactgggccaacttaataccaacagttcttccatattcttcccagcatatgatgctgcttagtgaatgcctgaaagagcaaatactgttctttcctctttctttgtttggtgttagtgtagaaagataagctggattaattgtttgatttgcttgatctagactgtaggtgtttaaaacataaatctaaaattttaaaggaaaggaaatcaaatgtaagctctgtttcctagctacttgagaatctgcttctttaccactgtcagaattagaggtacaggatgtggagttgcttaaattaaaacagtcttgtactgagctatgaggaattcatgaagcaaaactgctatagtttgaatgtgtcctgaaagttcatgtgttggaaacttagtctattgcaacggtgttgggaagtggggacctttaagagatgaacatattaatgcttttatcgcaggcatgtggtatgtgggagtgggttctttatctcaggagtgggtttcttatcaaaggatgagttggtcctcttccccgtctctttcccttgcccatgtgatgccttccatcatgggacaacccagcaagaaagccctcaatgtcagtgccttgatcttggacttccaaatcccacaacagtgaggaagtaaatttttaaaatgaattactcagtctcaggtaattctgttctagaagcataaaatggactaagacaaaaatgttaggagatatagtacccaactttcccattgattgtggcataattgtgccatgattgtcagtgagttgcttcctagtaaatacagtgagattcagagattttaatgaaggtttttgagagtaaagtaagacttctcttgcaatctgatgtaaaggttttgagatcttcagtctggaataagcaaaaggtgaaagaagataactgatgaaagaacttaattgtcagaaattttagagtaacttagtctgaaataaatgatatatggtaaggtaaaatggccttctgctacaaatctgagacaaccttgatacttgaaaaatatagattaatttcagatttggtaactcatttaacaaatatatattgacaccaactatgtgccaggcactgttctaaacagtgtgcttttatatagcaaacagataatgtaaacaaaagatatatatagatgatatagaggtaggttgttatatttattaaagtgctatggtcgataaagtggtcagggaagatctctctgaaaagtgacatttgggcaaagacttgaatgaaggagtaagccatgggagaccctagggattgagccttctcaatagagaagaatagaggggataacaggtgcaaagagcctgagaggggagggtgcttggcatgtttgagaagcagcaaagagaccagctagtagagagggttgataggagagtgaaagaagtataaaatgtatcccagggccaggttatgtagatgttgtagaattgtattttgagagtagtagaagtcattggagggttttgagcatgggaatagcatgatctgcattacattttgaaaggttttgcctggctgatttgagagaatgggatgaagtgggtgacagtggaagaaagggaaattaggactgtgctgcagtaatctgtgtaaaaggtgatggcaagactagagttgaatggtaagaagtggttggatttgggattttattgatggattagatatgaaatatggggaatggcgatataagcaaatgagatagggaatgttgggggaagagtaggtttggaagcaaaattaagagttctttaggacattagaatattgacctccctgttaaacatgcaattagagaggcaggctgtgagatgtatgcttagagatgagagtcaatgtaattacttatttggtctgagccaattctcagcataaggagttggtgctgttgtaacttcagtgagttgtgttttgtagggtgggggaattggggtcttttttgtattgattattatgaacttacaggtttttatatgtttgtgttttaattgcaatatctcatctttggccagtaggaacccttttatattatctcttttgtcctttttgatatgatccattgatttttggtagcttccttgtttctggcaaaataggttgttattttatatatttcctgccctgaacctggaatcagttgctctgcttgaatctcccccttttttaattattattatattttaagttctgggatacatgtgcagaacgtgcaggtttattacataggtatacatgtgccatggtggtttgctgcacccatcaacccagcatctacattaggtatttctcctaatgctatccctccccttgctccccaccccccgacaggccccagtgtgtgatgtttccctccttgtgcgcatatgttctcattgttcgactaccacttatgagtgcgaacatgcggtgtttggtttgctgttcctatgttagtttgctgagaatggtggtttccatcttcatccatgtccctgcaaaggacatgaactcattctttcttgtggctgcatagtattctatggtgtatatatgccacattttctttatccagtctgtcattgacgagcatttaggttggttccaagtctgctattgtgaatagtactgccataaacatacgtgtgcatgtgtttttatagcagaatgatttgtaatcctttgggtatatacccagtaatgagattgctaggtcaaatggtatttctagttctagattcttgaggaatcaccacactgacttccacaatggttgaagtgatttacactcccaccagcaatgtaaaagcgttcctatttctccacatcctctccagcatctgttgtttcctgacttttaataatctccattctaactggcgtgagatggtatctcactgtggtgttgatttccatttctctaatgaccagtgatgatgagctttttttcatatgtttgttggatgataaatgtctttttttcagaagtgtctgttcatatctttacccactttttgatggggttgtttttatcttgtaaatatatttaagttccttgtagattctggatgttagtcctttgtcagatggataaattgcaaaatttttctcccattctgtaggttgcctgttcactctgatgatagtttctttcgctgtgcagaagctctttagtttaattagatcccatttgtcaattttggcttttgttgccattgcttttggtattttaatcatgaagtctttgcatatgcctatgtctgaatggtattgcctaggttttcttctagggtttttatggttttatatcttacatttaaatctttaccatcctgagttaatttttgtatacagtgtaaggaagggatccagtttcagttttctgcatatggttagccagttttcccaacaccatttattaaatagagaatcctttccccgtttcttgtttttgtcaggtttgtcaaagatcagatggttgtagatgtgtggtgttatttctgaggcttctattctgtcccattggtctatatatctgttttggtactagtaccatgctgttttggttactgcagccttatagtgtagtttgaagtcaggtagcatgatgcctccagctttgttcttgttgcttaggattgtgttggctatacgggctcttttttgtttccatgtgaaatttaaagtagttttttctaattctgtgaaggaagtcaatggtagtttgatgggaatagcattgaatctataaattactttggtcagtgtggccattttcacgatattgattcttcctatccatgggcatggaatgtttttccatttgtttgtgtcctctcttattttcttgagcagcggtttgtagttctccttgaagaggtccttcacatcccttgtaagttgtattcctaggtattttattctttttgtagcaattgtgaatgggagtttgctcatgatctggctctctgtcttttattggtgtataggcatgtttgtgatttttgcacaagaattttgtatcctgagacattgctgaagttgcttatcagcttaaggaggttttgggctgagacgatggggttttctaaatatgcaatcatgtcatgtgcaaacagagatcatttgacttcctctcttccatttaaataccctttatttctttctcttgcctgattgccctggccagaacttccaatactattttgaataggagtggtgagagagggcatccttgtcttgtgctggttttcaaagggaatgcttccagtttttgcccatttagtatgatattggctgtccgtttgtcgtaaatagctcttattctttttgagatacgttccatgaatacctggtttattgagtgtttttaccatgaagggatgttgaattttatcaaaggccttttctgcatctattgagctaatcatgtggtttttgtcattggttctgtttatgtgatgaattacgtttattgattatcacgtatgttgaaccagccttgcatcccagggatgaagccgacttgattatagtagataagctttttaatgtgcagctggatttggtttgccagtattttattgaggattttcatataaatgttcatcagggatattggcctgcaattttctttttttgttgtgtctctgccagattttggtattaggatgatgctagcctcataaaatgagttagggaggagtccctctttttctattgtttggaatagtttcagaaggaatggtaccagctcctctttgtacctctggtagaatttggctgtgaatccatctggtcctggactttttttggttagtaggctattaattactgcctcaatttcagaacttgttattgatctattcagggattcaacttcttcctaatttagtcttgggaggatgtatgtgtccaggaatttatccatttcttctagattttctagtttatttgtgtggaagtgtttataatattctctgatggtagtttgtatttctgtgggatcagtggtgatctcccctttttcattttttattgcatctatttgattcttctctcttttcttctttattagtctggctagtggtctatctatttggttaatcttttcaaaaaaccagctcctggattcattgattttttttgaagggtattttgtgtctgtgtctccttcagttctgctctgatcttagttatttcttgtcttctgctagctttcgaatgtgtttgctcttgcttctctagttcttttaattgtgatggagtgtcaattttagatctttcccgccttttcctatgggcatttagtgctataaatttccctctaaacactgctttagctgtgccccagagattctggtacgttgtgtctttgttctcatttgtttcaaagaacttatttatttctgccttaattttgttatttacccagtagtcattcaggagcaggttgttcagtttccatgtagttgtgtggttttgagtgaatttcttgatcctgagttctactttgattgcactgtggtctgagagactgttttgatttccattcttttacatttgctgaggagtgttttacttccaattatgtggtcgattttagaataagtgctatgtggtgctgagaagaaggtatattcttttgatttggggtggagagttctatagctgtctattagttctgcttggtacagagctgacttcaagttctgaatatccttgttaattttctgtctctttgatctgtctaatatggacagtggggtgttaaagtctcccactattattgtgtgggagtctgagtctctttgtaggtctctaagaacttgctttatgaatctgggtactcctgtatgggctccatatgtatttaggatagctagctcttcttgtcggattgatccctttatcattatataatgcccttctttgtctttttggatctctgttggtttaaagtctgttttatcagagactaggattgcaccccctgccttttttttgctttccatttgcttggcaaatattcctccatccctttattttgagcctgtgtgtctttgcatgtgagatgggtcacctgaatatagcacaccgacgggtcttgactctttatcccatttgccagtctgtgcctttgaattggggcatttagcccgtttaaggttaatattgttatgtgtgaatttgatcctgtcattatgatgcttgccatttattttgcccattagttgatgcagtttcttcatagtgtcgatggtttttacattttggtttgtttttgcagtggctagtaccagtttttcctttctatatttagtgcttccttcaggagttcttgtaaggccggcctggtggtgacgatatccctcagaatttgcttgtctgtaaagtattttatttctccttcacttatgaagcttagtttggctggatatgaaattctgggttgaaaattattttctttaagaatgttgaatattggcccctactctcttctggcttttaaggtttctgcagagagattcactgttagtctgatgggcttccctttgtgggtaatccgacctttctttctggagcccttctttttagtaggcagttgtatttatagaccacaatctggggattaggtatgtttccttcttttgagttgtcactactttgagaccttttgtttttctcttctctttatttattattattattttgagttagggttttgccctgttgtccaggctgaagtgtagtggtacaatcatggctcaatgcagcctcaaccgcctgggctcaagtggtcctcctgcctcagcctccggagttgctgggaccacaagcacacaccaccatggctggctaaatttttaaattttttgtaaagatggggtttccctgtgtttcccaggctggtcttaaacttctgggctcaaatgatcccgccacattggcctcccaaagtgctggaactacaagtgtgagctaccgcacctagctgatgccttttcaattcattagagaaaaaattttccattcatgctgatatttcaaatgtaaagataaattgacacagttaaatccaaagtaattttattgttttgatttttctatctccgctctttcattgaaaatcctggttaccagcaacattcacagtattacatatttgccatgtgtaggatatatccaaaatagtaacacctttattgctgccaacaattagatactgaatgaagtttaagatttctttttagttctgttgtacttagactgtgttccacaaagtatatatagttaaaatactgtattctaaagttattggaaagaattcatttaattctgtgtggttttgccaccaacttaatatatatatagggaggttcattttttcagtttattttcaatttttagggattgtcttttttattttcaacttaatttaatttttgagtatgtaaaacatatgtttcccaaatcaaaactatacaacagaaggaaggtatgctcagggaagtctgtcttaacatgcccgtccttttcaccctgactcttccttcctttttataggtcattcttttttgtattagttttttggtttctcctcccacagggtattttttccccaaatataagtaaatttatatgtgtatttgtgttcatctttccttccccattcgtatccaaaaggcagctctatcaactctatatactatatatacgctcctttgagggagtgtgtatgtgtgtgtatatatgtagtatatgtgcatgtgtactagggtttgctcatgaaacagatccaatagggtatatatacacacacatatgtgggtatatatgtatatttatataaagagagacaaatacacatgtaaatgtacatgtaaataataaatgaagacatttattataaggacttgtctcacatgactgtggaggctgagaattcccagtatcagctgtctgcaagctggagatctgggaaagccaatggtgtaattcagtttgagtctaaagacctgagaaccagggagccaatggtgtacttcccagtctgagagcaggagtagatccatgttccagctctaacactcaggtggagaaagcaagttatccctttctccacctttttggtttattcaggacctcagtggattggatgttgcctaccacattgggagggcaatctgctttacccagactgcctatttacatgcaaatctcatccagaaacacccatacagacacactcagaaataatgtttaatctgactaccacatgttgctatcgaggtaacacataaaattaaccatcacagcatttgtataatgtttgtctccagggaagacagacagacagacagacatgcgcacacacacatacagcacacacacacagttgcttttatctcttagtcgtgtgttttgaagataattctataaatatgtaaagaaatcttcctcattcctttttatggctgcatagtgtaagcatatacatttataattatttttccagtttattccaatatctgttaaagtttacagaccagtgcttttaaggtttacattatttggctcatcaggatcttttcccaaaccattttagggctgttgtcaaagagcaatggacaaaccctaatgatgagatgaactttactctcagaataccgtctcacttgctcctatgttctgcattccctgcaccaaacacttcctatgctgtctgcttccctgtccactcatacaggaaagggcttcgatgttatagagtcactcttattgctcctgctaactgctgtcctgataacaatgggtcttttgcatgggaaaagcattatagagtgaaaggatcactgatagcagtcaaaaaaacacattttactatgtcttttaaaatctgtgggatcttagacaagtgacctatcccatgtgagcctgttttctcatctgattaaatggggttgttacttgctcggtgaatgcttgtgttgtcacccagtgaaataaactccagggaagtttagttagctttcccttctcaatttacctgcagatactgtttcaacattcctctctcctctcattccttccctctcttattcctttcctcacctcctacttttcttccccaattcctggcatctttcctggtggcaaacagaccttccatgtgaagaaaaactcctcataattgcactttcctcttcagattctgccccatttctcttctttctgcaacactcatcaaaagcactgtctgttctggcccttacaattaattcctctgcccattgattcttttttgagatggagccttgctctgttagccaggctggagtgcagtggcatgatctcagctcactgcaacctccgcctcccgggttcaagcgattcttctgcctcagcctcctgggtagctggaataacaggagcatggcaccatgcccagataatttttgtatttttagtagagacagggtttcaccatgttgtccaggctggtctcaaactcctagcctcaagtgatccacccacctctgcctcccaaagtgctgggattacaggtgtgacccaccgtgcccagcctgcccattcattcttgaatccactctccccaagtttcctctgctgctctactatgctctaatctgcccttgttacgatcttcaaagcagaatccaatgataatattagttctcaggttaacacacttgcctcttacccctttttgcaatactcacttcacgttcattataccatgttcccttgcatccctcagacctcactggttctcacatctctagtttttcctaactactttttgggtgatcttgtcccatctcatggtgctaaatacttcataacttctacttttatgtcttcagccctctcctccctgctgcttctgtgagagtccatttgcgtacctaataggcccctcaaatgtcacatgtcctgacctaggctcctgagccttctctctccaagcattctttcctattgcttgctcagtagattctgtcttgcagttgctcaggccccaaactctagggacatccttgcttccttcttttctttcacacctcccttcaaatcttacatccagtctagttggcctcactatcagtatatgtatcgtcagtactccctctgcccaatttcttggaaaggtgacagtagcagcaactgctgttcaggcttcatgataccagcaaggataatacaaaaaaaggaagatgctggaaagttgaccaagaaagagacccagtaaataagtctggactcaagtccccaaataaaaaaagattcaaaggcaaactctaagacaagctctgtttttggtcttgtttcataaagtcatatagaaaaaaaatataaagacgtttccaactgtagttcataactgctgtattcatctgtgaaggattgatgacttgaggctctctgaccagggtgtccaataagaagtgcttagtaaagactcatcaggttggtttccaacacacagcccacattcagtctatacccaaaatagcaaagatggtgctacaccaactgctagtgaagatgcttcaaatgggcagtaagatagtaaatgtacacacccctgcaggtctgcttcacttttattttctttccaagtacagtttcaagaacagtttattaagtaaagcaaaaaaatagaaaagaaaatagtacgactcaatcagttcactccatatcaatgcaaattcagatgcaatgcaactggtgattggtgtgtggcttccagttggccagttctgtagaatcattcccactgagtgattcaacacccaatgatgtgaccctgcattttacttgatttactttttaaaaattctgctcagcattatggaggatgttactccataaccagacgcaggcatgaccatctctcacctggattattgtaataacttctcaccaaatcttcttgtgcagccagagtgattctgttaaaatctgagttggattatgtcactctctggctcacaatcctttatggctctccattttcactcagagtaaaagccaaagcccttctcgtggccaacaaggccttgtggtactctctccttacgttacctccccagcccctcacttcatctgctgctctttcccttaattactttgttctggtgacattggtcttcttgccgcaccttgaacacaccgtgcttgccgtgcttggtcccacctagaggccttgtacttcctcttccttctgtaaggcacttcccctaagaatctcactcacttcctttagggctttctcatggtggttatcttgtataatacatgtgggtttcattaattttttttttgtctcctcctctttcccacacacttgactgtaagctccacgaaagcagggatttttgtctgtttagttcactgctgagtcagcagatcctagaacgtggctggcacatagtagcactccataagtatttgtctaatttgaatggattgaacacataatgttccatgcacatgtgaggtattatccagaagaggtgggattcttagatttctctctatggttccttctttgaatttttacatgttaaaatctctgctgtcatttttctcccaggaccactgtaatattttatggagcctctttttttttttttgtaacaggtctaaaacttttagcaaatcttttttcttctcctgtcttcacttttctcctccccaagtagactgcttccacagtattttggggttgttctagtttttgtaaactttttctgaggaattctttgtgttgaaaaaaccacctatatataggattagattctcatatttttgagaatcctgccccattcttcagcatccttacaagggactggactcatgtcccaaagtgttggtggattccaaccattcggcatgtcctcgctcatttatgtcttatggtctggtaagttaactgccttctgccgtagagttaagtaaagacagccatgtcgctgctcttttagtgaattttggctgttcacattattcttcaagttatttagaatataactttttagattcactgaggatattgcatctacttgggcaaaaccctgaaagcccctaaggatttagctgaacatgtaattcatattgaaacccaccttctcttgccttatgattttctgattcagtactttcttctagagttttttttctttttttgagacagagtctcactttatcacccaggctggagtgcagtggtgtgatctcagctcactgcaacctccgcctcctgggttcaaacaattctcctgcctcactcagcctcctgattagctgggatcacaggcgtgtgtcaccacacctggctaatttttatatttttggtagagatggggttcaccatgttggctaggttagtctcgaactcctgatctcagatgatccgcccgccttagcctcccaaggtgctgggattacaggcgtgagccaccatgcctggcctagagtttttttttttttttttgctaagttaagaaataaaacagtaaccaatttctgaaggaaaaagcattaaaatattgatgttgcttttctgcaatacttataccaagaaaatgcaagagagtctcaaaagttgtgtagcttaatttcctcttgcaaaaatataaagtactcccaacagtttctaattttgatgatcttttacaattactgttctgtgttgtaatggcctgcgttttaaaaaagcttgaaattgttaggagacctttagacatagaacttggtaagaagtgcagagataggatggcatagaatggggaaacatgccagatcaattgggacagaaaatttttcttaactgcttttcagcatttatataggttcttccatgagcaaaataaaatatgaacctaaatagaatgggctcaaacagtcataataaactcctttggttattttcagaaaatctatattcacaggtggcctgtgttaataggtgaattcattgtattttggtgtggctatttgtataacaaaacatgactaaatatgaaagatgtgtatgtctttttctttaccagatcttgcgccagtttttaagcaagcaaattatgttcatgtagtaaaattttaatctgtattgggaatagaggtgggaatagtagtattctgtttactgtggatttggagtaaaatctagaaatgctacttaatcagcatattgtaagcagaaattactttttgtcttttttacaaaaaatggacatgagagctcactccgttgcccaggctggtctcaaactcctgggctcaagcgaccctcccacgttagccttccgagcagctgagaacagaggcacgtgcaattgtgcccagctttagaaatcactttttattttaattcttatttgtaacatttcataaggtattaggctacttttcccagtcactaccgtttatacaatttagttttaatttcttaaaattttatttgaaattgtagaatgtcttaatcattcagaatgtgaattgtcatggaggtgtcagagatgcaatttaatttctcctgatagcagtatatcttgaaaatattttgcttaaagatttatttatccttgctgtcaatttgtttcttataatttgcctcatagaaacattcattcaaaacagagtgctgaaaccaaaatggaatatacaattaaaaccaaataatttttttcctgctaactacttcccagcccccagactgaactcgtgattgaggttctatttacttttgcaaacagatgaatatttttggagcagtggaggtaggagcatggtacctaagtccaagttgcaccattttgtgtggctgtttctttcttattttgcattaggaaacaggtgcaagaaaaagaaaaaaaattccacttcatcatcgtagtagtatctggaatctcattccccataaccaagaagaactcatttattcttggccaccctctctcttttgttattctaagttgactgtggacagctttgatgctgcccctgaacttctatgagtccccctgcccttgctgccaggattttagaatctacccttctcctatactaggagtggtaagaaaataaattcgggtagtagtgccatttgatgattcattttctttttatatgtgtcctttaaaattaacattgacaatttggagcccctttgtaatgtggatgatagaggaaaagctgtgattgcttataggctgaatttaggttcatctgaaattatgatgtatctcagaaacatcataattccttggtttgggagtggtaataggattaggactgttgagactgtagaaaaagcacattgtttttcttagatgtggatgcttgtttggggtggtgtaggctgatggagagtatttgagacagcggctactctttcttttttttttttttttcccagctgctactctcaatgcagacattgctctagaacaccctgtataaactatatattgccacatctaaaccatatagtacttcattaaattttgaacatttaaaatattttaactatatgagacaactatgtggtgcatgtgttaattagcttgattgtgataatcatttttcaatgtatatgtatataaaaataacacattgtacactttaaatgtatacaatttttgtcaattatatgtcaataaagctgtaaaaaaattttagataatgcacaatggatcccatactttgtatttattcctatataccttgatttttaagcaccttattctttaagttcattttgttgccgaatttgagtgcattctccctagtccttattaaagagggtacaataatctttcatctgagatacaattgatggaattattttataggatcgagtacattttaaagcctaatctttctttgcttacattgaatattatgaccataatattatgaaatgttattctgaaacttggtctgagttctcttacgtcatcagaaatttctgcaaattcaatctgaaatcaacacatgggcactttttttttcttttttatggtcttaaatacagaaaatcataatctattttaagcttagataaatgatggaacacttgtttacatgggtaaaatgactctatctaagtagtatattgaagttcatgttaatgtttgctatttaatgacacctaatgatattcagtgaagggttatgctaaaccggagagaaaatgtgttacccaggcaactgcctctggcagactagagattcgggcatatggctctatagtacacattatttcagcatctttaagcataaagaaccacacatgtaattgactgtgaaaaattactgctcagttactgtattgtatggtcataatagaagtaaatgaatacgtcattgttgttggaacaagtctgttgggaatcacttgtagactctactatttaagaagcaaaaatacaataagaagaaaatagctggtttaattaacatgtaaaaattgggttaatttgaattcagctggcacagcagatattaatgttggcttttttttgtgatattctggctcaagcctgggtatttttatttcttcttgcccacaccatgaataattttatttcttaaaatgataagggctatttcagtcatttaatttttgctttgccagggacttttattacagtcacatcaagagaggttttgtgtgtatccaaaatgtaggaattacagttgaatgaaagaaaatgccaaaatgttcccgagtaattgataatgtttctcaaagaggaatcagtataattttgatttcatgtattttttaaaaattttagtttactgctgatgtatttttatttttttaacagtgacaaactaggaattgatcaacggcagatgcaagaaaatagcatgttcttgtcactttttgtgtgcctatgcttatgtgccttttgttcgttttagaatattgttttaatcatcattaccttgcttcagagattcagaaaaacctattgagaaaggcattgtgttccaattaaaaaatcgtttagctcaatcaatttttggtattttaaaatgttatttgagctgagaacaaacataggtaatatgggcattaactaaaagtatgtatgggaacattctgttccttgggctgtgccttcggtaccctgtaggtacttttgtgcttttcagccctaaatcaagggaatgatcaaactggagactatggttagagaagtgaaggatttggcagtgtgtgcccttgcatgcaggccagtctttctgtccttgggtgcattcaaagtacctggttatccagtggtaatgagaataaaccaacatgctgctttatatagtgtaggccagtatacgctgacaaattcatatgcctgctggcttttcagttactgatttcttatttgtggtttccccactatccttcttcatttgccattttaataacattgagacctttttatccagccttaattagtagaacaaagaaagatttaggaaacctaggtttttaaatctgctttatttgccttaatcagttttccatcatggtttacaattacttttcccttttttcctcaatggtctttctttacctcttttgatttcctcctgctttgaaggcaatacgtaatttaaaatgaggtatttatggtgttttttgtttgtttaaacttagtagacttttcctttaaaaagaagtctttggtagatctcaaaatatccatgatgtaattaaaatgcagactatttgtcatgcacattattaaattctgctctcagtgttggtaattatacaaaataggaacaatgtagtataataagatagcttttcggggtttttaaatgatgtctactagtatttaagaaataaaggatatttatctaaagaattgtggagatggtgaatatgatttgtctctagttttaaaagcttgtaggcttgtagtggttcttttccttgatgtagaatcatctttgtagggattggccgtgatcggagcatttttgtgacttgaaggttaaaagagaggttgagggaggtggcaaggacactggggcagattctcctcatctcattgagtaatggttattttacagggagggaaagaataaatggggtataggaagagtaaagacattttctagtgttacttgaattaactacgtactagcaagtgagaactagaaaagggatgaatcatacctgtcaaatgtgcttgatccatcttataagaaagagaatgttggaggtataagaataccccagtaaatccccctggttggcacagtcagccttgggcaacttgactgctgtttggagtcagctgcaaggcgatgggctgccaagtagagctggcagtatggacagatcacttactgagttaagctcacaattacgagagcctatatatatatatatatacttttgccaatatggaggcagtgatatatgcagaggtgatatttataggccaaatttgtgataacgatacagtaaaattgccaataaaaatctttaataggtttttaaagccaggcagtagcctgcttgtttgaacaatattcaatctgccagatttcactggagccaatgaatttaaataggcccttggcaaacactgcagcgagatttgaaccagagtacatagtagagctgaagagccctgctggcctcagaacacatgcactccagggaatgccaaggtcctttctggagccagggtgggcacagaatggctgcctgtaacctaaaatggaagaaaacaggattttagaatgaaaggcatccgagaaaagcaccttttatggaacaagaaaggatatctgttccaacttgtccaacaaggtcattcagccagttaggcaaaggtaagaccctataggactcagcttctgtccaccttattcctgatggtttttagaagattgggtaatcactcattgtctcttttcagatcagattagaaacaatagtcatgaatttgcataattggagtcgtgagtcttcgtttgtgtgcttgctgaccatcaactaacatattaaataaaaatctttacttaggagcatcctcttcatctgcctaactggtagtttccatatcctcagtgacttccaagcctcagagtctgtgcctgtgactgccatagcccctggccactgggcctcctcttgatggggaggggctgagcagctcctgggctttaaaaactgcttgctgtgacttccaggacaggacccccccagaccccacgtaattaagccttaacagctgtttagaaaatgtatcccagatttgactgctccttggttctcttgctacgacccaggtttagcctactgtagccgcttctaactgggctcactgcttcacccggcggcccgtgctccacagtgtcttgagtgttcttcgtaacctttctaactctgaggcgagtcacatcactcccctgcataaaacccttcaacagcagctgatttccctaggaataaaatccaggcatccttttatgcccggcacctccctcatcctcatcccctttcccttcccctgccttctctactctccagctgctcgaggtctccctgccctttggaacttaacaagggtggcctgctttgggcgctggcactgatgtttctcctcacatccctgtcctccaactcttttcctggccgctgcttttcaccattcagatctcaatacctcctcaccagaggcttttcctgaccgctttaggcaaagtagccttatctcccaaccccattactctcctgaagttgattttcaagcctggctatgtagtacaatcacttgagaagtttaaaaaaaaaccaaatgagtgtttaggcccctctacagaccaatgaaatagagtatctggggctgagaagcatgattccaaggcgttgctctattttaccctatgcagtggttgtctaattctggaatttttatgtatgcatgtgctcatcctccacccatctgcaaatgtggttccttgaggacatagatgttgtcaattttgaggtatccttagtgcctggggcatggcttatcatataataggaacagggtacacatttgctttgttatcaaaaagagtcagactctggggccggtgtggttgctcacacctgtaatcccagcactttgggaggctgaggcgggtggatcacctgaggtcaggagtttgaggccagcctggccaacatggtgaaaccctgtctctactaaaaatacaaaaattagccggggatggtggcgcacgcctgtaatccccagcttctcaggaggctgaggcaggagaattgcttgaacccgggaggcagaggttgcagtgagccgagatcacgccattgcactccagcctgggcaacaagagtgagactccgtctcaaaaaaaaaagagtcagactgtaaaatattggaagagatttattctgagccaggtatgagtgaccatggcctgtgacacagccctcaggagatcctgagaacatgtgcccaaggtggtcggggtgcagcttggttttacacattttagggagacatgagatttcaatcaattacatttaagaaatacattgattctgtccagaaaggtgggacaactcgaagtggggcgaaggcttccaggttataggtagagttaaacattttctggttgacaattggttggagtttacctaaagacctgggattattagaaaggaaatgtctgggttcagataaggtattgtagagaccaaagtgttcattgtacagatgaagcccttaggtagcaggcttcagagggaatagattgtgaatatttcttatcagacttaagatataatgagacatgtccaacccccacttcccgtcatggccagaaacagtcttttaggttaaatttgaagagtgccttggctaagaaggaagtccatcaaggggtcttagaattttatttttggtttacagcttggttgcctgaataatgtgtatttgcaaggaatatgggcgggaaagagaagagctataaaagccaaaagctattaaaagatgttaaaaatcatggagaccaaagctttggataaatttggataaactggtgatcacaggagagtccagttccagatttttcttaacacccacatatacttgtgtggtctgatggttagaactgtgtttttggagttagattttactttcatctctgccattgaccctggacaattgcttggcttctgctgtaacacacagaagaggtataaggagaagttatttttgtgaagtactcttgtggttaggaaccttcagtaaaagtggtaattggattttgatggtacattgtctacaaccaaacttcctgaagtatgaacagaacaattcctatgtgctgttgcttaaactttcgtagccacagagttggcctggagataggagccaggcaggagatgaaagggatcacatggggtctaagcctctgctgagtgagaataagcgaggacagagaggaggagaagaactggaggttgtccgttagtgtgattctttcagatcctttgtttcttttttcaatttgtcttcctctccccaaatctcttatatagtcctcctgccactatctaagttgaggactttgctattttgtttcatatgaatttttatttttttcttactgtaagaacagtgcagtatgtatattattgaaaggattagaaaatatggacaagcagaaaaaaatcttaaatttctaacaatttaaccacctagagatgatatccactgccaacactttggtgtgccttcttcagactttgtgtgtatgcaaaatattattgtccatttttaagaaacaaataattttctacacatcattgtgtaaatgactttttacttactaccatggatttgtttataacactttttagtggttggatagtatcctgcatatcaatgttctgtattcagtccatcacatattgttgtatattgaggttgtttgtacttttttcaccattaccagcagtgctgggtaaatatccttgtagattaaagtttgcacgcatttatgaattattttttaggataaactcctagaagtgcaattgtggtggctgaggagtaaagaggtgtttttttgtttttgtttttttctaactgcttcttgtggggcagggctaacccataggctacccagagtggccataaagacatctttgagactcttgctgtgttgtcaaattgttctccggagatgctgcactcccagcccttggtataaagtgcctttctttctttctttctttctttctttctttctttctttctttctttctttctttctttctttctttcctttctttcttttcttttcttttctttccctcccctcccctcccctcccctcccctctcctctcctttcggctttcgtagctcttccctggattctgccatcgcatctcctcaactctggtctcttccccttaagttcatttaacactcctctgtcagattaaatgttctgatgcacaaattgatcacatcactaaaattatcagatcttggtctaccatcacaggacctcataatcaggatgtgagcaactttgtagggtttttttctttcttttctttttttttttttctagtagatggtgtctcactctgtagcccaggctggagtgcagtggtgcagtcatagctcactgcagtcttgaactcctggactcaagtgatccttctgccttggcctcccaaagtgctggaattatagacatgagctgccacacccaaccccggcactgtattttctgttctagttttcctccagcaaatatggatttcttgtgattcttcatctctggtcttccttccttggtacctggcttaccttctgcccctctggaccaccatttctggggagcagagattgcgtccctagaactgccctctgccaaacatgtagaataggcattgaagtcaaactgcagctggtggactctcctcccgcatctcccatctttacttgatcacatttcacttttattgcaagactgagttcatgttcaccaaacacatcttccttctggtgtcatgtgttcgcaatttcagtaaggctttctccatctcctttcactcaacatgacagtaatctttccctcctctgaattcattgagtcatttatttccagttctcttatgttacttaacctactttttccataatatcacaatttttagtctgtattctctattatatttcagatatctccaggctaagtgctatcccttgcaaagctggggggaggagggacctaaagttacgctacagtgaagaagcaccatcatcattttggtatatatcttgtagtacctttccacatatgtgataaatgattaatatttacattgtgtaagcatagcatacagatgcaattcacttttcaactctttcttctttggcccagtattttatagtactacgcagtgctttggctattttattattacttggactataaaggagttacaaagtcgctactgttataaatggcttccagaaggagaacagcagctctaatgctttgtaaaacaaaaatgacttgcttacagaaaatatctagtagcatcagaaccatgaaatagagtagttagaaacctaccctcccctaatctctgagtggtataggcctgtggaaatgtgacttgtacatttgctttcatgttagctgacccatgttctactattagttcctgcagataagtgtggtggcaaatactgttccttagattctagtcatagagttaatcagagctgcatgattcattttaaagggaatctaacattgtcaaagaagttctgggagttgcgggtggaaaaggaactaagtgagttcaccagccaggtctgaacttgattaagcttgaattctttgttgtaacttacgttaatgctcattaaatctgtaaagcaagacggaagcactgtttgtctatatatatatatgtatatacatatatatatataaacatttttaggtatcatgctgtaaagtaatatagtactacataattattctcatggccttctagtcagattaccttgaaaatccaaaatgatcttggtgaacaataatacattatgattttatggttcatctatatacctcctgcatagatgtataatactcatatctaacaggattaccaaattacataccttttggtatcagtaacatgcctgaaataccagagtatttattggctattctcagttatgaaacattaacattgccagacaaggctttgtatatacatacatacatatatatatatatatatatatatatatataaaatatatagtcatatatataatatatattatatatatgtctttatatattataagctttgcatatgtatatggtctcctatatatgctttttttatataagccttttatatatattaagcctttctttattcagaccatgaaaccaaaaacatcccttttctagataacgcatagtgtgattctatttaatgaacctaatgtctgtgaaggggtaattaagcaaatatgattgttttcggcctcaacaaactgccagcaagttcccctggagagcagcactgtgtggctgcgtggctgtgggtgcctgctcagcagggttgggggatgtgaggaggcgtggcgactgggaagcaaagggccagaaacacatttgtcttctgtccggcttcagaagtctatagtgtggcgggcctgtcggtgaattcctcaaggtcttcttttattacagcatgtcttaaaaggaaaaggaaaaggaaacatctctaaatgaaatgcttgtgggcacttttattcacagctttaagtaacctttctttaaaaactgccagatctgtgtttccaatcttggcctctatattagtttcctcaggctgctgtaacaaagtactctaccgcaaactgggaagctttaaaaaaaaaaacaaattagttgtcctaagttctggaggctagacatccaaggtggaggttcagcagggttggtttcttctgagggctgtaagggagaatctgttccgtgcttctttcctgtcttctggtggtgggcgggcaacctttggtgttccttggcttgaagaagcgtcaccctgatctctatgttcatctttacttggttttctccttgtgtgcatgtctgtttttaaatttccctgttttataaaaaagactccagtcatattggattaggtgcctgccctactccactatgatctcatcttaactagttccatttgcagctaccctatttccaaataaagtcacattctgaggttctaggggttgggatttttggggacgggggacacagttctgcccataccagcatctctcttgagtccattgggtctcttttggcttctggctggacactgtactacatgtcccactgttacctcaaacacagtcacagttggttacattctcccacaggtcccttctttccaatttttacctttttttcttttttcttgtttatctttggtggtggtatcatcatcccactcagttatccaagttggaaatgttgggaacatcctggcctgtttccttggccttggcctccaacatccagtcctaaccacattttataatttctgcctctgctgtgtttctctagcctttcttctgcttccattcctagggcccccactcaggtttagaaccctgtgatccctggctgccaggctgtctcccacatctcatctctcctttaaattcatcttccacaccagttctttttctaaaacaaagttttgaatgtgacatttcttaatccagaaactgagtgatttttaactgtctgaaaaaaaagtcaagattctgttgcttggcccttaaggtccaccctaggtggctggcatctcgctcttgccagtcttttgctcctcatgacctgctagatggagaattggtaactcctacatgcttctccaaatacagcacatccatttgttttcatctctgtactttgcttccccagtgtagaatgtcctctctctacccttccctcctctctccattgtcaccaaaccaaagtcggtccatttgcctgcacaaaatggaaagccaaacacaaagcaccagttttttgcagcaagaaagtttattgccaggcaactgagtaaggggagaggagtcacactcaagtttgactttctctaccagccttacagccatagatttaagggagggcttctgagtgtggagtttaggtggtgaacagtgattagtgattggctgaaaggaaagggggtttggaaagtgtcttgggcatgctgttgcccttccatgctgcttcatgggttgcacctttggacagtggtggcattagcttgaactgagggtgagtttttggccctctaacgtcaaaaggttactcaacaggagaagaagtctattctgcccagactccagtcagctatgttggttccaaccagcctcagtctgtcagccaattttgtggcaaacagagagaactgtaacaaatggttttcttctctgctgtcctgcaagacaagcttaataaatttttgttagttaccaaattctttaatcctgtggggcatggtttcaccatcttcccacagcagttggaattctacccaggttaaatggaagccaggagacctggttttcaggccaaaatgtcagaagccagttgttttgcctaacccaggtcattaactttttccagtttccgtttcctcacaagtaaaatgaggaggttgaagtagataatccctaagatcttctcagctttaaaatttgttcttcaaataccatgccgccatgaagcagtccccaactcttccaggcagaataattcaccccttttatgccccttagtgctttactttttcttttacagttaactcttaatttctagtggttatgtgtgctcatgactatctccccttcctccaaacagctggtggtaagctcctggagttcagccaggaatgcttgactcatatttgccccccttcttgcctcctacgcagagtctcggtgagagagaccttagtagaggataaaatgtccttgggaagtactcccctgtaacacatgctcttcctgagtgttcccaggcattgagaagcatgtgttttggatggttaatgatacagagatgctatattgaacacactgcgtttttcctttctttgtagcattattgtaattgggtgacattctgggaaacagctaagttcactttgtaacagtttttataaaaatgtgttctctctataggatgtttagaagtaactaagttttctgtaaaatatatgaaaaccattcctattttcttcctccttccatatcctccggaaacttggagtatctcaatgtatcattaaagtatttggatacttaaaatagcagttgttaaaaaataaaatctaggaaagcttttatggacccatttcctctttggaagtcaaaacgtccttggcctctcatgttcttcctaaagcttagatttgacccacattttgaccttcggaaagttaaagtcactcctttttcctagagaagaatgaccaggcccttttctttcttcaaggccacctctggtcctatatttctaatcttattttacattgttcttttatgcactccactgtccagacaaaatctgtcactcatcagtttccctgtacactccttagctttcttgcattagccttctgcctgaagtgccctctagtctacacccattaccgcatatccaagttgtactcattttttaaggcctagctcaaatgccatttctgccacaaagacttttattaccatactagttcttgtgttatgatttgtccttcctctatacactagtctgtttctagaccagtgctgtctgcctcactagactagaagtcccttggggtcatgtttcatgtatcatttatctgtattccccttgtactagccctaggtcaattcacaggtggtcagtaaataccagtagtgaatcaatatctgtgaaccgttttttgcatggtgtataaggatactaatgcataacaaagttgctctattttgctgttaggcagtcacatcttagtctaaagtatctgcacttttattatagaacccaaaaacatgcctgaaggaagactgaaacatatatgatgctggataaaacagttatatttgaaattataatgtatttagtgtgtaacttcatggtcaatgctgtcatgtcttttagattctgtgcattattatttcagtccactatatgtaaaagtaaatgctaaatgtttataaatgttttcagtttgaattttatgttttggcagtgatatcttattttttccctcagtgtatgtttgtatatgcttctgttttccacaagctactgacttttgctttatgtttgttttatgttgcagattaatatcttttcaagaatttgttgcctttgaatctgtcctgtgtgcccctgatgctttgtttatggtagcctttcagctgtttgacaaagctggcaaaggagaagtaacttttggtaagaagcatgcttctgtgcacgtctgtgtaagtgtggacttgtgtgagcattttcttttttttttttctaggaacaaaataaagtgtatggaaattctttatagaagatagtatatcccttttagtaaagatacttcaatgttttggagctccagttcaaacatcttcctattcgaaaaaaacaagtttctggcttagtagttttgatactctgatttagttttaaggtgagggagatgtggcatgactgttttcatagagtcatagcatgtgagagccagacaggacttctgtttcttccctgcatcatcagtagtgctttccactgatagaacgaagaagtgaataatctgcctacacacagaagttacttatgcaccctatacttcttgtcttcacgttgttcccatggagtagtttgcggccagagctgctgcacaagatggtggttcagaatggtacatgaaggaccttgttctaaacaacccccgctcccccgacctgactgctgtgctggcagtgtctgctctcctgtggccttctttattttgcaaggcacaaacatcatcatgggaattagctacaaagctgcagaaaaccctgatgtttttcaaattcttagaagaaagggaaggcttggaagtggtgggacagtggtaagttattttttaaaaaactggctactaaggacagatttaacggaaagtaccatgtttcccttggactctgtggtgtccagcatatgttgtctctgcatgcaaatctgcagtagcattgctcatgaagaattttggagccctttaggcatgtggattgtgctttcatgagagatggctttaaagattagggagaatgtggcatgactgttttcatagcgtcatagaacgtgagacccagacaggacttctgcctgtcttgtgcttggcatgtgcccattttaagtgtctctattcatagtttctaattcattcagacctttgggacttgtcttatttgatgtattgtggaaaacatacagatatgggaaaaatacagatggtgtaacagtgttgcttccagaatcagataagcttagccccttccagctctgctgctgttgtctctgagccaaattagtgatcctctccagtcctcatttatcttatcaagaagtgaatataataattagataaagtattggtaagatagtataatagatttattgtgccaacccccttcgccattccgtcatactcatttggcatgacagaattaaaggttaaatcatcttgagcaaagacaaaaaattatatacttgcccggtttctagaagatcagatgctttccattaatacttcatgaggattatttaatatttacagatcctcagaagaaatttatttccatcacccagttcctcttagcaccactgcaaccacaacttttcaatggaataccaatttttagaaagtccccatttaaatcttcaagtaatgagtaagcagctagctcatggtgttattgatttactcaatggaagcgagtttggtgacattgttataatagcgtttcctggggatgaacagaggaaagcctgtgagtgtaagcatgttcagcataggtgtgttctgtcttgtcctcctactttccccagcaagtctggatgtgaggaatggaagagagttcgatttgatattagaggactgagaaatgggcttcaggtagttccttgatatagatccatcttcccttcatgcgtgtgaagtggcaagggatattggtgacaccagctttaccactggtcctagaaagacgtaggagacttccaccattgcagggcaaagtgtgtgtgttagtgtgattagaagaaaatgatagtgaagaagcaggatgtaggaaacaagagctgtctttgaattgtagaaggcatagttgcataaggattttgtttctgcttcttactagctgaaggacaagtcatttcaaccctctgagctttattttcctcatctctaaaatcggggtaataactactttacaggactatgtaaggattaaaagattcactgcataaaaggcactgtctgaaaaacaaaggcctttatacaaatagtgatactaaaagaaatagcctaaaagaggaaaagattttctgtttttttttttttttttcatttttctttgggaagcccttttttttaaaatttttttaaattttttttttttaacgtaagttcaggggtacatgtgcaggtttactatataggtaaatttgtgtcacaggggtttgttgtacaaattatttcattactcagatattaaacctagtacccattagttatttttcctgattctctccctcctcccaccttctaccctccaccctctggtaggccgtaatgtctattattcctctctgtgtccttgtgttcttatcacttagctcccacatatacatgagaatgtttggtttttggttttctgttcccacattagtttgctaaggataatggcctccagctccatccaagttcctgtagaggacatgatctcgttgttttttttaatgactgcatagtattccatggtgtatatgtaccacattttctttatccagtctatcattaatgggcatttaggttgatgccatgtctttgctattgtgaatagtgctacggtgaacatatgtgtgcatgtgtttttatgacagaatgtttatatttctttgggtatatacccagtaatgggattgtgggttgaaggataattctgtttttaggtctttgaggaatcaccacactgttttccacagtggttgaactaatttacactcctaccagcatttacactcctaccagcagtgtataaatgttcctttttctctgcaaccttgctagcaccagctattttttgactttttaatagtaaccattctgattagtgtgagatggtatctagttgtagttttgatttgcatttctctaattaccagtgatgttgagcctttttccatatgcttcttggccgcgtatatgtgttcttttgaaaatatctgttcatgttgtttgcctacttttttcttttcttttttttttttgagacagagtctcactctgtcacccaggttggaatgcagtggcacaatctcggctcagtgcaacctccacctcctgggttcaagcagttctcctgcctgagtttctcgagtgcctgggactacaggcgcgcaccaccacgtctggctaattttgtatttttagtagagacgtggttttaccatattggtcaggatggtctcaaactcctgacctcaggtgattcacccgcctcagcctcccaaactgctgggattacaggcatgagacaccacgcctggcctttcccccactttttaatggggttgttttttcctggtaaatttaagttccttatagttagttgctggatattagacctttgtcagatgcatagtttgcaaaaattttctcccattctgtagggtgtctgtttactctcttgatagttgcttttgctgtgcagaatgccctttagttaattaggtcccatttgtcaatttttgtttttattgcaattgcttttggtgtctttgtcatgaaatctttgcccattccactctccagagtggtattgcctaggttgtcttccaagaatatagctttgagttttacacttaagtgttgtttgtttttcagatgaactcttgctctattgcccaggctggagtgcagtggtatgatctcggctcactgcaacctctgcttaccaggctcaagtaattattgtgcctcagcctcccaagtagctgggagtataggcatgcaccaccatgcctggctgattttttgtatttttcagtagagacagggtttcaccatgttggcgaagctggtctcgaactcttgacctcaagtgatccacccaccttggcctcccaaagtgttgggattacaggtgtgaaccgtcatgtctggccacatttaagtctttaatccatttcaagtttatttttgtatatggcgtaaggaaggggtccagtttcagtcttctgcatatggctagccaattaacccagcatcgtttattgaatacagaatcctttccccattgcttgtttttgtcagttttcttgaagatcagatagttgtaggtgtacagccttacttctgtttataagtatcttgagatatcaacaggtatatgacagggtgttggtatgactggtaaattctagttaatttgtgattctgtatgtgaggagaaaaaattaaatgtttccatttgtatttttagcctattgtatgtgacagtgattttttaaagtacactttgttgaatgacagcatacatgcagaagaatatacaaatggtgttaagtgtacatctttctgaacttttacatctggatctgcttaccacgagccagatcagaaagaggatggtaccagcagtttagaggtctcatcccagtcactgttccccaatcccaatggtaacaactgacatttatcactatcaattggttttgcctgtttttaaacttaatttaattggaactatatagaatgtactcttttggtctggcttcctttgttcattttatttgtgagattaatccatgtcgcatgtattttttgtttttcttcactgtattgaattccattatgtgactctatcctaatttatttatccattctattgttgataaacattttggaacattttcatttttggctgctgcaagcaatatgcttttgacattgctttacatattttttggtgtgtatagacatttctaggaatagacttgctcggtcacagaaaatatgtatatttagcttcagtagagcttgctaaaatgttttccaaagtaatggtgtgtctggaattggtgggttcttggtctcactgacttcaaggatgaagctgcggaccctcgtggtgagtgttacagttcttaaagatggtgtgtccagagtttgttccttcttatgtttggatgtgttcggagtttcttccttctggtgggttcgtggtctcgctggcttcaggagtgaagctgcagactttcgctgtgagtgttacagctctttaggtggcgcttctggagttgttcattcctcccgtccagagttgttcatacctcccggtgggttcgtggtgtcgctggcctcaggagtaaagctgcagaccttcatggtgagtgttatagctcataaaggcaatgcggacccaaagagtgagcagcagcaagatttattgtgaagagcaaaagaacaaaagcttccacagcgtggaaggggaccagagcaggttgccactgctggttcgggcagcctgcttttattcccttatctgccccacccacatcctgctgattggtccattttacagagagctgattggtctgttttacagagagctgattggtccattttgacagagtgctgattggtgcatttacaatccctgagctagacacagagtgctgattggtgcatttacaatcctctagctagacataaaagttctccaagtgcccatcagattagctagatacagagtgctgattggagcatatacaatcctcctgctagacataaaagttctccgagtccccacccgactcaggagcccagctggcttcacctagtagatcccgcactggggctgcgggcggagctgcccatcagtcccacgccatgcgcctgcactcctcagcccttgggtggtcggtgggacctgggcgctgcggagcagggggcggcacccgttggggaggctcaggctgcatgggagcccacggggttggggggacttgggcatggcgggctccagctcctgacagccctgccccgccgggagtcagctgaggcccggtgagaattcgagtgcagcgtgggtgggccaggagtgctgggggacccagcacaccctccacagctgctggcataggtgctaagcccctcagtgcccagggctggcggtgctggccatccactccgagtgcagggcccgcggagcccacgcccacccagaactcacgctggcccacgagcactgtgggcagccacggttcctgcccacacggtctatctccacacctccctgcaagcagagggagctggctctggcctcggcccagagaggggctcccacagtgcagtggcaggctgaagggctcctcaagtgtggccagagtgggcgccgaggccgaggaggcgcctagagcgagcgaggactgccagcacattgtcacctctcagtggtaccagttaacactcatgccatcattgcatgatggttttattttagatctttgccagttggtatcagccatttttattttagtgatatctcactgtgtggcttcaatgagcatttatttccctgattcctaatgggttatatgacatttttccatatttattggccatttggctatcttcttcagtcatgtgcgtattttctggatacaagacctctgagggttatatgtttcacagattctttactctgtgacttgcactgtaactcatttgagtcttgaggaacataagtttctaattttaatgtagtacaaattatcagcattttcttttgtggatagctctttttgtgtcctgtttaaaaaatctaggccaggcacagtgattcccacctgtaatcccagcactttgggaggccaaggcgggtggatcacctgaggtcaggagtttgaaaccagcctgtccaacacagtgaaaccctgtctttagtaaaaatacaaaaatgagctgggtgtggtggcagcacctgtaatcccagctactcaggaggctgaggcaggagaatcgcttgaacccaggaggcaaaggttacagtgagccgacatcatgccattgcactccagcctgggtgacaagagcgaaactctggctcaaaacagaaaaaaaaaattctttgttttcctccgggtcaggaagatattctcctatgttatcttccagaagtttgctttcctttcagatttacattttaatctttctagaatttgttatatttttgcatggtactaaaggtaaaggtcaagattcttccctggccctcttccccaaggatatgtcgattgcctggcaccatttattaaaaagatggttcttttctttattgcactgcagtggtactactatcataaatccagtatgggactgtatctgaatgctccattctttttacattattgtatattctccgctaatactatactatcttaattactacagctttataagtcatatctggttaggttttcaactttattctttaagattatctcggctattcttggccctattcactatcaaaacaattttagagtaagtcattaatttccacaaacatcctgctgggatttcacatgctattgccttgaatatgtataatatctatatgtatatgtataaataaatgttttattcctttaagaatttttaaagtttttaaataaaagtttatttaataacaagtgttagtctgtctatatctcactactctggaaattttgagttgatgaacactacaaattttgaaagagaaaggaacacatctatgttatttgttatctaaagatgctggtgcatgtgtacaattttgcagataggactactgccaaggatgaatcagtgctaagtacctcagaaggaaggtagtagaaacgtgagctgaattttatatttgagataacaaataagtattaccttcttaaaagttcataaatatttcaatagatatattttactacatattgaatataatacatttaaagaaacttcagaattatgtgagttggaatgttaccaatactgtcaaattttggttaccatagtggatgggaggggtattcaaagggagtaaatcatggtggaagacaagcagggtaagaagaggaaagaaaaaatgatattaattgcctagtcatttgtaaccaaagcagagaaataataaataagggaataagctgtcattatattaattataaatctgtgctattatgtgaggagacatttacacaaatttgtttttgaaatttaaggtcttttctctttaaacttagtgtttcgaatgtcaacatagttttctttttctttcttttcttttttatggtgttattttttatactagatcacgggtggcaaacattttctataagggtaagatagtaaatgtgttggtgcagtccctgtggaaaatagttatggagattctgacaaaaatttacaaatagaagtaccatatgatccaccaatctcacttctggatatttatccaaaaatcaggatctcaaagaggtatcagaactctcatgttcatcgcagcactgttcgcaacagccaaatgtggaaatgacctaaatgcccatccacagctgaatgggtaaagaaaatttatatacatagaatattattcagccataaagtcctgccatacatgacaacatgaatgaaccttgaggacactacgagtgaaataagccagccacagaagacaaatattacatgattctacttatatgagacacctgaaataggcagattcatagaatcaaagagtggtggctaccaggggctgtgaggagggggaatggggatttactaatcagccggcataaagttttggttaagcaagatgagtaagttctagaaatctcctgcacaacattgtgctgatagttaacgatattattttgtacacttaaaaatctattaagggtagatctcatgttaagtgtttttttccaccaaaaaaaaaagattttattttcattttttgaaagaggtgaggtaattggtcgtgtagatatggggatggaggaggggagactgtcgcaggcagaaaataatagccatttcccgggttctaagcgcggagtctgtttgatacatttgaggaacgttttagggagagagactataaacaaatacaaaaaatatgatgtcagaatatcctgtttgtatgtaaagcaggctaagtgggtagaaagcatggaagctatctgagcagatctagaggagtgaccaaagatgcattaatactgaactggcatgatatgggctttgtattccatgaagggttggagctgtgggggtctggaagtgatggccactttggaagtgccacaaacagtggaggctgggaataacagaggcctggactggagtcatatctcgggaccccacctgggccattccttttttttttctttcttggtttctttcttttttttttttcttttgaaacaaggtctgtcacccaggctggagtgatctgggttcactgcagcctcaacatgcctgactcaagtgatccttccaccttagcgtcctgagtagctgggactacaggtggcgctaccatgtccagctaactttatttttattttcgtaaaggtgagtttaactatgttgcccagactaatctcaaactcctaggctcaagcaatcctcccgccttggcttcccaagatgctaggattacaggcatgagccactgcacactgggctgttcctgagagctaatctgtatgacttggctcccgattggccatgggtgagaggaagggggccaaaggaaaggaagaagaaccaggtggtagctactggtcttgttctgttcccaagatatgtggttttacataatctcatgagagaagtaaggtaaccatcatttttattttaaaatacatgccaacctctgggctaagtatttttggtataatttattatttaattattgtagcctagaaggtctatactattataattctcattttctgtagaggaaatagacatggggaagttgagtaagtggccacagtcatagtgttgcctgtgatggagctgggagagcagcctgatcctggctgactgttcttcactgtgccacactgcctccctctggtgttgatactcatgcttttggagcaagcccactgtaatccagataggtgtcagttagcccattgtggtctcagtctgtatcagacattagaaggatttaatatttttcatgaagtaaagaacaataggcaaatgcattagttacgattttttttcactatggtggaaagtaataaggaagagaacgtacctggcttagagttaccagtgtacatagaaagttgccttggttccagctatctggataacttgttgagatgcacacgatgtgagttttacccagaaaagctttatcttttgatatgaacagaattctgactgaaggggagaatcacaggacgatagggaagggtgaggagatggtctgtgtccaggttgaggatagaggggaaccatagtagaggaggcccttgattgaggggtgcagcttaagagacctgagtacttgggagggtggttgtcagggcaccaacgacagggccgggcccttaagcaagagtaattatttcatatgagaagcaattaggagtcactacaaggtctttggaggacagggataggatcagaatgatgcttggaagagatgatttttgctgagttgactagagtggggcaaagccaggggtaccatgccagtgatcattatttaggcttcacagtatctatgtgaagccagcgtatagtcaccccactttgtgagtggaagagctgaaagtcagggtttggaaggacttacctggtgtgtgagcaggttggtacagacatgttgtgagtgatagtttctcagacactttcctgttactgtatttcttatttaatgttgcggggggtgcaaaacatttccattgtgggttttaagaaagagtacctgtgtggatgtgtgggtgtgtttaatgaaactgtcgatctgaactatttggcatatataccagtgatgtatcttataatgctaatttaagacattacctattcctacttactgatatttcttaagttgttgtaccacattaatagcctagctccacagtagcagagagattgaatactacttttttttttttttttttttttttttcagagatggagtctcgctctgttgccccggctggagtgcagtggcacaatctcggctcactgcaagctctgcttcccgggttcaagcaattctcctgcctcagcctcccgggtagccgggactacaggcgcacatcgccacgcccagctaatttttgtattttagtagagatggggtttcaccgttgttgcccaggctggtctggaactcctgagctgaggcaatccacccgcctcggcctcccaaagtactaggattacaggcgtgagccaccgtgcctagccgagagcttgaatacctgcttttatctgaggaaagtcacaagtagaccccctgaaaattcaaagtatgatctatacaataccagtttcttaggttaaactcccaaatgttttcttgcattatgctattacatgtttctctcttcctttgactttttaaatttatttttcagtacactgaacaagatttcatgaaatatgttttacgtgcaattttaaagttatccttaatacctgaatgtaacccaatttcattacaagtgttggtggtaatgatggtgtgtgcatgtttatgttctgcagtttttaattaaactttaaagtcaagggttctcaactctttgcctggataagtatcagggagtctgtgaatggctatggttgtttgtaatatttcgtctaaatgagctttttttttttcctggggaaaaattgtgtaggttttagcaaatctcacagaggtcagtgagctgccctttaaagataaaagctgctttttatagaggggcagttgaactagtagacatatatcttatttaacacttttccagcattgctgttaaagacattgattgtagaatagtttatgtatgacttcaaaatgtaatgataatcagtttttggatgccttttggttttggatatatgaagaaacaaaatgtatcagacaacctatatataatacaagagacagattggaaaatacatttttctgtaactgaagtaaatgtagagtaactaacgaattattaaaaatacaaaaagagccgggcgcagtggctcacacctgtaatcccagcactttgggaggctgaggcgggcggatcacaaggtcaagagatcgagaccatcctggccaacacggtgaaaccccgtcgctactaaaaatacaaaaattagctgggcatggtggcatgtgcctgtagtcccagctactcaggaggctgaggcaggagaataacttgaacccaggaggtggaggttgcagtgagccgagatcgtgccaccacactccagcctggtgacagagcaatattctgtctcaaaaataaataaacaaaataaaatacagaaagaactgtttggttggctggctagtgagacctctgaaagggaattggttctgattctcatgaagaccaaaatggaagaaactagtctacaccctgtgccacactgggaggcctgggctggctcgccactgcagctctgccagttagcatggagtctgaaagaaactggtccagttttgccctttattggaaactacagtgaccttttgtcctttaatcttcactattgaaatatattgtaagtttagtaactatagagaagcgtttcttgtttatgttaataagtggcatgtggaaaagggctctcctaagagagaatcataaagcctggaacttttaatttattaaggctctgagaagtcctgcggaaaaaataaatctatttaactttgtttaaattgtagtttagcaaacttattatatttgcaccaacttttctcttgtgtctctcccactaaacaaaacccacagaaccggggcgatttctaagctagttaattcttaattctaagcgagtcctcagttagttaattctctgatgtggatgtaattgtttggagggaccctttctgagttcaacttagattgtgtccaggaacacctgctatgatgaaattggtgtgctttgggaaaatgggtaggctagatgacattaggaaatgtgtggaaacacccactcagtcacttcgattcaggttgcagaaaatgatgggagttaaaagtatggaaatgagaagtttcgaagttaagcactcaaatttaatattaaatatataaagctagaggaatgctggtattggattggaagaaggcagactttacccatcatttttaagcttgctggaaaggaaggtcatttgttactgtctttgtaaagacacttcgaaaatgaaatattcgaaaagatagctgagggagaaggtggtgaagaatcagaagaaacgttacttggggaaagttcttcattaatattggttctgattttggtgtttcacaaaaataatgtgtcattttgatgaaagaaaaatattgccctgcagtagatttgattttattttatgagaggtaaagagggggctgagtatattctcttatacatgcttacatcccaaatagagagtaagaatttcgaataagaacagtatgagttttgaaagtaaatagtctctatgttgataagaattgtggcatgcctgggtactgagtatcttttcagagatcctagagactgtccagaaactgttccagttcattgggtcaaaaatccactatttacgaaaagctaaatacggatttgcacgattgaccataatggcttcaattttgaaagatagtagtatcagagagcacttccagttggtgggataatttaagaatcgcccgtgctcaaatggctaaaatattgtactttttgctacttcatcactccattttaaaaatagagagggggagaaaagaaggcagacctgttgagaaggtggaagaatgtcagttggagagcaaatcaaaataaccatgtgaagccactccttagttaactactgcctgaaggttaactgttccttagaagcctgtcagggagtggagagactggactgggggctgctgtccctgtgtgtgcatgtgcacctgtgtgtttgtgtgtgcatgtgtgtgtgtgtatgtgcatgttcatgtgcatgcatgatgaagggtgaagagaacttgtgagtaggaaagaaggtgtagagaacagaaagctaacataaaatcctgaaacttagagtcctaggaaaatttgactattttaaactaactgtactgcttatttaaagataggaaaattataccattcttcttctggtataagagagagataaaaatacagtttttctaaattggaaaatttgctgtaatcttgctgctaatgactgatttcttccaacagttgcaaggcagtttttgctctgataggttgataaaggaaacaaaatcaagaacatattggaaattctcagagaaaattacagtttaggtatatgttgggggtggatacttagacattttaattgaaataaaacagttttatactaatatgggatcactgtgggtgtacatttgtagtacatctgctcttgaagcatttaagtagggttaaatgtatgttaatgcttttgcaagaaaattttcgataatatccgtctaaggaaactagcttaggaaataggtttttgaaaacaatatagatattatatttgcatttagagagtgaattaggactctgtaatgctttaagaattttaaaacattagttgtattctctagtggtaatgaaagttaacaataattaacacacagcagatgattaaagcaagcttacacatctggagagtggccacagtctgctatatgcctctaaacaccattttaattgacctacttttgatattatgaaaggctaataatgatttattctacccagttgaaaatactttttctagcagataattggaaacatctcagttggcccctctgttgatttagttagtgtgtgtgacagatggttaatatcttacgctaaatatctgccagccttgagccattttgttgttgttgttgactcacagtcactatgatgacttaaatagtgtatgaatcttgagaattgatagatctgtcagattatagaggaggagggagtcttatcaatgaggtagaccatgggttctcattgtaatagtgtagaatgttggttaactgtggactccctggctctgtctcaaatctactgattcataatttttgggtgtggggcttgggaatgtgttttaaacaagctctccaagggaatgtagttcctacttcaaatgaacaatggctgagtatagtttatggctttctttcatggatgaggaaacaggcccagaggggaaaaggtgactagtttcataagaatcacaactttgacttctggcactagaaggatagggttctttcctgaatgccacatgaccttaactcaggctagttccatccctaagtacagaactggaagagttttaaattagccctaatttttacatacaccaataccacatatgactttagtataatatttggctcagcttggctgtgtgtgtgcttattttttgaaagatacctatcaccactgtacctacatgttcagaataataataataaaaagtttacaggggattatagagaactcaattttaatgtgaagtacttatgctctacttactatgttttaatggcaaccattttccccctagaagtttcttgagcgactctgaattgtagccagaatacgtctttcctcttcagacccttagctgtgattaatgtaaaaaggcacttgtcaaaagggtttgaaatggcaaccttgatattggagcatatggcagtagagataggtctgcatccacttactccattatgttatttaatgtacgaattcaacaatttgtcttttgctccctgcttaaaagatgatggccgtagaagctggttgttaaccatatcagcagggtggaatattacttcccttagagaaaaaccacaactttctttgaggatttagcatgcattagaaaaagcatgaaactgttcagagataaaatgctgggccttcagcagtcctctctttgcctccaagaggggttacttttatgtttaacacaaacatcccttttgtgtttattgtattaatggaatttttaaaatccatgagaaagagagagagattatggtttagtgtttgaaataatatagcttgatgaatcttttttattttaatgagaaactctttttcatagatatgctgcttcaaaaagtgaatcttttagaaattaaaatgcattaatttagttattctgtatggaaacaaaaacatggaaagttaaaatttgcataagtgaagaccttgatgatttcagattatagtgtggtggaggttaaggaataagagtccatagaatttgtaaaaacaaattcagtctaaccacttaatggcatgtgcaagtaatttgccaattaaatatctctagtgtctgaaagatcttcagagaaaagagtggaggttcttaatctttcttaattttatactttaagaaacataatagaaaattacttagtttttgatcacttttcattcaaaattttagcatatgagctcaagaaaggatggattttaaatatttgaggaaaattattgctttttgagaaattaaaaactatgatacttccaaatcacactgtgctcatttaaaaaatagtatttgtaaatatttggtgcccagataataattttcattataattaagactttatactttggagttttatgattttgatggtcacctactatgtttagaacattgtactagtcatgcttaactccagaaaaactgtctaagatagatattcccattttaaagattgagcgaattgagtcagagtaagtaatttgcccagggttactcattagtaagaggcagatctctgacagttctaggtgttttttgtttttttttttcagagaaagctttgttgagatataatttacccatttaaagtatataattcaatggtttttaatatattcacagatttgtacaattatcaccacattcaattgtagaacattttcatcaccccaacaagaaacctcgtaccacaccttagcaatcaccactcccttccatccagtccctccatcccctggcagttgttaatctactttttgtgtatatggatttgtctattctagacatttcatataaatggaatcataaaatgtgggctttcatgattggtttcttttacttagcataatgtttccaaggctcatccatgatgtagcacatatgttattcctttttattgataaataatatttcactgtgtagatatagataggtcacattttgtttattaatcagttaacaggcataagagctgttcccagtgcttggctattatgaataacgttgctgtgaacattcatgtatgtgagtttgtatgggcatatgttttcatttctcttgagtatatacctgagagtggaattgctgagtcatattataattctatgttgaactttttgaggaactgccagactgttttccaaagtggccacaccattttcttaaatatattcccaccagcagtgtttgagggttgcagttccttcacatcctcaccaacacttcttattatctctttttgattataaccattgtagcagggtgaagtggttatctcatcatggttttgattttcatctccctgatggctaatgatgtttaacatcttttcatgtgcctcttggcaattttatgctgtctctggagcaatgtctgttcagatcctttgcccatttttaaataggattatttgtccttttattgtattgtgagagttctgtgtgtatactagggttccttatcagatatgtgacttgcaaagtttttctcctagtctataggctattttatctttttcttttctttttttctctcttttttttaaacttttttattttaagttcaggggtacatgtgcaggttcattatataggtaaacttgtgtcataggggtttgtcgtacaaattatttcatcactcagatattaagcctagtacccattagttatttttcctgatcctctccctcctcccaccctttaccctctggtaggccccactgtctcttgttctcctctgtgtccgtgtgttctcaccatttagctcccacttaaagtcagagcgtacagtatttggttttctgttcctgcattagtttgctaatgataacggcctccagctccgtcgacgttcctgcaagggacatgatctcattcttttttatggctgcatagtactccatggtgtatatataccacattttttttatccactctatcgttgataggcatttaggttgattccacctctttgctattgtgaatagtgctgcagtgaatgtacacatgcatgtgtctttataatagaatgatgtatatgcctttggatatatacccagtaatgagattactgggttgaatggtatttctgtttttaggtctttgaggaattgccacactgtattccacagtggttaaactaatttacactcccaccaacagtacataagtgttcctttttctctgcaacctcaccagcatctgttattttttgactttttaataaccattctgagtggtgtgagatcgtatctcattgtgttttaacactttctttttttcttttttttttttcttttgagacagtctctctctgtcgcccaggctggaatggaatggcatgatctcggctcactgcaacctccgcctcaggggttcaagcaattcttcctgcctcagcctcctgagtagctgggattacaggcacgtgccaccatgcctggataatttttgtatttttagtagagatggggttttgccatgttgcccaggctggtatcaaactcctgacctcaggtgatccgcccatctcggcctcccaaagtgctgggattacaggcgtgagccaccgtgcctggccattttaatactttcttaatggtatccttggagtataaagttttaaattttgatgaagtataatttatttttttttctgttgcttgtagttttggtgtcaactaaaccatttcctaatccaacatcacaaaaattatgtctatatttttttctaaaattttcttgaaaatatgcctatattttcttctaaaactattcacggttttaagtcttgtagttaggtctttgatccattatgagttaatttttgtatacagggtgagataggagcccaacttcattattttgcatatggatattgtccctgcaccagttttttcttattgtctgttacctttgttggaaatcaattgactataaatgtgagggttaatttttttactctcaatttcattctgttgttctctgtgtctatcttataccagtactacatagtcttgattactctagctttgtagtaagcttgaaatccaaattcgtgccaggcgtggtggatcaagcctataatcccagcactttgggaggccgaggtgggtggatcacgaggtcaggagttcgagaccagcctgaccaacatggtgaaaccctgtctccactaaaaatacaaaaattagctgggtgtatcaaagcgcctgtaatcccaggtactcaggaggctgaggcaggagaattgcttgaacctgggaggcagaggttgcagtgagccaagatcatgccactgtactccagcctgggcaacagagcaagactccatctgttcttctttttcaagattgttttggctcttctgaattgcttgaattttcataatggattgttggatcagtttgccaatttttgcaaacaagccaaccaggattttgatagggattacattgaatctatagatcattttagggagtattgccattttaaaattaactttggagagttttgccatcttaacaatatcaagtcttttaatccgtgaacatgggatgtgtttctatttatttagattttctttagtttctttcaatgctgttttgtagtgtttagagaatcagttttgcacttattttgttaaatttatttctaagtattttattgtttttgaggctactgtaaattgagtttttttaaaattaattaattaattaattaatttttttgcaacggagtctcgccctgtcacccaggctggagtgcagtggcactccactcactgcaagctccgccttccgggttcacgccattctcctgcctcagcctcctgagtagctgggattacaggtgcccaccaccatgcctggctaatttttgtatttttagtagagatggggtttcaccctgttggccaggctggtctcgaactcctgacctgaaatgatccgcctgcctgggcctcccaaatgctgggattacaggcgtgggccactgcgcctgaccgagttgttttttaaatttcatttttggattgcttatttcaaatatatagcaatacagttgatatttgtatattgatttttctgtcttccaaccttgctagacttatttattagttctaataattttttagtgatttcttaggacttttctgtatataagatctgtgacccaacttttaaaggtctcaactcttttcactataaccataccctgtagcctgggaaacttactaacttgggagaaataggttgactttttgaggttatctttaggaagtaaacaactgccactttgtaattgtcttctcatgatataaacaaatgcggcagacttttaagatggaaacttttgtggagaaagcaaggttccacaagtaaaaggaaccttgagcttatttggtgaggtcttactttaaataatatcactattatttggtgatattatgggaactacaggccttccaaacatagcttgtttggcacagactgaaataacaacaattatactttactttaaaaaataagcattctaatttggctttacttttaggaggagtggctgaactaagaaaaatatgactttatatatccaaaatatatactagtgctacatgcacattttaatgctaattagttttgtttctttgcctatatgacctcaacatggggaaaagagtataagccttgtattttagaccagaagagacctaattctaattatttttacatttgagatagatctagcaggtggttcttacctgaaagtcttccacgactgagttacgagttattctgaaccaagtaagcaaccaaaaaagctaaaacatgttgggtttcttctttcctctccaggactgcaagttaggtttggaatggtcagggaatggtacgggtttggtgagagggcaactctaagtttgactcctggagtctttcatagtaaggctcatggaattgcccatgtgggagccagagtatagagtagaactgggcttgaaaatcgctttggattttcatttctgatttttcagctataaaatgagagctgggacttgttcctcttacctctgagagccttacaagacatagaggaatcttaaacaatcaaatgttaagtgagaaagctatttgtgcctcctaaaaggagaaaagaatattaacctgacgtggtattataatgtctcccagagtgagggagaaatgcaaggaacccatagtgattattgagtttatagatgtttctattcatgagcctgcaggaaaacgtagagaccaaacatttcagaaaatgaatgccctaggatgattcattagagcagaatgaaatattcagaaacttatgagtctataaaatatttttggagaaaatgtgtgagttttccagaggaacaagatttaatattttgttttaaaagactttattagttgtgagatgaatagaaatattggtaggtttcctttaatcttttgcatatcatttggcttctccaattagaatggcttggcaatcttatgatatttgagtacataatcctgctaggtaggtcaagagagtaaaaagtaaatttcgtagaaattatgccaagtggtaaacaacttcaggcctttttttccctgcagagtcccatggccaactgttctttccatagcaaacttttcttcaccataaacatagcatcatgccccgggggctttaaaataatgtttgctgctggcaggtgatgccaatgtctgtggctacctggagcaggatctatcatgtctcagtgatcccaggtggctttggtccaaagcactgtaactggacctttgattcacttcaaaagaaatgaacctttcttcatgccattgatcgccattgaaaagctccctcaaaggtccctcttagtaaatccttgacacctttcaggtcccagatcatggtttatctgctccagtaagcttttctctcttacttctctccttaaatctccatttccttaccatgaggccaccctgtggtttagtgctgatacagtgtactgtttgaatctgctgttgaattatttctcaagtattagacttggatgtagcctcataccttttactacccttcctcttcccacaggacctagtacagtgctcccaagctgtgctacttagaaggttgctagctagctagctaagccctgacattcctacaatagccagtatattggaacagccacaaagctaataatgggcctacatcctcagggtcatgtgtttgatacactccccaactccaggaggcaccagtcacatggaccatgaagtgaatgccatccactagagttgtgcagcatgggagccctgaatgacctaggtcacacatgatctgtgtttacacattcctgcattacactgcttggtctggagagtcttctctacctccttccttttaaatttttatccatttcaatgagaagttaaaaattaggagtgaatctaacccttccatactccctgataatgctttcagaatgaggtcctggacccttgcatcaggaaaacctggagtgctggctaaaatgcagttttttcagcccctcaacatgtttaaatcagtttaggaccgggcctggggattttgataaacgatgttgactgatgatttgtatgcagtgcactgaagtggtgagaaatgactgttgaatagtttctcagcaagggaaactgtagtgccccaaagggttaataccgctgtccttaacctgttgcattatctgttgtaaaccttttctggctcatttaaattcagcaactacttagtgagcagttgctctctgcctaccactgtgccagccatagtggtagaatcagatgcgaagaatggggtctttgctgtgaaggggctaataatcaattaggaaataaaagacgtgcaataaatatgcacaaacacattaatatgtgcatacatatgcatactatgtaatgatttatattacatcatatagagatcttttatatacatctagtatagtatactctagaagatttatagagagatcttttttcaaacaaatcattattggtagtacaggcctataggattgtcagattttagatctgagagatatcttagggataatgtatagctctatcctgcagaggagatttcagtacatcagccaggcatttcatagaggcacacacacagtctatggtgtagtccaaaaaactatagcgtttagagtttcggattcaaatgtgagctctagtaagaagtaaatggtagttactttaattatagataaataagattgttgtttatggtgagacacattttacatgcattcactaattttagaaaaacttaaacctactttcatgtatatttataattttagaccatataaatataaaaatggataataagtgccttagctttacataccagctatttagtaaaaaccttctgttactttctatgggaaacagagattgaaggagagatcaagaaggggaaaaatcttatttttgacaattatcctatgattattacgttaaaactttatttcactggaatgcttggcagaaaggaatttttaagttaactgaggataaaccagaaaaccattttttcttgcatattatttctctaaaattttattctagtataaaattttatttacagtgtgaattttttttcttttggtcacatctttatcatttgagcattattttcattagataatttattcatctagattagaaggttatgggagcctttattaaaactttattgggcctgcttcctacagagatacagacacttacacctggaaaggagtcacagattatctcggttaatatgttttgcactgaagaaagtcatgttttaagatattaagggacttacagccattagaacaatacttggcacatggtgagtgcccaagaaattttagctgctgttagtagaatttgaatccaagtcatttgaatttcagtttggtgatttcttctcagaaatcttctacttaattccttttattgacccctggtcagactcactgagaatcttttttgtttgtttgtttttcctttaaatcctaattctggattcacttcattttccttatatcttatctcttttttccctaaaagtaaagaagacagaataaattcagtacttgtactttaaaacttttattgtcctcatcagggccagtctgaggatttctgccatgttttataaaatttatgcccagcataatcctgattttttactgccttctctgtgcaaatacacacctaaccttatgctaatggtggcactactgtttcttcatgacaaggctttaaaaatttctggaaactttaaaaacgtggaataaaaactgtgggtataatgggggtgggagcaggaaatttgaggggaaaccatagacacattatgccaaaggttttggcacttttcagaggactaaataactttcttcttctttttttgttttaaatagaagcaaaagagaaaaaaaggtatcaagcacagtttgctcatagaaatgagcaggtttggtagatatatttaaagatgtgaaagccaggaaaaattattaatatgctaataatttgtatttcctccattctccaaacacatacttttatcaagaggaggaggctaaaaataaaaatagaagctttagaaaagtaaggtttttcatgtttttttcttgtttgtttgttttttctctgtcagtcctcttacagtttttctgtagaggctaaaaagagatcctaagccaggaccagcacattcagtggcccatcttaaatgggattatttgaacaatttgagaactcttgggtcaagccaaaagagtgcagtagaaaatcaaagacttgggctgctgctggcttttctcctcattttctttgtcttcacgtgcagctcgataaagtgttggactttttcaaacacagaaacagccttaggggtgttaaatatgtgtgtcaaattttttcctaatggatttctaaatcttccaaaaacttttaaataacttgttaaaggctatatgtaacgcttgtatcgtgtgtgtgtgtgtgtgtgtgtgtgtgtgtgtatgtgttttcctgccactaagattgaattctgtcctctgtacctagaaaataatcattatttcttgaaacaaaaacaaatgagatgataatagttttagctttctacttgggtttcctacagcctttaggttgtgtgtgtgtgagagacttcttgattttccccccctttattttatttggtgggattcttgaccttgatttcttaactgattccttgagggttcttttatttctgccatagtttgtaatctgtatgtctatttaaaattgaattactttttttaataagaaaaagcgatatccattcaataacagattttatcagaaagaacttcatttactttgttttaatcaacctgtcttttctcttttcagaggatgttaagcaagtttttggacagaccacaattcatcaacatattccatttaactgggattcagaatttgtgcaactacattttggaaaagaaagaaaaagacacctgacatatgcggaatttactcagtttttattggtgggtctagctcttaaaaagttaaaagggtatggccgggcacggtggctcacacctataatcctagcactttgggaggccgaggtgggcggatgacgaggtcaggagatcgagaccatcctggccaacatggtgaaaccccgtctctactaaaaatacaaaaaattagccaggcgtggtggccggcgcctgtggtcccagctacttgggaggctgaggcaggagaatggtgtgaacttgggaggtggagcttgcagtgagctgagatcgcaccactgcagtccggcctgggtgaaagagcgagactccgtctcaaaaaaaaaaaaaaaaaagttaaaagggtaaataagtaaacctggaatcaaattgtgtgtaaaagtcctgattggagtcttgaactgtgatttacttactacatactgtgatttacttactacatacttactacagtttagcctggcaaaactgtcccattgagaagtatttctttattaatatgttgaaatcatagaattaaatgggatttccacagatttatgtagaactcctccatgtttagaaggaatacacattgaggccccgggaaatcaagtgattttctcaaggtcacttagatcaggaggggcaaaattacaacttaaaattttggcttgtgactcgctgtgttactacttaccaatattttgttttcccctggaaatggacagatttgtcttcagcttcagaatcatttcatctgacaccttttatagataagacactagtctcaaacttggctgcatgttggaatcacctggaagctttaaaaactaatgttgcctcagtcccacctctagagattagatttaatgggggcaggggggaagcctgggtatttgagggctatttaaagcttcttgggtggccctcatggagaaccagtgtgctaagggcacttgcgcactttcttatgtgggttaaccgctgtagcagttgtctacatttctggggtgcactttccctaacccagtccctgctgcccttctctcgtgacccccttcccccacccatatgatcatatcattgggccactgatgatgcaaggagaagagtattcacaaaatatgattataacttagttttccttcagcagcattatttaaaaatactttaaatacaacattatcatgtagtcactagaggtcaatatctataggctatatagatgtttatgcatttgctttgtttctaacagttacattttatttatactttattaaatatgtttaaaaagactcatgtaaggggactcatttggtatgtttacattttgggtcttgaggaaaattttcaattctttgttactagaaatgtccttagtgggtatcctggtgcccctggctttttcgtgtgttccagaccttgccagagccctctggggagtggttggaatcctgttctgggtagaggtggagggtgcacgggttgtggtgctcacttggtaaagattttgtggtgtccattcttagcaactagcatttgtgataggttaacttcaataggtacttctctttttgaattttcatggtattattatgattcatataatttgtcctgctgtctagtttgcttttattttccaggcctttggaaacataaacaagatgccctaaacctgcctttgtattttttaaaaacaaagcgttaatgtctgtgaatccctgttttcagttctctgtaaacataaacctacttacgtaactcagatggagaatgtaatgtgagttgccggatttttgctgctgtttccacaggacattgttgtgctgtaggaggcggtattcattttgatgaggaataatgacaataatgttattgagacaaatgcctcaaattgactttatggaacacagcctaattaacttttagttttaatgggatgttagcagtagtaaggatgatcgtgtttcctcctctaagcaagtgtcaattatactgaattgagtagattttcaactgctcacagcagcctctgggccttcctccagatatggggaagccagagtccaggattaaataactcagggactatggttatgtttccaaacaatttgtaaggcattcacttaaatttgacttataatggtaaatggaaacatcccacagtgtcctatgtgggatgattttgcctctgtagccagaatagaagtactgaacttttactagattacaatggttatagtggtgaatgatctcagtcagggccttgcttttgtgtcctagtccagatccggacttataggaattaatggatggaccatgataggctttacctgaatgccagttttaatgtctaccattgggtttcttccttccttccatttcatgttttgtttgcttcatttgaactcttttctgaatgtaggtagagcttcagacctctacttcagatgctttgtttgcttcctttgggctctttctggatacaggtaacttcttaaagatattagtgaatttaatctgctgtgtttcaggctcttgctttgtcaggcaggtatccgcctttctgttcttgggcaggactcagaaataggcaccaactccctggctgatgccaaagctgtgaaggcagatgcttggttgcttgaaatgtgaacaagctgccactgtgcatgctgctacctgtcacatgatgaggaaggggagcagccgtagggacagccaaaaagtgcttgtgatttcagggaacttgtatggcatgtagagacagcactcctctattccactgagggtccctagaagatagctcaggttggttccggccagcacattacctgtgcttattatgtatgtatatacatgtgtgtgattggtggggcagtgcagttctctgcagttcctttttttttttttgtcacttaataaatgttttactatatctaagcaagtgtgagcttcttagaaaccaccatgtggctgtgaggatcttacttgggtcatgtgtttatctgtgtagagtctggacaggtccccacccactaaggtgttggcagtcctgggcattgcttacatggtgagttgctatgtccttttctgtgctttggttgtaaaagtcataaagtggtgaatcaatttgatattatttgagctaaacttgactgatttgtactttgcaagtggtaaatcaattcgatattatttgagctaaacttgactgatttgaactttgcatctagtaacattgaagcaagtggcagggatacaaagcctccttcctgtagtcttcttcctcattggaatggaaagatttcagcagggagtggggtcacatttctcttaccccattatttatactgttacatctgttgctgctattttttaatgcccagttaacttcatctccatataacttcatgaatgatggtatgtgtgaatgtgaatacagttgtatatgtgggtaggtatgtgtattttaaaatattctgtaaacctctccacgtatgtctactcccagctcctagagcaaagcctctaattttatagccgctagttttaaaatagattttaatattctttgtattttagaaaataatttggagaaatttttctattctaatctgatggaactgtaattgataaatagtattaatgggctgggcgtggtggctcacgcctgtaatcccagtactttgggaggccgaggcgggtggatcatgaggtcaggagttcgagaccatcctggccaacatggtgaaaccccatctctaccaaaaatacaaaaaaattagctggacatagtggcgtgcacctgtaatcccagctactcgggaggctgaggcaggagaatcgctgaacccaggaggcagaggttgcagtgagctgagatcaggccactgcattccagcctgagcaacagagcaagaccctgtctcaaaaaaataaataaataaatagtattaacctaaaactcggtattttttgtgtgtcatgatgattactcatgtcgggcaaaccatccaattcagcaaatatttgctgagcatgtcgggtttgtcaataggattttgcaaaggtttgaaaggtgcagagactataatcttgagacactcataatgtaaaaatctaggacttgtatctgggtatatccacctgacagtgcaaaaggagcaactacaagtaagtataaaatgtttgccctatgagtttgttgttttgtagcaaaaacccttaaaggtttgtggcataaaccctaatggcaggtattcacatcctttgccaaatttttttttcctttttcttttctttcttttttttgtttttgagacagggtctcactctgttacccaggctagagtgcagtggtgcattagcgctcgctacaactttgaatgccagggctcaagtgatccacccgccttggcctctcaaagtgctgggattacaggcatgagccaccgtgcccagcctgctttgccaatttttttattgggtgactgtcgtaggcacttgggggcacagaatgaaaggtttctaaaacttttctaccaaattattgtgtagtcagtactgagtcactttcaaaaaagttacaataactaatatctgtataatgtttataatttacaaagtgcttttaaatattatttctgataatagcatcctcccaataacctaaaaggtgattatcattatcacatattgtatgcaaaagaataaacctactctatggtaaaattttgcatttaccagtaattttccagggaaatggcccatagctttcattatgtttccaaagaagtatcccaaaagggtggtaaagagcagctgttctagagcttagcttctgcagtcagatgacaggtgtgtgacaaattcaagaatacgatgccgttcccactctgttgcactttctccagatctaaggctatagacagctattttctgttcctagaagttaccatgcatctgaatggcagtgcccagtcatgcattgctaaacatctagcattcctgacccctacccattaattgccagatgcgatcatcaacaagttcttaggggtgcattgtactgtcatttccaggtttttttgtttgatactgttttataatcttgggtatctattttacatgtaattactttaatttgaaaacagtctacacataggagtttccactggttccaatctcaggatagaaaagtctaggattactacaaaattcaatatttctgttaactagaacaacattgttattagctacctctcatatagcattttctagctaagaaagttcttgtattaatatttgtccttacagtcaccttaggttgttggtgttgtttccctatgaaagctgagtgaacagaagcctaaagaagttttctggatttgttcaagattagacaggtggatttgaagttgaaattaatttttctaaatctctggcagtttttaccccccaaattttagtgtaaaaattatctgagatgcgtatttagaaatgcagagtcccaggcctctccaccgacctcccctcccaagactcaaatttagtagttctgaatagggcctaagaagctgcctttccaataagcatcctaaattgcgatgctctggatggttcaggaaccacattttggcaaactttggtctggactaggcaaccctgaatgtgtaaaggtaaacggctctttatcctaagactaatgggaagtctgtcgaggcaaacctcataagatttgtgcttcagaaggatcactctactattgtgtggtaaatctaatggagaggaacgtgaccaaggagagggagaccggttggttgctttttaagccaagagtcaaacaactgtggtctcagttggatggtaacagtgatgggccagagtaaatggagtcaagagaacttacagggataggccagacaaagcttcatgatttaatgggaaggggacagtcatagatttgcagaactcaaggttgactcttgggttttagccttgggctagtgggaggatggtggtgtttcattgaaatagggagtacaagaagaagaggaggttttaaggaggggctacagagtagtgctttatatgtaagagctgttcacgtgtgttggtgtattggctctgctgcctcttttcaattctttggtgttgagatgatttactgtaggaccctacctacggcccctgtatagttgggttttttgaaggaattttgttctgcactttatgtcgccaggaaatttcttctgtttccaggggtcatccagctattgctctaaaagcatcatccagaaattgcaatgctctgaattgtggagaggcctgattttgaggttgtggattccattccactggctagctaagagacaggatagctgacctgagagggaatgaggctaaaaatcctatctaatggcttctcatcaaatagagtttaagaatgaggtcacctgacccaacagagagctctaatcacaagggcttgagtattttatcatagttttactctggtcctcattttgtcagaagaggatgatgaaacccaaagacatgaattgtagtaaatagagctaggaatagaacctggggatcaaagctgtgtctggcatcccagactggtcattcatattagtaaggatccttgtcctcagatcacgagtcccgtgataacctggttggatgccaaagcatacccatgctagtaatgcaactgaacaattttggttctttttaagaaagcagattgaccattattttggcttcttggtcagcacagtgtagaggtcagcctacttcttttctgtgtaacatgaacattttggttatttagatcctgagccctagagagtagaactctagaagtctgctgctcccgggtgacggtagttgccaatgtccctctacaagccagagattcactgctgctggtcagatgtggtcctggctttttctcaccatcagttacggtttgcgactctatttgtcatagcatcctggtgtaaggcaacaatttcaacacaagaggctataggtgttaaaaacaaaattgctactacccccgcccaaccaccaccaaacaaaacataccttcatccatggcaaccccaaattttctagctttagaattaataagcgatttcatgtgttcataaaaaataatcgcttgtagtagaactggctgaagccgtaattctttacagatgagtggacaattaacaaggtccttgcttaggtttaggtttgagtaatctgagccatttgcctctcccttttgtcccccaacttgtcttgtttgtattagtgaaagtatctagaccatgaatttttttttttttttttgagacagagtctcactctgtcacccaggctggagtgcaatggcgtgctcttggctcactacaacctccacctcccaggttcaagtgattctcctgcctcagcctctggagtaggtgggattacaggctgcccaaccccatgcccagctaattttttgtatttttagtagagatggggtttcaccatgttggtcagactggtcttgaactcctgacctcaagcaatccactcgcctcaccctcccaaagtgctgagattacaggcatgagccaccgtgcccagcccgaccatgaatttttagtggcccaagaacccagttgtattttcattttcactatgtgaatgccttttatgttgattctaagttgtatcaggtggggtctgtgatgtagctttggtattgtttcataaacagcatcatttggtgttctcaaatgaactagtgagtagagcacattagtgttgtttgccttcaactcttccactagatgagattctgttttgtgtccaaatggaagccattgctagtttggtgatgagtaactagagatgtgatcacttggacagtaagatgcaggacacgttccagccacagcacacactttctactctctgggcaaagaaaatcaggattcattgtgctgttgtgtttgtggtgttagcttgctgttttgttgagcagcctgttgtgcagggtttttacagtagcatcctggtaaaaatgaacactctatacagcatctccccagctgttacccactgtgaagtttaacgttaaattagaagagcaaggaaattgagatggaaaagctctgtatttggtttctgccaaggtgttgcagtgcatgctgagccacatgtgacactgcttccaaagacccttttaattaaaggcctcacccagtgaattggggatggaatttcaccctcaactctgacactgactgcatggccaaatggggggtggggggaggtacacatagaacaaaattaagaatggtaactacttatctctctacctattttattgctatgtttcatttttactttgttaaaaaatatgtggatcttcattttaattagaatgtttttcttcaaattagcatagattatgaaaataaagtggatatttatatgcaaaccagtatacaggtactgatatgtgatgtaatatagaaattgtttgggctaaatgtgatatggtattttttaggcaaatcgtctttctacatttttgtttcctgtttcgataaacaattagctgcattttgcccagaattcttctattaccatgtctaaaaaggaattattttgaatcatttccttattaactctttgcttttattaatattttagattttgttaaaatttcaaaacacaaaaatgcaaattaaccagggttcaaaaaatatatatatttattttttggcatttttggctttataatataaatcacctggctctcctgcttgttttgagggactgggttttttgggtttttgttgtcattgttgttgttgttcctgataaattgttctcaggctaaagcacaaacttgcatgtctgaatagagatggagagaatattttatattcaaaatatacctacctgaaaattggagattattaaggaaatgacaggcctggaactattagaagcacgaatgttagacctaaagtagtgtaacccctatatatgtttattctgtacaactagcaattttgaagagtttgattttttttttctacagcagtctgaatgggtgtgttgaagtagttggaaactgctgcaataaaagcctgttgcattaatcatcatgcaccagaatagagggaacagaaaatagttcactggcacatattaaagagaaattgggcctcctttcatgtacttgagtggaactgccttagagatagctgcagaactcctgctcttggaccttctggccttaggtgataggaagggccatttgtcttcagttggtaactgtcttcggcagcagcatttagtaagcacccattgcctggtactgttaagagctctctttagagagacacttcattttctcagctctctggatttgctacaaggtttcaggccctgtgtcttattttctttattcacttatttaggtatcagtttgatttttgttgtctgcctgctctttgtatgcactgtgggatgatctcacccatttctacaatcatctttttcttcatctggtttttggtaggtcccctctaaaaggaacaggcagtctgtgtaggctaacatcatggctccagaagccgactgcctggatgcatattcagtttcatccttgcccgtgtcacccttggctcattcttacctcatttttccatcttcagaacagaggtgatggtaggaccacctcggttgtggagaggattcaaagagatgaagcagggaaaacacaacagtccctgggacatagcatgcacttaataacttagtaaacgttctccttgtgatgttttctctaaaatcctgttatctgaatttcccagatctgtatttctacctgtaccttcagctttcttttgtgtgcctcttaactttttgtttataactgaaactcacttcattccaggtttttcatcatggtcaaccacctcatctctttccccttaagtattttcctttgtggtagagtatcttccccatcattcaaaatgtggatttttgagatatatcttacttcatttatatattcaaatcatcatcaaaattttcttaaagtctcttttcctacctgtccaaatctagttatgacccccttatttatgattttgcctgaggcagcataagttagtagttaagaatctcagttttaaaagctgacatcccttgctttggatcttaactcttccactttttagttgtgtgactttaggctagttacctgacctctctgaacttcaggtgcctctgtgtaaaatgaagataataatcattacttcacagaagtattgtgaggcttaagtgaaatgctgtctttgaagttcttggcatagcccctggtctgtagtgagtgttgaagcattcagcttttgttatcctccatcctggctgatgttcatttttccgttcctgtggctagttcagaatgattgagcagaaccactgtttcatattgcaagagactttagaggtttttaaacctttcacctggacaaaaatcaaagccactgttttttaaatgcctgtcattcatgacctctggtttttacaaccctgcacagtaggtggtgttgtgcctattctgtagaagaaaatctgaggctctaagatgcaaacaatcacctgagctctcccgggtggcagtgtcatgacttctgtttacgctctacccatgcctgttccagatttcttattgtcatcataatgtatggcttccataactccctctattaaagataaggttaaattcttgacatgtgttcctcagcctatggttgaacacgtatttctggtgtcagggaacctgctacttttcaaggtagcccattttactgctgaatagttctataggttaaagacttcttctgtgtactgtgctaaactctgacccctatagcatctctccattttttcaaaagaaatagaggggcagcctaatattttttttacttgatagtcttttaacttttaaatatgtgaatgtaatgattactgcccatattgttctcccctcctctgcacagatgactcgtttacttctgatccccttcattttagaaataaatactattttgtatatgctatatttcatgcatactaaaagctctctgtctctgttttatcccttctgagttgagatctaggagctgtcagtctcttgacaacccatagtatacattcagattttcattaaatagcttttgaggtgcaaaccaggagctttgattttaagtcattctgccatgagtagtgagcctagtcatttatttcaaagaccacacatttctttcatatttacggagtaacctatgtgttagctcccactggcctcctgatttaattttttcctcctttgtctcttggggctatgggaaagagagcaaaaagggagtgaggccaggagaaggccttttagatttggtttctctcctccttggtctctgctactattggtaaaacaatcctgatgctctgggtgtacagaagccctttgccttaatggaaaactttagggaattttattatttttccacaaaaataggcaacagtaaaatctagagcattaaatgcaaattgagtttttatctttccacagctgttaagatttcttagtgtcaaatttattttttaatcaaattcctgacagtagctttgtctgaggttccccatgcagttgagtgaagtattaggagcatgggtagatagagggctggggagtagaaatgctgaggcttgaattccagctttactgcttcctgtcagtgagactttagtttgctcaactgctatagtgaggttaataatagtacctaccttataggcttgcagtaagcattccatgaattaattcctgtaaaatgctttacagcagtgcctgctgcataatacatgcttgctaagtgctattgcatggttgtcatactggttgaggtcatggtttcatttcttcacccggaaggagaaacagtcacgacataaacagatgatcttcagaaggcaacccacgtcttcagaatgctgcttttaaagttggagagccacctaactgcgtgttttcactctgtcctgctatttagagaactacatagatctagcattttgtcttctgtggaacttataatgcccccaatctttaagagctgttggaaatgtattctcaggttgttcatcatcagacttaaaataactttcttactccaacttgaggggtccctgctcatagatgtttaatcatggaagcgtgggcacaggatgtgttgtaacactgtcctaatcacaggtatgtcccctgtcctgctatgtgagcaccagcccccaccttggcatccattcccaatctggaattctggacaggctggtcttagcattgtggcttcctgctttctgaggagatggggttgccagagaaagcggtgccatttttggtataattgtctgaggatctctaagatgttgagttataaactagggaaaatggtaaatcgctgaacataccttctactattgttgagagtagtcttggcttagctagctttagcaatgggtctggtaattcaaaggagactgttcatttactttcaattgaatacgcactgtggtcatttttcactacagggtgtttaacagttgatttcttcttccttaattggaagcactcatatagagaacctcccattgttcaatagctcacgatttgttcattcagttggttttacagaatacttttcactgatgagaatgcctgtcatttattgagcacctactatacatctaaagcattctgctgagctgcatgtataaatgtaagtagatgcttacaggacttcaaaaggttatactgtcttttccttggtaaggtaggtgtaaaggcaggaatgtgaataactgattatgatgtaagatcaaataagacaagttttataattgatattcagacagggggccaccggaagggacatcagttatttccagttataaggcctggttatatttgcctaagtggtaccatttgagctaagcttaaaggaagtggcaggatttcaggagctggagaaaggggcagcagtctacactaggtggaagtaacgatgtgggcaaaagcccaggtgtgtggcaggtctggcaggggtgggcatgggtgataggagatgaggctaagactagttcctctgggggcttgtatgccttgcttcagagacgggtctgtatgatgaagggtcattggagatttccatggagggggagggagtcaggtttttaattctgaaaagcaactttttatgtgtgcatggtagaccacagaggtccagactgcaagcccaagctccagactgacagtcagaaccactgactctcagtgataatttagatgaggtctgaggaaagtctgaaccagtagcatcaggaacaaaaaggaaaaggtgcatttgggcaaactttcaaaggcctaagggacagaatttggtaactggtttactctgggagaaaggaagcttgaacaattcagaatgacagctttctaggtgaggtggccaataaaactacatgcctaataattaagctgtgaacatagaagagagaccaggtttgagcactgggttgggggatctacaatatggggttagcgatgtgtcattttatggcctttacacgatacccacgtggatatattctctaaacagaaattctggtccagcagaaaggaatgagacttgaatatgggagttaagccttagcttttaagaaatccttgagggcttaagagagagagcactctgtctaggagagtagagtgagaagatgtgaggacagagggccaacagatgcttcccatttaaggagccagtggtggaggctccagaaagactgggatcccagaagagagtttcagctgaggcaggctggttcgaaactggcagatggctacaaatgaggagattcttttaaataggataagaactctgattcttactattaaatgtcttatctttaaaatattttaaatgtagacattttcaaactgcaaaagtagaagactataatgacccatcatgcaactgctatttggcttccgttattgcaaatactgtatttcttctttcatctccctgcctttctggggaaggaaaggaagatcgagtactttaaagcagtatcagactcatgtcatttcccttacactttagtttgcacaaattcataaggacaattattttttacataacttgaataaatacgatgtcattatctcactaaaattaaaaattaatttcttaatatcgtctaaaaaaactccattatattcaaataatttgaagtttttgagagccctgttggtgttcctttttttttttttttttttttttttgagacaaggtttcactctgtcacccaggctggagtgtggcggcatgatctcagctcactgcaacctcctcctccccaggctcaggtgatcctctcaccccagtctcccaagtagctgggactacaggcatgcacctccatgcctggcaaatttctttttttttttttttttgtagagatggggttttgccatgtggcccaggctggcctggaactactgggctcaagggatccatccacctcagcctcctcaagtgttgggattacaggcatgagctactgtgtctggctggtgttactttttaattgcatagaagttagctgtcactgcaagggccctgtttgggaaatgagcagagtgttgtgaggaagataataaaatgctctctgcaggaggaatgttccttccatatagtgcacagtgagttttgatgggaggctgttttcttttgtgtacacacttatcccctgggaatagcaacagagctctgtgattggactttctgtcttcagatcattttaattaaacatatgcaatgataccatgacaggtttacctcccctgatccacataccatgcaactacttagagcagtagtccttaatcaagacatatggctctatgcagagacatttttgattgttatgaccttagagggaaggggctacttgtatctagtgggaagagaataggggtacacacgacagccctcccgtaataaagacttaccctgtccaaaatgccaataatggcaaggctgagaaaccctgtgttggagaaatagcagagaagaaccaccactcttttctatctattgttacatcatgtgtttgggtaccaggttgcagttaagaatttttctcttttctttggagagaagttaaagtccctggcagtgtttttcctcagatcatctgcatcacctaagctggggttggccagatctttgaacctacaacacttcattccggttttcattttctttgtgttcatggactctagagagcacggaagtaattgggtttcattgggtagcagagtaaggtagagtgcactttctcaagacatgttcattggtctgagcaaagttctgtctcttggaaggagacagtagcttggtggtgctattaggcagatgagggcttgttagatcaagatgtaaactctctttcttcagtctgattttaaaatgaactgtcatttgtagtaattattaaatgagaagcataaattaagtattttactttctttatttgtaggaaatacaactggagcacgcaaagcaagcctttgtgcaacgggacaatgctaggactgggagagtcacagccatcgacttccgagacatcatggtcaccatccgcccccatgtcttgactccttttgtagaagaatgtctagtagctgtaagttgtaacttgccctaatgaagtggtttaactcagtaaataaggaattataaaaacaattcttataagttatgtagtgttttttttctgttgcaaacactaacattttaatgtgatcacatacattactaaactcaaacaaagagtgtgttttggctagttttagtgggtaggttaatttgttgtctgggtaatacggaatatcttcgagaaatacattagctttttaaagataaaaggaaaaacagatttgtgatctcatgttaattttgttttagattttgaagtatatcaagggctgatttttgctaatcttcttagatgctctaaggcaaaaaaaaaaaaaaaatagtgcacatgtatatcatttgttagagtagttagcacaacagaaactccaaaccttagattccctttcaccgtgtatgtgtcgaggccacagagttacatgtgacagcagagccctgcagttgtgtttcatggagcctccctcctccaggtgtcagctgctgtccttccctcatgggccctggggatgtcctgcaacattctgtggtggtggttcttaagacctgctcgtggagcaccagaatcaccactaaaaactattaaaactacagattctgagatctcttctaggcctatcatacaccatctataggcgatgaggtcttagaatctaattttgtaaagcttctgggtgattttggtaataactcagttttaggaccaatagcccgtggtaactctccttttgttaatcccagggagaatactgttttcaccatcatctgggtttcccacagtgcttaccataggcaggaactcagagtagcctttcagtttcctttcttcccccaagtccttagttctagagacatggtattccaacgaggcctcttccattctggcactgtgttaatctaactccttttcttgggcgcccccttctctactccatactaaactttcatgtcagctattttaaatgattactaagtgaagatttatgtggttgttaccttgtaaagaagtgctttcctaataaaaatattttgccttgctagggaaggatagaatttgaaactccaaactgaagtctcattcataatggacattctgtctgtttcccttgtcccctgtgaagaaatatggtttcttaaaaattctgattatcagaatttttactagtcttaaccccccatgaaagtatatggcatctcataattttaccataatatgcttgtttgctagaaatcccaccaatgtaaagtctgtacctaaatgattatttattactggttataagtaacttgacaagtcttgatattaatgttacattgactacttttcatagtatgtttgcattgatacaatacagtttttcatgcataagcacacacatgtgtgcatatgtacttatagtttttgcatgtttaagcctttaagatttgctcattagatgaaataaaccaacttataaaacatttccaattgaaatttgaactctaaattactactagtcctgttataatcctacacatgtatttatttagttttctaggagttgtgtatggagagtacaagttctggtcatgattagttgcagttgcttctaaaaatcatttatagcttttttttaatgcaaaagaaaaatacttatagtcatttcttcttgtacatgcatttttgattactttcaaactagttttagatgtatgtacttctgaatcatctataaatcttttgtatatttttcttctctcttgttttcaatttatttgaggctgctggaggtaccacatcccatcaagttagtttctcctattttaatggatttaattcgctccttaacaacatggaactcattagaaagatctatagcactctggctggcaccaggaaagatgttgaagtgactaagggtgagtgagaatatatctgaattctagcctgcaagtattgtggtgtattattattagggtgaagaaggcaactagtactttattatttttctatcccattgacacatattaactatatgataacgtgtgtttttcatcctttgatcagacaaacaaaagcaaacaaaacaatcttcaccaagttttaaacaaactgggcccagcttggtgactcacacctgaaatcccagcagtttgggaggccgaggtgggtggatcacctgagatcaggagttcgagaccagcctggccaagagggtgaaaccctgtctctactaaaaatacaaacattagtcgggtgtggtggtgggcacctgtaatcccagctacttgggaggctgaggcagaagaatcgcttgaacctgggaggcgaaggttgcagtgagccgagatcacgccactgcactccagcctgggcaacaagagcaaaatgccatctcaaaaataaataaataaataaataaataaactgaagacaccctttgaataaggaaaacatgtaaagtttcttaaatattttcaaatcttgctacagcttgagctaaattggcaacctctaaggaagccttcaggtgtatatgaggaattccataaagttgcattggtgacagtgtaagttggtctgtaggcttgggacaggatattatcagcattgtaatgggattaagaaaaaaaatcagagccggtgcggtggctcatgcctgtaatcccagcactttgggaggccgaggcgggcagatcatgaggtcaggagattgagacgatcctggctaacacggtgaaaccccgtctctactaaaaatgtatatataaaaaaattagcagggcatggtggcacacacctgtagttccagctccttgggaggctgaggcaggggaatcgcttgaacccaagagtcggaggttgtagtgaaccgagattgcaccactgcactccagcctgggcaacagagcaagactctgtctcaaaaaaaaaaaaaaaaaaaatcagaattcccttaggaattccacaccttcattaatataaccacctaaattaatataattaataatcctaatttaaccagttaattagattaatataacttcccctcctgggacctatgcatatgaagtttcatatatgattccttattttctctgattggcaatttgaataacatcagatgaccccaagcttttaaactgtatattcaagaacatattctgcacacgctttccaaatggatgcaagaactgcaaaaattcttaccttatttggattgacttgaattctacaactgatgataataataaagttttgtgatgttcactcattccagtgccttgagttaatgctgaatttagtggctatttcttcttgaatctttcccttttaacttttcttccatacagaggagtttgttctggcagctcagaaatttggtcaggttacacccatggaagttgacatcttgtttcagttagcagatttatatgagccaagggggtaagttggcttttttttttttttttttggaattagcttaataaaaggaggttaggaggagggcagcaatcaggagaaaaagaagccaaactgaaggctatactgaaatatgagaaatgaaaaaagggatgtttttaaattttataatgtaaattgtaataaattggtatatttgttgcttgtgtttgtttttcccctacagacgtatgaccttagcagacattgaacggattgctcctctggaagagggaactctgccctttaacttggctgaggcccagaggcaggtgagcaaagaggagcaaacttgcattctggggtttccttagcaggataccccaaccctgttccacttgcagttgcctttgcggcattggtatctgacttaaccatttttctgttttgcaccaaaactctcgataaattttaaaggctgtaaagagaaattgcttagaaatggtgtgataaacaggtatttggcatttgctcatttcttgctaaggtggagtgatttcctaactgcaccagaagcctaatgctccgaaaacatgaaggaggtcttttctcctttcttgaagtctcatgttgagagatgtagcgaaagaatcccgtgttggtgtcactgtgcctgtcggcagctgcacgttgctaaatgaaagccgtctttgctctgtggagcagcccttcatcagcgcatcgtctaactgccatgccttccgtttttctgaatatcaaaatgagataattttgtttagtctggagttacagtttaaaggctttcagacctattttctctgtgaaaggattcataagttatatggaaacaattttaggaatgctaaattttattttatggttaacagaaaccaatctcttgaagttgtgggagtcagaaacttaagacatggaactttctcctttaactcttacccagctttctgtagatcaggattagagaagaaaagccttcatagcatgtgttagtaaaataaatggtgtttgtaaaataaatccactcacaggcgagtgtcgtttttagaaaaatttctccttttaggcagagccatctctgaatcctgtgagacttcgcagtttctggcatggagctctgggtttgtacagagacgccagtgtgaccacaatgggttgctgcaggctacacttttaggactgtcagaccttgagccagggcccccttcttttagctctttcccacccaaatgcagcggtgagttttgtgtgcagcatgcaagtcaaagtagtgggtgtgtgctcagtaaattctaacgagcacctctggaaaaccagctggccttgcttaaaagaggaagccgatttctctgagtgcaggagaaataactataatcacgtgtagaggtggaagcaacactgctctcccttccctttgatttttaacactgcttaggagatgattatctcttcgtctgtatgccaccagctattgtagaaatttggggattaagagaagcagagaagttttttttagatccctcctactcttcagctggcagcggcttcccacaatttttcctttaagctctttgcagcttttgagagtttatgatgggtgcttgttgatactggccatgaaagggttagaccagattgatgagatttatagcaggaaatgattcgctgccgcttagaggtttagagcaattcacaatggccttacctggaataggctttttactgcatgaaccctagtgggcccgacaaattcaagcaagggaggtcgtccacctgtgggcacagcgctgcctgtccagcactgtgcagcacttgtagcatttatcctggacagaggagtgaaggagcagagttttgtctcatttcaagaacatgctacagttctggctttggaaaagttaaataaaagtctaggatttcatttgtcttttaggagaggaattaatggtggtggtaggtccctcctccccccaccctctataattttcagagtattttcactcattattttgatgccagaacatttctaagtattgcatatttatatccctgtaaataaaatattgcttctcttttggatgcatctgtcaaaatgaaggtactattgatttccatctatatagggctacagttggaaacaactcatagaatttgcaaaagaaatgttttgtatcttaaagaggcatatttctatgtaaagctattttcagttaagtgactttgaaggagattccaaatgatctcattgtattagaattgtgttacattgacagcaactaaaattcagtgggttgatagctggggttgctgattattttcattgttcactgattttaattatcatggattctgaaaaacaaattttattgaatgtatgtattcattcaacaggtatttattaagcactgactatatgtcaccctcatttgacaactctctgtgacataaaattactgttttatttatgcagacagagaagtgcagcactctgaaatgttctggcatcaaaaacactgtgaggataataggtcaaaagaaccagaaaacaatgactgactgacctgaagtatgaatttagaaaagatggacaaaaaaagagaaaaagtaacgatcaactgtaatacagccacctagttttagctactgtaaatgttttgagtatctctgggtggtagggaggcaaaatattagtattaattttatatgcatatatatgtaaacctcttacaagcatttttaataaaaagtgacatcattttgtatatagtcttaaaaattgtttttaaaaaaattaccaggaaataggtcaaacatttaaataggtacaaagaatcatatgacaaatacctatctacttaccatgctctttttagcctatgttttcttttataattccttgtgaacatttaatatcaaatattcttttacagtatcattttgaatgatagggttttgttttaaagttattatttttaaaggctatagtcctccgttattggacatttagaatatttcccaaatttttgttctttttgtttaaagagcaaaaatttgggaaataatcgaaatttccaataagtactacaaatgttttttaagtgctacattcttgtagcttgttacatgcatgattatcttctatcctaacttttttctttttgagacggagtttcactcttcttgcccaggctggagtgcagtggcgcgatcttggctcactgcagcctccgcctcccaggttcaagtgattctcctgcctcagcctcccaagtagctgagattacaggcatgcgccaccacgtccggctaattttttatttttagaagagacggggtttctccatggtggtcaggctggtctcgaactcctgacctcaagtgatccacccacctcggcctcccaaagtgctgggattacaggtgtgagccactgcacccagcctattctaacttcagaggttatgtacattttaagggtttgggtgtatattactaaacatctctctatttatgcttgctttaatggcaaatttcagaaggcttgttatcaacttttgccaggctgggtattgccacttaaaacaaaaacaaaaatacatacaaaccaaaaacctgccaatttgattgatgaaaaatgatgtctcattgatgtttttatttgctttatttactttattttattttatttttttgatacagtctcactctgttgcccaggctggagtgcagtggcgcgatctcggctcactgcaagcttcacctcacgggttcacgccattctcctgcctcagcttcccaagtagctgggactacaggcgcctgccaccacacccagctaatttttttcttttttttgtatttttagtagagacggggtttcaccatgttagccaggatggtctcaatctcctgacctcatgatccacccacctcggcctcctgaagtgctgggattacaggcatgagccaccgtacccgacctatttttatttttgagatagagtcttgctctgttgccgaggctgaagtgcagtggcgtgatctcagctcactgcaacctctgccccctgggctcaagtgattctccctcctcagcctgagtagctgagactacaggcacatgccaccatgctggtctaatttttgtgttatattatagagatgggctttcaccatgttatccaggctggtcttgaactcctgtgctcaggtaatccgcccgcctcagcctcccaaagtgctgggattacaggcgtgagccaccgtgcctggcctcagtgatgtttttaactgtgcattttttttaatgagaatttgaaaataggcttataacatcatttttgtcaaaggatggttttgattatattgaaatttggttttaaacattaatagcactaaaatctttttattaataagaacttatgaaatccattcctacttttttccttgacattttagttgtatcatggatttagaacccaatgagtaatgtttaaagttaatgtatggtcatttttgttttatcttcttttctgtcacctgttttcctgctctctgattcctgtgcatgcaaagcagaaggcctcaggtgattcagctcgaccagttcttctacaagttgcagagtcggcctacaggtttggtctgggttctgttgctggaggttagtcatggatgagagaaaaattttcacttttgttattcctattctcttttctctgattttccatcttgaaatgttaaaggacaaagtcttctctagtctttcccaatgccagttatcagtttctacctgtgaggtagggcaagagtaaagggaactcttttcccatacctgcatgtgatcagggacttacaagtggcattttcctctatctacagatcaggccttccaaagacaggttactaatgaggttgggctgtagcaatgtgccttaatttaaaatatctatgacatccttttattaggggatacttgaatgaaaaccctcaattgtttattaaagatataagaaaggtagtactgttttaaaatctgtatttaaaattcaaaacacatttcttttctcagtcttgtccttgactttaactaccttcttctttcttctgacctatcttactttcttctgagataatgatattgtttaattttagctgttggagccactgctgtgtatcctatcgatcttgtaaaaactcgaatgcagaaccaacgatcaactggctcttttgtgggagaactcatgtataaaaacagctttgactgttttaagaaagtgctacgctatgaaggcttctttggactgtatagaggttagtgccacatgctcaatacctgttaggtgaaataacactcaaaggtttggtttctcatcttagtgcctgacatgaattagcaagactgcgttaaaatggaaatacagcagattttcaattatccatgctaatgggagtaggctggaggcatctagggcttggctaatcaaaacagcccataatctgaaaattatttatagtgctctgttgtatgttttatttcttaaaataataaattatttttataagcatcttccgtgaatttttgaaaggctcacattgtttgcatccttgaagtactctattctccagctaacagggaaaggtattctgccaccaggacaaagcctactcaggattcatgattttcctggaatacaccacaaaaaagataacgaagggttcagtagagctctcttttgctgcttcatcctgaattaaagttgccccttttcttcatctgactctcaacccaatggagttgattcacacacccctctagccaaggtttccccccactgagacagcctgaaacaggtaatccttctttctccaccttttcctttaaccatctaaggttcattaagcaatggaagtagtagcagagagtatgtcatcactgatggaaaggatcccacagaccctgactgcttttccactggcattggccgaaggagacttctcaactgttctttcggggattgccttctacgagaaggaaacagtgtttctgcatcagttaaaatacagtatcacaaggcagttcaaactcagctgctttataatttggcagcggcaaagctggcagagttttccctcctctcccctactaatgctctctctagatgaagaaaacagtatttagtactctgctgaggtggacggtgaaactggcagacatggaaacctgtgcctctgggcctcttctgccatctgctgactctagtcttcaaattaattaccccagttaaaaaaaacaaaaaggataaacctttcttgaaacctctcaccttagaagccagaaagtctcaaactccagagaagttccattttgcaggtcctattgtgtaggtaggtagcccccatcaaaggccttttgatctttgctctgccctcttttccttatcccctgcctcttcttacaatttggaaggtctttgacctcaggtgattgatgatgaccctttcagggtcactgccttccatttgaaatgcttttcttccctgatggcaacaactttgcaaatgaaatggcttccaagtagtacaaggttaatgtcacagttcctattctgcagtgagtcaggcaaaattggccgccttacctgtccatatgggtggtttttggaagggaaatctcgagtctcaagtctgggcagacatctgagcattgcttcataaactactttttgggcttttcttggtattagattaaatgtcaaggatgcctttagaattgtaagaatgcttcccaacactgctcagtgtctttaatttgcttaagttgattttttattttgagtccttttttctcgatctttgaccatacctggcaggtctgatttttggttacgtctatatttcccttttgcaacctgtactgttggcaactagaagtgtgcctgagtactgagtgctgagctaatgtgggctatgcaaagaggcttccactcttgccgtttcagttcttttatctgtaagatgagagtgactgcttttaacttctcagaggagtagtaagtcaatatattaggtacagacagaggctcactgtaaacacccaagtggcagctcttcacccttttcctggtttagaaatggccatttatctttgggtgccccaaccttaagggcaagagacagagctgtctgtcaggatgatgagtagagtgtgaatataagattagttctaggagtcacctgtgttcatttcttcctgatatcttttctggtaaaccattttaaaacaaaaaatttactgtaaaatttttgtttagtcccattctgtaatttggatcatcttgagagcaaaatgatgactgacagttcaggttaaaataataatgatacataactttgccatgaaaatgacttgttcctattcttgattggtcagggatcagttctctttagtttcttgtacatcatcaataattaataattgtatataactgcatatttgtaagtgcttattgggtaagagagatcagatgaaaatgtaggtaactcatggttattgttgttaatttaaaaaattacaatataagtaaaaaagacctgacatatttctgagactcagtattatcacctttatgtacaaagtcacattatgaaatacctatatgtgattctttgtacatttctcataaaatgtaactttattttaaaattatattattccagaggaaaactgttacgtttaaattaggaaaatatagtattgctgctattaatgctttcacctagcaatatttgagaaggtatcagagtacatctttaattcatacatgtttttaaatattgagcatagtttttagtattacagaattttgctcaacatgtaatttttctctatcaaggcctatgtaattgctcatatttcctgaatgagataatttgggaatgttgcagttgtaagatctttctcctactttaaaattacctttgtgtatactttgaaaaaagttggcatctggcctcaaagaaggtgtttttgtagcatgcgatcttattatgaggttaataaatatctctttttcttataacaagaatatcagaagctgtttttgcatttaaaagcctttccctgtggcattagaatgaaggttattttaaaagaactcttgtagtgctccaccacaagttttgttctttgcctcccccgcagctggctgcatcagaatagttgtggaagttgcttggtagtcatgagagagtgcctagcagtgctcttcaatagaaatatacctcagagagtcatgagaggtgttgtgagttggttaattcctgctctccatgtattggtataactccgttttctttatttccaggagcctctctcctatttttgtgtaagttttagttgctggaaaagagctccttaaaaatcccatgagtctggctctgcaaaccttctctacagtgcaaactacttttttcctaacaagaaaatggcaaattttcctagtttgttgttgttgttgttgttgttatttctgaaaatccaacccccaggccaagcctgtctgtattaagggaaatcacacctgagataatccaggtcttcctgaagtcacttttaaaattctttctctgtttcctccccagtcttcagagtgatttaatgtgctcaggtatttgaaatccttaatgaattacctgacaacttgtttggtttgaatgactggcataaccaaatgaatcagtcattggcctgctatagatctggcgtattaaagaacaacaattgattgggtaatcatccataattaaatgctcttaatgttccaggaataaataatttctgcttttaaactttgttgcagtcttctctctcagatctttcaggtgatgagatgagcagccttagacactggaaaatgttttgggagaatcttggggaaaaagatgtattaagagaaatatggccgggtacggtggcttatgcctgtaatcccagcactttgggagaccgaggcgggtggatcacctgaggtcaggagttcaagaccagcctggccaacatggccaaactctgtctctactaaaaatacaaaaattggctgggcataatggcgggcctgtaatcgcagctacaggctgaggcaggagaatcgcttgaacccaggaggatgcagtgatctgagattgtgccgctgcattcctgcctgggagacaagagtgaaactctgtctcaatttagaaaaaaaaagagatagaaatcagggtctatcagaaatacttcttagacgaaaatttttgtttctattgatgggagaagccctaaagaaaatctcccagaaagagtaattagatcattttatgaattaaacttaatttaagcagtgcttaacctttgaggaaattggcaaaaaaaaaaccacattttttaatcagcccattgatccaagcttgcagagttgtaaatatttctatttcaagttgtctgtgtagtgcaaagcagtcatcttccatcctggaatgttctcaaggtgacatctagaggatgttgtggtgatatctcagggagttattgatacttttatattgcagagggaagttttggcaggcagctagtttaagccaggtcccttatcattgatggtactataaaagggagtatccagattctttagaatcacagtgagattcttcattcttgcataattcatggggataaaataaactttaaaattctggcaccaaaataaaatgattgaaatttccatgactgttttgcattacttaagaacacatgcatcttgaaacaaaccatagttaatctgtgaactgcactcatgtccatccatgtccaccaaaacttttaatgattgcaaaatggataggtttgagtctttattttcttggccaatttctgcacgttttcatttagagcattaagctataaaaatatcagaagacatgtatttggttataggaagccacataagaatgagcagaagatttcaacagatcatttgttgggttagccaatctccagaaatctacagtgagctaactttagtgagcacagggcattgtaatctgagactgaggcgacacacactggatctaaggtgggtgagagaattgttagagacttgagagtgctacagtaacaactgatgaccttagaaaattggaaaaatatgacaaaaagatagacgtgtaggtatcctagagaagaggttaatgaatgaattagttccacacctcaaaaatgataatttataaccagctactgttgctgagactaaaacaagggagatagattaaacctcagtaggagggaaatagtttagatagaagaaaagataaccaggatcctgaacgttctcatgtactatggtgaaaaactgcaggagtatctgatcgttttccccaattctctttacttctagaaagccccagaatagaggagttgaggaactgatttttttccagaccataatcataatcacttattttatgttttaacactttgtctcccaaaggcatcctgagccatagctaagataacagacagtgcttgaaattttgagtgtaaataatttaacctagataaactggcatttaaatcttcatttctgcatttgtccctggctatttccccagctccactgtacagccaccttggggtagcagcccaaagagcctgtcagaactgggttgtaatgaaggctttgaaaggcgatagtgtagttgggaaggtggaaatgcctcatgcctaggggcaatctgagtcaaaagcagacagacaaatgggaggaggaggagggaggaaagaatgcttgagcaagtgaagagagaagggcatggcaacaggagcaggaataaaaagctctaaggcagggcacacaaagtgctgatagctgcagaatgaaggttaatctgatgttgaaagcaaaggggtttctcggggaagatagggacaagtgttctggtttcaatagtgaggtcagaagggtaagaatttgacatcggaggggttgctaccaggtggaaactagataacacaacagtgtgctggctgtggcttcagctacaggaataggggtgtcttctggattaatttttccttccaaagtttactgctcgtctctgccctgaataccttctgccctctattagatgctctcagctgtctttctctggtttgggctggcccctgtctcagttctatgctgagatagaactggtaactactgccttagttaccaagtttcttccttggtagtagcccctccacctctgtggtcctgctagcgttgcccagcgtggtcctttggcaccctggccactctgggttacagtagccgctcagcgtggcttcaacccactcctgaccctgcgccttcttcccagtatattcctgctctcactggttcaccaggttataacctacagcttggctctgacattcagtgccttcgaggttttaaggagtctaatattcaccatctgtagagacgggggaagcatgatgtggatgcctgctacatgggcaccatccctttgttgtgtacaagggtcaggcagggcagggtgctgacccagcctgagctgaggcctagagaaaagtttcagaacagtctagttgggaagaaatgcctttccagggcagaggaggaacttggagcagtaagtctgttagagaaaactggtaccgcagagaattaaggagcacagagccctgatttgagagtactggcaggcctgaattcaactttgagtgctactacatagtcgctcagaagttagtgacttgaaacaagctgcttagcctgtctggattccagtttccatgaaggaggaggaggaagaataagtgatagtgatgatgaagatcaacaacaacaacaaaaatccatttctgtagtctttactgtctgtacttggtactggtctgaggattttgtgagtgttaactcatttcatcttcacgactaccccgtgaaaatggcatcatgattattcccattctacagatgtggaaactaagatacaaagagattaggtaacttgtccacaattacacagctaacaaatagcaaagtcagaattgaagctcagcagcctggctccagacctcgtgttcctaatcacttggctcttttgtcacctggtagaaattacattgtgaaaagttgcttgtcagcagaggttaaggatcatttaagtttttaactataatattttatttcagcttaataacatagttgaaatgtgttgttttgtctgtgccactactttaccttgcccaaagtatacagggcccctggacacttccagaccacatgtgctctcactgcttggggacagctgttctaagataggcataatgtcatgggcacagcatgatactccttagctaatggtggactgtgaacatgattcaggctgaattgcctcttgcaaacaaaagaaatcaaggctatgtattgaaaagataggtagaaagaagcattatgtcttttggaatacataacatatgaggtaaatagtgtctggttctttgtacacttattcatataattatcaaaataaaccaatagatagtaagtagcacccttgttttgccaagagggaacctagaattcaaagaattactacccaagatcactcagtgtgaaagatgcacagacctagcattctagcccaggtctgtccacctccaaagcccatgccctagattgttcattttgctgccagcccgttggaaatagcctaaaattagtttaaattaggccagcaatattgagtttctttcataatcccttccaaccctgaaattccagttatatttctaacaggttcttaagaatagcatgctagccctctagttgaacacagtgggcccaggaacctcttttggggatgtcctgtgaagcttgagttggagacccctgatctgggcttggtccccacaccttcagctccttggtttgcgcaagggactgaattcagaggggatagtgtgatttatatctccaacccatgaaatgtgaagacaaaatactacattaatactgtaccctgtaaatcttttctcgcattagcagccttctggtagagtcgagttgccaaggaagcattgccatatgtgctgatggagctgaactaaaaggagaagattggaaaactaaccacactaataaatttcttttgaggcagttggaaaatggactgctgttttgacaagttagaaacaacacacacatccattctctgtttcaaatggttaaagtgaatttccaggacccaacagaaacatcttatattagaaacctgatttttctgctgaattacccagatgtcagatatatatgcactttagacttaattgtggttgtgatgaagtgcctcacctagactctctgctttaggcattactgggctgtgctacctctcctccctctgaggtcaaggtacaaggagggagtttggaattcccacctctttgacttttcattgtttcacagatcatgaccttcttacaaagaccatttacccaagactcatgttttcaaggcccacatctgtagtgggcctcagattataatccagtcaccttcattttcctgtttaaccagacaaggtagtcactacaagaatggttcttatcaacaacttccgtgagtggcagcatctggcctaggtcttaggaatggatttgtgctttggttttattctaagttgaagttaatcatttaatataaggaagctcggggcctctaatatattaccttaaactcctagtttctctagcttcctcaggtctctgctcttgcaaactatccttcacctgcctctagaactttttactttttgaactttactttttaccctaaaagccaccccatgcatctacagaatttggtgcatgctccttagtgggcctgggagagaagttgtgcagcgtaccaggtaagagcacaggctggagtcggacagcctgggtggaaccccgttcccccatcaaacagctgagccaccatgggcagctcccttaaagtcggcctcagtttcttcttcagttgctgtggataaaacaaaagccactgtttaagtaaggtattgtgtggattaaatgtgttcattcacataaaacacacagtactgtagtatgtggatatagcgagtgctccccaaatattggctgttgtcattatcactactattaataatattgttatttattatctggtcttctgtgatccaagcacagcctccagtgccctgactccatgccatagccttaagatgttggtgcctttgcacaccaactgtttcctctgcctgggtcaccttgccctccattctgctcattgtctcatctttccggggaacctctgctcacccttgaagtcccagggcaaatatctcctcttctttgatgttttttcccctcctgcaggcagaagaactggttctctccactgggttctcatagtcctgtgatgcccctggggtctggtatgcagcacctgctgttgttaggtggtttgtcccccatctggcaggtggagacaactagcgttccctttccctctaaactctgagcttcttagcggggaggcaccagtctcactgtgttcatcccagttcctctcagtaccaggcagacagagaaggcatttggtaaatgtttgctgaacaaatagctacttgttgccttctttgtagtcttaaatacggggttttcccttctgttttttgccgttcacaatgcattactaaatttatggtgagaaggataaatttcagtagtttgaaaggctggctgaagtgattgtatctaacacagtagtcattaggctctgtggcctgtttttttattagtcatttaaaaagactgtcacaggatagttatggagacaagagttcatcatttaaatcacagtgctttcaacccatccacaattttggtctacaatttaatgatgagaaaaatacatctagcaagtaaatgtttaactaagcattttgttacttgatgtgaatacagggagaaagatgaaaatttcaattgtgaagaggtagtttaaacaggcgtatgcccacatattactagtagaaattaatgttgtacttttattaggtaataaccaagccttctcctattatagatatcttactgaaagatcagtgagtgagtgtcatgagtatagtttaggagagaatgcttgctttggataagaatgcttgctttgcccaaatggttgcatattcccgttttttctcatatgctgcctcagctcatttaaattctaaagagcacagccccactcaagctagcaagagcttaggggggcttttgataaacattcacacaagagagaaagaaggtagaaatctcagatccaagagcaggagctgcactggaggctggcctcagtgggacccaaaggtgatggggacaggcgctcccacctgtgtgcctttcatgggctatgtgcattctctttttaatctctattccttttgctccacattctcatctgtccaccaatgcacttcctctgcttattcatggtttctgcttccttgtgatattagcacacacgtgacttccaattggctgctttccttgctccacccatgacatcttttcatcttgttgcttctgtgctaacttgtcccctcttctctaaagactgtcagtcatcctcctggagaaggcatcctaattggccagctctatttttggtagcaggctcaggttgctgaactcttgatttgcgtgtcttttaggtgttttacattgtccagtcagctgtggccctggggatgaagcaggcttagatgttatagttgcttagtgaagggctgcaaactcaggacaggtgagatggctcacacctgcaatcccaacattttggaaagcctaggcaggaggattgcttgaggccaggaatctgagactggtctgggcaacatagtgagggcttatctctttgttaaaaataaaaaatgagaaaaaacaaaaagaagcgttgcaaactcaaatgctgataggatctaggcaggttatataagtgaacaaatgcagctgggtgtgtgagatgcaggtacacatttgcacattaacacagagttgagttgtatataaagatacagattttttgagtaagatggctaaagcttgtatcccagtctcaccacttaacagctaggtaacttggaagaaattactttatctctctatgccttggtttcctctctgtagagtggttatgaagactaaatgagttaatacattttgtaaaatggtacctggcacgtaataaacgtgatgcacttttaaagaaaattttcattaacatcaccatccttatccttgtttaattccacaatgaaggacttcctcccatttttccatgaaaacatgaagctgtattcatctttttagttttccccctttataaggctatgagcaaagaaaaaattttatcaattgtgacgatatcagtaaagcaataaaaatagaaactggaggccgggcgctgtggctcacgcctgtaatcccgacactttggaaggccaaggcaggcggatcatgaggtcaggagatggagaccatgctggctaacatggtgaaaccccatctctactaaaaatacaaaaaattagccgggcgtggtggcaggcgcctatagtcccagctactcgggaggctgaggcaggagaatggcatgaacccaagaggcggagctggcagtgagccgagatcgcgccactgcactgtagcctgggcgacagagtgagactccgtcaaaaaaaaaaatacaaactggcgcttgtcctcattgaggtacgggcctcaaagcagggtgggcaccaccttgcatggtttctgtctgaaggatggagcctcatgcaatagagcagatggctgggatgtcagaaagaggcccggggtcagtcagagttcggtcagaactgagcccatgaactgactgttaggtcagtgtgttcattgatctttttttttttttgaggcagagtctcgctccattgccgggctggagtgcagtggtgcaatctcggctcactgcaacctccacctcctgggttcaagcaattctcctgtcttggcctcccaactagctgggactacaggtgcctgccaccacacccagctaatttttgtatttttagtagagacagggtttcaccttgttggtcaggctggtctcgaactcctgacctcagatgatccaccctcctcagcctcccaaagtgttgggattacaggcataagccaccgtgcctggcctcattgatctttcttacaaggaggtcagattatgtttgaaactttttgttactcaataaaacacacttataggttggatacatatggcattcaagctagtgacctctcaggctgctcctttaggaagagagtgtgggcagggctggtccctcagaagaggctgtgagtggactttcttacatagataaattagaaaattgtacttccaatgaagaatattaccatgaacctctctcagtatgacacagggtgcaacatgctcctaccttcagggttagcttggtgtgtgtttccaagaaaaaacaactgtgatttaatttttttttctttaagaagaacaaatgaaaatgatgacattttttagttcagatacgtagctccactaaatgttctaactgccttccccaaaattggtccttgttttagaaaatcaagtggtccactgatttagaaggcagaagggaaggagcagactttgggggaataatgagatttcctatatcactaatactgttgatttacccaatgtgcaaacgatccagaatgtgagatggaatgtacttgggactgatgcggctgttagaagttagtacttaaacattccatttcaaatattctcattaagggtaatagcagaaaattgcagcagagattaagcagtttttaagtggtaatcccctctgtagaactgttgatttgtttagttaatgctaatttatttaatatacttctactttttgttgatttttaggtctgttgccacagttattgggagttgccccagagaaggccataaaacttacagtaagtcttttgagttggtgcttcttattaagggattttgtacatactcaagaatctagcaggtattcttataggaaacagcaggtttgttttctcagaggtgctagctaatttgaaagcaggggaactcaccacacacattttttcattattctccatttagcagtggacatccaaaaatgtgataataaacttgaggacttttggtggttgctgccatcattgttgtcatcacagcagtagcagctaaattcccttcagtatctaccatattaggcacatgacgtatattacgttttactggtttaatctcaagcaaagcatgatccacagtttacggataaggaaactgaggcctatcgggcttaagtagcatacctgtgttcacacaaatcatgagtgggagaactagaatttaaaatcacacttgtctgactccagagcatgtctttctattacacctgctgtttttataggattcatggttagggtgtgttctataaagccaaatgtgcagggatctgggttctagttgaagttgatcctttatcagattatttgcccagtgcttggctcacatttgacagatggttgatattcagtttaagcgtttgtggaatatacaaatatttgcatcactaaggccacaaagccccagaaagtaaaactctagctttaggttgggctgcgtagctttggagcctgaaattcttcttttaccattttgttatgtgaccttgagatagctaatcttctctggcctatgtctgccaaaaagatatgactgtttcttaaaatttcttgtactacataccattttgagaatattatattaattaattaatgtaatttatgttctttgagaatccttgaggaatttttagatattgaatttcttctaagctgaaaaagtctgctcagccaaatttatctccatgatgagtactgttttagattaattcttgttagaagacttgaaagtgatttttaatcaagccttataaaacagttttaagttgtaagatgtatgtttttattttgtcactattgtcagtgtgtctcccttcttaagctattctaattgcagaacatatttttggctttcatttatcttttaacttttctcctgaaacatcagtgatgcatatatatttttcattttttaaaactattatactattaagagtacttctcaaactattttaagatctgttaaattgtgcaatttatgattactccaatagactgatagaaaaaaatagcatatattgacagatgcatatttataagtgtttaatgactttctttatatttttcatcagcttctataaatatttttcttcaaggtgaacgattttgtgagggataaatttatgcacaaagatggttcggtcccacttgcagcagaaattcttgctggaggctgcgtaagtaccttttgaagctctcttcattgaaaagacttgtttcacatatatatcactaccatggtcaacaggtgtggactaaggcttctgtttaaccacagatcctgcacaagggcagagtctactagggcacctcggcttttcctagacaggcgaaccattccagaggtggaagggtaaatgtttctgaccttactgcctgttaagtcatgcctgttaaattcgtcattgcttatggtttgttctgcaatggaagtcatttgtggcagaagtgtttggcctttgaaaaatctttgctaaccttttctaaagttaatttttagtacattctttcctcatggcaccctctgctgggtcaggcactaaaacttgtagtctgaagtcagcaaccgtagctctctgcttggctttgccttgcaagtggcagaactgttcaagcttccactgcttttgggagaacaatgctgggaaataactggctgagtgtgcgctgcattgtcaaaaatgcttggaatgattgtttccttatatggatgaacaacttgcatcttgttctgaagctcagcaaaacattgtgtctcgttttatctcgtactggtttgttcatgcgaatgtaaatactttaagtaaattaaactcttatacaaagactagtgttatttaaagataagattggttaaataacaggctttgatcactcaggcgatacaatattggttttttttatccgaacctatttcttataaaaaagatgaagtcacttttttaaattggcttactctgggcaggaagtagtattcctaaagtaatttttttcttgaagatccttgaatgtagacgttgggcaatgtttgtgtggaaagggcttattgtcctatctaatggtgaatgatggtttcttaaatgtagcaggacctaagaagtcctagctcctggtattctttagagatggatggaatttggctactgcctgactctctgtttgatcactgacctgttggagatgggcaggcaggatccccttgttctgtaactttaggagcgttcaggatggaaaaaaaggagcctttaatgtcctaaatataaagggcacacaataataatcaaagagaattttagaagttgctcttccccataactactctccatttaaaacaactctgtagtttccatttgagtaagtaggttttctaatttttgagtaggtatatccataggctgtgcctagcctagtccttcaggttgttgcagggcccaggatatagcagggttttttggtaggtcaggtggggttgttgtttttttaagttacattttaaactttctgaaaagatatgattatagatttctgtaagaattaaaatgtaaaattaattatgtgatactactcaagatgttggcaatcatcatggcatggtgcccagaggtttattttctttttaatgaaagcattttgcctgcacatacctctgggtgccaaggagattggttgtggcacgtattttctaggtgccatctgtaggtggtcttgtttttgcatatgcggccgcccatttcaaacacaaagcacattggcatcagaagtggtgcctagttatgtaaagagatgtagcccttttcaaacctgatctaaacacaggcttaaaattggagccacttaggctttacagctacttaaaatatctgtgaaatgaggtttgccatccttcatctcaaagaggtagacagtggtccttagcttttcaagtcttctcccttgcctttttcccccccaatcattactttaagaagtaagagtttattttcagttaagcaatcctgtaggtagcagacaacccaggtccctttagatctctgagtagatgaatggatggttccattttctgtgtgtgtgtttgtgtgtgtgcacacgtgctttttttttttttttttttttttttttttttcagacagagtttcgctctgtcaccaggctggagtgcagtggcgggatcttggctcactgcagcctccacctcccgggttcaagcgattctcctgcctcagcctcccgagtagctgggactacaggcacacaccaccatgtccagctaacttttttgcatttttagtagagactaggtttcaccatgttggccaggatggtctcaatctcctgacctcgtgatccgcctgccttggcctcccaaaatgctgggattacaggcatggggccaccccgcccagccatgcattttttaagtaatagcagcatctttctttgcaggctttggcaaagtcttctctataattggagtcagtcacacaccttagagggttgttgtgagttccacagcctcatctgtcctattgggaatacaaagggttttgtaaggttgtgtcacatgagcggttcctcatcttagttcatccaagcattgctaggtgttgacttttaagtccctggggagctcaccttgcttcatgattactgagaattagtacacatggctgacttttgcacttgtaaccaaagctgctcatttctttgaacaaggcttattctgttttatgatctgttttctgcaaaaatgaggaaagtatgtagggagatctttgtctcataacttcataatgtttagctaaacagcctgttttattgtatatatttttttagaatgaaagtgttagtaaatttggaggggaaaaaatgattgtcactaaaaaggaataaagtttatcccatttcttatttattatttttgatataataaagcctgtaactgaagagatgaaaaaataatcttctgtttcactgacatatgtaaaagggctaactttcacgtctaactttatttttaaactcattttttgcatttgagattagttttagtttagagcactgttaaaaattgacttcagttttctgagcatttttatagattcacactttaacagtagtgatatattcagcatgttttaagacaaaactcgatgctgagactggggtttacaaactctaaatctgaaagaatcctttgtggtttgtgttttctccctaacttgggtttctgcattctaaattagggttgtagttgtgggagttctgatggagacttggaccttcagtcttccctgcatgaggtatatatatatatgtataccttctgtttttttccatcttttcccttcttggatcaaaaacttggcacctttagagggatgtgattgaaaatctgtgttagtgaccgtgtgtgtcagaagacagaggttctgttaccactagccacttccagttaggttcccaatgattctgaaaattgatgtattacctctgaatatattgtttttattgcttttttgctgttactttaagaaaaaaataaaaaataatgtatgtaatgcaatatgatctgtaggctgcagtgcttcattcaacaaagtaagtgtatgacttttatatatctagtgtaatatgcatctaggttgaaatcttgaggagcctgggatctttagcttttgatcctttgatctttaaaaaaaagtcaccagataagaaatacaagtggtgcaatgactagtttcaaggaagaaatataaatatgatgattaatttatttggcctgaaaataaatctaatattactaagaaagaaagtcatgaaagtatgaacatctgtcttataaagccatatttagtaaaaactgtttatataacaagagaaagtaatagtattgtgtagtaatttttggaaagacaaattaacatgttttttaaactatggtcctttgataatgggtccagggtattttttcattgtgatgcacacatgtgtgtgcgtgagtgtgcatgttgtaaatataattggtgtttatagaagtttatattcattttgactgcattttgagttggaaaaacagtttatatgcttgtgtcactggttctaaaagggactggtgagactaacactgttgggaaaacatggaatgaagagtaatcttaattacactcccctataaataagtaggaccctaatgcagtttcctgcctgattcctaccataatggtgattcccatatgcatgatgtgtttatgccagtttgtccagccacgtatcaaatactgtttttaaggcaaggttttattactcatctcatacattacattcagttgcagttaatttatattttgaaaaattttgaaaaacacaacaatacagacacaggtgtgcctaccacttagattggtgacaaacttgacagtgcagttggaggcccttaatgtacctgtccaaattgcttttcattcccttacctctgtctcccaagagaaaactctgtcctgacagtggtgtttttcattctaagcatgtctctctactttttattacctgtgaatatcctaagcagtataaatgtttgtttttgaatgcctcatcctaacccagtgctctaggaacacctcatatgattcccagattgatgcctttgcattttttcccattagtgcaactcatgtgctttgcttatcagaaaataatagtaaatgggagtattacattcaaagtgttggaatgcggcagatactgcgtatgtctgttacagatgtgtgggtttctagatggacttatggttggaacagtgtattcatttaaccaagtttttggttacttggggtttctccctagacaacagtcatttcttcagtcttatgatttaaacttatacatgatacttagtttaaaaatgttaaccctccccactgccagcatacgctccctatctacctatcagcctgccttcccatcatccctcccttcttcttctgctgccatggttcttaccaccttcaaacattctgtataacttacttatttttcatgatttttgtttattttctgtctccttcatggtagagtacaagttctgcaaaagcagggatcttcttattcattgatgtatcctgaggactgcaggcattgcatggtaacctgtagactctttgtaaatattggttaaatgaaagaattttaaagctaaaatcactcaaaagtgatcttgtcaatcttcacagccaatcaacgacaaatctgataatggactcatttatatcttttctttaatgttagtcaaaccccttcccatcattaacaataaaacttatcacctgtctctccaagccatacttaatgataattcccaaatcaccaagaatagaaagcatatagatggagatcattttacaaagtgaaagtgttccttttaaaaccttgccattctaatttttgagaattgccaacagggatgctgctgcttcttttgtgtgtgtgtgtgtgtgtgtgtgtgtgtgtgtgtaaagttaatccttttgaaaatcatagccatttgtagtaaaaataatcacatctaacaagaggcagtccagtttcctgtaaagaacatgggcttttagtcggtttggggtcccaaggccttcacctgccagatgtgaatcaaggattagacaacttagttgacttctctgagttgcagctttcttgtctataaaatttagatagcaactttctctttcagttatctattgctgtgtaacaaacccctccaaaacttagtggtttaaaacaataatctgttctttttcattaatgctgcctcctttccgtggtttctgtctctttcccatggtttcagctggagtggtgaggcagctagaaggtccaaaatgtcctcacacaaatggcaatcagcttggagctcagctggagccatggctgggggaacaggttctccacatggcatatctgcgtgagcttcctcacactatagtgtcagacttaagaaggtgagttctgagagcagaataagaagctgagaaaaatctcaggcccagtttttgaggttatgcaacattaatttagccacagtgtgtttgttaaaacaggttataggccagccggattcagtgccagggaaaataatctacctctgaatgggagatgtggcattgatgttgcagccatctttaatgcaccacagttaccttgcctgattgtgggaaaaattaaatgagataatatgtatgaaagaattaaatcatgacttaagtactagtcttcctcctcttctggtgtctactttttaacttctaatatatatatatatggagagagagagaggatgttgtgaaaatgaatgttttagtttggctttttgggtgaaggggaatggaataggtgtattggagtttggatatggctgttgaggacctcagctacctcaggtgctcctgaaatctctggtcttctttgtgaacctgcttatttgccatttctctactgattgatttcctctgctgggtaacatagcatctttattctaaaaatgactttaatttcatcctgtgtccacagtgcatgccaatcccagttccaaggctttcctcctaacaggaatgatctcagtgtttctccatcattgaggaggagaagtgttctgattatctattgctgcataacaaataatctgaaaatttagtggcttcaaatagatacttattattattctctcttgtggttctatggattgacggggctcagcctgggagggttgtacttgggatccttatatggttatgggctagtggcagctggggccagactcatctgaagggtcaaccgggatagatatccaaggtggctcactcttgtaactgaacagctggggctgtgctccagagcacctgcttgacttctctgtgtagcttggtcttttcaaacattgacaatttgattctgagagggagcctcccaagagcaggcatcttaagagtcctgggcagaaacaagacttcttatgacctgaccttgaaggtcactgccagtgcattctgatggtcagacaagccagttaggctggcccagactcaacaggagagaaattagaccctacatcgtaataggaataatagcaaaggatgttttaactgccactggaggattcagtaagctgtgttgtgggctgggaacatcttcattgcccttcaccttgtgaaggtttcatagcccatctcatgccttctctgagggtctgttgctgatcctagaacccattcattctctagattgcttctggtagcagggggcagaaactcaccaaagttggagttaatcaaatgaaggtttactttaagggtacccattaaatgaaactgaaggctcttgagaattgaggcagcattaggaactggctactctctccattttctctacttggcctttgtctctctcacagtgactttgcatccctctgcacatcttttgactattctaatccataacttcttctcttcctgaagaattggtgttgactttctcaagaattcccttcatgttcttgccagccacctagcctttctctacagtaggagacagcctcttttcatcccttgccccagccccagctaattagcttaagttgttcagttttgttttgttttccatttaattattgagagaggaaatctgattggcaaacctcatctttgtgcgccaggccatacatatggcagccttgagtcatggcgccacccagatattaatgactttgcttaacatttccatttgtttcaactacctgtaagtgtcttcaaacctttcttgtactgttttgtttttagctctgaattctgtaagtttgccctgaatagtattgtgtatactttggtcataaaatatactcaaagtcaccattccttatgattgaacttgaaatcccttaagatttcatactcactcatatcaaaccaggaagaaaatttcctcatataatgaatacatatactctgacaatcagagctgatgagacagattgcctgaagtggatttaagtcttacttcgcgatctttttcttcccaggatttcctgtggatacgtagcctcatagtgtggttttcttaaggtagaatttttatttcactatgcaagtctctgcacatatcttacttataaatataagatgatgtgaggcttaatcattaggttgagtttttatgaagtcactcttgtgtgacatgtgaattaatcaagatacattatgcattatagtgatgctatagcaataatgttaatttttttaatgcttgtatctttacagtcttttgtagttcagtgaaaatctagtgattatattgttttcaaatgttattattgttattgtttggaatattccctgggagaactttttgcctactccgccaaaatgtaagaccatattaaagattttcttgatttgtacttgcactttatctctgccttccatctcctcttgacttggagggttggagactgtgtctggtattatatgacctgctgtctttgtcaaccatggtcactgctttgccacttgaggagatcttccttcataactttgtgctgacaactaattgcatctcacagaccttgagtaaatggctgaactgagacatctataaatatggatgacagggcctgtgttgcactgttacagctgtgtgtctagcattgtgtctgacatatggaagaaacttaaaaaaaaatctgttgaatgaataaatgcttgactacaaggtgtgggtcatagatttggaaaggaagggtagtgactctgtataccatgttactattcatttagagactgatggccagcaaagaggaattaactccaaaaattagtgggagagtaggggtgcaggaattgagggaatagctgtaaccatggctaggtgtctgcatatccaggatatttcacaagaaagtattccatgatcacccagtaatagaaccaacctttataaggctcctatttattttatttgacttcatttctaagaatgacaaataaataatccccaaatatattcagaatcttaagaacaggatgaagataaacaacttggagcatttggtatagcttatttattatggcttgtattttaagtagaaaagactttattgaatgactaacatgaaattatgtcagagtcatgaaggaatcatagaaaagaggagctttaaaaaaggaggagccaattaatagccaaaaaaaaaaaaaaaaatgctaacctcatggcactatctaaattggcagatttctgaaaagccaagaggcagctccatcggttttctcaaaaagtcctccaggcaatgggactaaggcattggtcttgaatagagttccactgcttgcctactccaatgagaggctctttctccagatgatttcaacttggactgagggcaaaattaaaagaaatatctgatggtactaagggctcatgggtgctatagattgaatgtttattttccccacaattgctatgtttaaacctaactcccagtgtggtggtattagaagagtgggacctttgggggtgattaggtcatgagggtggagcctacagtttgagattagtgcccttataaaagggatcccagggaggtccccactccttcctccatgtgaggacacagtgagaagacagcatctgtgagccaggaagcagtgctcaccagattccaactgtgccggcactgtgatctcagatttcgagcctccagaactctgagaaatgaatttatgttgtttataagccacgtagtctatgatactttgttacagaagcccgaacagactaagacagttaaggatagcctccctggctaagggctgccttcagtggctcagaaatgtcatcttattagaggaaagtccaactttcatgctagacactgggccagccagatacttcctttctgtttttctccctttaccttctctgggaaagtctcagagttgtttgactcaacacagttcaaatattgggccatctttctggatttctagtaaatagggaggagtttgttacgataggaaaatctgaagaaagactgggccatagctttcatacagttaaggtactttagacattgaaggtctgtaaatcattaaactattctggtagtagtagtcaaaatacacatgtataacaggcagaccccaaatgttaacatatttgacaggcctgtaagttaattgctttttaatgtcagtcaaatggattccactttggtttcttggccaggcttctatgggcccattaaaaccccatgaagctgaaaacatgaaacttaatatttgtaaaacatgtaaacagaatagcctttttctgccttaccgtgtggttaagaaattaggactaggatatttcagtttggtatctttctcagaatccaattagagtaagaatttattttattatcttttcaatattgttaataatctagtaacacatttttcacttaagagttttattttcataccaaatcaaaagaaaaaaaaattctatattgctttatgtttagagatgtgcatttggtcagacagtctaacttagtgtattcgtttggtcaggctgccataacaaaatgcctcataccacagagcgggaggcttaaacaacagagactggaagtccgaggttaaggtgttggcagttttggtttcttctgaggcctctcttcttttcttgcagatggccgccttctcactgtgtcctcacgtggtcacccctcagtccatgtgtcgtctgtgtcttaatctctaattataagggcaccagtcatattggattagggcccatccatttgacttcatttcttcttaattacctcttaaaaggccgtaagtccaaatccggtcacattctgaggtcctgagagttaggacttcagtatacaaattttggagagacgcaattcagccctaatgctagggtttaagaaaaggtctttctttcagtttgtgaggactcaggtttctgattgcaggagggtgatgatgtatcttgtgaaggcagtgagcccaacacacttcccttcagagctcgacagggtgagtggccttccgacctcatgccacctcatctttgccagcttctttgtgaggttgctgaatgccgtcttcagcacttgtgaacagttttgaacagcacttgactgcaatttggcaatgtgttttaatttattccatccactgctatttgctgaatatctcttttttacctgtgagctctgcatacaataatagttggttacatacaaattattttcatgtctctatttaacattgagttagtaagaaagtaaatggaaaatatgttgaaccttagattcctttacaagtctttattttctaatttattcaaatgtcaaacactgtcatcacttgtgtattcgtcttaatgaaacataaatcactagacatttattactatatatcttgtttgtagttacaattgtgtttgtgtccagataatcaaaataatgtatttgggtttaagtaaaagtctattctataactttatattaatctatttttgacacgtgtaagcacgcattttagaatgtcagtgtgcaattagatattcttagcacatgtcatttgtgaaaagcactttaaatctaagtacattcaattgagcataattaaaatatcaagatacatattcttcatatacattttgcctcttaattttttaagtagctataagtatctaccatgtgaattcaaattaaaggagggtgattaaattacagttatatttattgcttttagtttaaaatatagttgaaattgcgctatattaaaaaatatactgccatgttttctgtggacagcagactgatgatgggtttaatttgttttaatgcaagactattaatagtctctgaatattctcaagactgttgactagaatgattgggggttgggaggcgtaagaaggcttgtatttttatctaatgagttcttttgacttgactcctgaagtctcaagaaaatgttcaggaatactacctcatttaataaagaagcattggagaaagccttgttttgttgatacaaatgaaaggaaatggatcatggggaaatatgaactggagctcctgaacccttatcctttagataatgtatttaggctactgatatttcctatcattgtgaaaatgagcagacagccttggtgagtcagttttaaggcacatgtaactgttaaacctacttgtccacaactgttggacctaaagtatattatgattttagtgaaggccattgttcttggagtacttagagaaaatggggctgtacgttagaactctggattgtgttgcctttctaaaatatttgatttcttaaaattctgtttgtttgtttgtttgtttgtttgttttccaagatagaggcttgttctgtcgcccaggctggagtgcagtggtgtaatcttggctcactgtaacctccgcctcctgggttcaagcaattctgcctcagcctcccaagtggccaagactacaggcacgcaccaccatgcccagataatttttgtatttttagtagagagaggattttgccgtgtcagccaggctggtctccatttcctgacctcaagtgatccacttgcctcagcctcccaaagtgctgggattacaggtgtgagccacggcacccagcccttaaaaatctgtttttaaaaaataaatagctatatcacttccctgtgccaaaccagaagtgtcaacaatgaagtcattatgtaacatggcaagagggattcgggtggcaaaaccgtaaggaggagaagaagaaatcaagcttatagaagcatgtagacactgagtgaaagacgcagtgataggaaccacagtttggtttttttgcagactagcccatttcagagaaggcggtattagaagaaaaaacctataattttactgtgagccgtgaggaccatttcacatgaaaaaaaaacagagcatttggaaataatgatgcttcgtatcagtagaatgctgtgcgtttgagaagcttggcgcttggacttcatgctgacatggttgtagtcacagtcctattgccctttctggttgctctcagcactcctggatgcaaaggtgaatttatgaagatcatggacttccgatacaaattacagcagccaaaactgtcatatggagatgtgaacttaagattgtattggtagataggtgaagcacccattgctcctatcttgaaatgactatgctatatttagacaaaacctacatcagtataattattttgcaagcccatttgaagaaaattaaaactgtcactagttatatatttttgagcctaaaatatttctcacggctgggcatggtgtatcatgcctgtaatcccagcactttggtaggccgaggcaggtggatcacttgaggtcaggaatttgaaaccagcctggccaacatggtgaaacactgtctctactaaaaatacaaaaatttgggaggctgaggcgggcaggtcatgaggttaggagattgagaccatcgtggctaacacagtgaaaccccgtctctactaaaaacacaaaaaattagccaggcgcggtgacgggtgcctgtattcccagctacttgggaggctgaggcaggagaatgctgtgaacctgggaggcagagcttgcagtgagctaagatcatgccactgcactccagcctgggcgacagacggagattctgtctcaaaaaattggctgggcatggtggcgagcgcctgtagtcccaagtacttgggaggctgaggcacgagaatctcttgaacctgggaggcgaaggttacagtgagctgagtttgcactactgcactccagcctgggcgacagaacaagactctgtctccaaaataaataaataaataaaatatttctcaaggattcagatttggggattttactgccaagtagcctggctttctcattattgattaacctacaaagaaaaatttgatatatctgatgaaaatcagttatattgtacctacaaaaacatctcttccatattacttgatgtattttaatgtcactgaatccattggtttatctttatctcttagaagctcttaaagtcacaggaattctagtccatatgatcagattaaccaaaaattcaggcagctactccgttcaaacaggaaagaaaaaactgaaaatgaattgttgtattgaatctgctttttcacaagagacaactaggcgtaatggttctgagcgtgggttagaaattgggcaagtcgcgttcacattcttttactaccttgaagagaagtctctgcctccatctcatctctagaaagatgggaataatatagcttgtgtcagcatgattgggggattgaaggagatgatgtctgtgaagagtttagcacagtgcctcctacatcagaagtgcttgacacgtgtctggctcttgcttctccaggaaggagaggaggggagaagagagagtttgcagggccgtagttattcaagtagttacagctatctcttctttctggtcacactgctgggtaatttgttcttgaaaagtgtctcaagatgactgctcccacttagtagctggaaaatcacatccttccagaaagggatctagagggcagacatgggtgaagtgtacattgttagagggctgactggaaataatcagtgcagagatcactgtgggcagagccacagccttcaggtcctataaagggcagaacgataggaataatctactgcataggaaaaccaaagaaaagaaggaggacgaaaaacactctggggaggaaaaaataattggggttcactactgggatatctttccctctgctagaagatccttcatacataatgaatcacagtttggaaatggagcctttgaaaaaaaatccttacacaactggtaagagagaagtctcataccagccactgaatttttgcagaaatttgggcctccctccgcaagtgtactttcagactcaaattcctccagcatccaggacctcttgattaactatgtactctcaataaagagaaaaagatgagacctctgggaagcaagaattggtagaagctgggcctggtacagtggctcacacctgtcaccccagcactttgggaggccaaggtgggtggatcacttgaggccaggagtttgagaccagcctgggcaacatggcgaagcctatctctactaaaattacaaaaaaactagccaggtatggtggcgtacacctgtaatcccagctacagcaggaggctgaggcacgagaatcacttgaacccaggaggcggaggttacattgagccaagattgtgccactgcactccagcctgggtgacagagagagactctgtcttaaaaaaaaaaaaaagaaaaagatgctgaaatgtatcaaaaccagcctactcgtcatcctcttttaaaagaaaaagatgagtaaaccatcgcattactcattaggatgttaccagatatgtgagttggtcagagggactcctagctacaagtagaaggagtccactctaccattgactgtgtgcaaagtagcacattttatctacctttttaagatactcggccggatgcagtggctcacgcctgtaatcccagcactctggggggctgaggcaggcagatcacctgaggtcaggagttcaagaccatcctggccaacttagtgaaaccctgtctctgctaaaaatacaaaaattagccagatgtcgtggcacgcacctgtagtcccagctacttgggagactgaggcctgagaatcgcttgaacctgggagatggagtttgcagtgagccaagatcatgtcactacactccagcctgggtaagagagtgagactctgtcttaaaaaaaaaaaaaaaaaaaagacactcagtgactctgtgactctacgtatttggatctttccatttatctagtcttgtgctaaactttaaaaatttctgacactttataaaatgtgtgtaaatgtgtactgatataagatcctctacacgattttttattcagaatattcctgtcttcagacatcttcaggaaaccctgttggggttttgtttaggaggattgctttgaatttagattaacttaggaaaaagttataatatttgactgttataatcatttttaggaaaatttgcattttaaatttatagcccaagtgacgtatttgcaacattgaatctaatgatacttatttctctttcattcaaatgtttatgtgcctttaaaacaatacattttttcttcattttgatcctatatatttcatgttaagttattctttattaatgccacttgtaaaagaataaaaatatgtaagatttcttttggtgtaccagttctattgttctcctctaataaagatatataatgtttttgaatgtcgggtccccttttgaaaaatgctacaaaaagtttgtttacactggtgctagtattcaatactaatagagtgggcaataaaatgttcctcagttcctgataatagcctgggtgagagtacacatggcactgaacttagtaatttatcttctacagtcgtgggtgcacacagtgactcttaatagagaacccgctgtggtgctgcctgcagctctgggtcccctgcagccaggtgcaggtatgcagcccagtgcagatgtgcagccctaagccctgtttaaacacatggccacctgctgtaccttctaacctgttttgagttgaggaacagaatgtgtgagcctatgaactcacctctgtggtcatcagctgcttcatcttctcttctgtgttacagatcacagtaacttaatcataacttcctatggagagccagaatattattttactattgattctgaaggggtcttttgttgctgatgtggtttatgcatcagaactttagttgttcttgtgccaaattcgattctgtttgatttttttaaatctccaaagcataaatagtaaggacaactatgatttgtcagtttctgctctgtaacaaatttatcccccaactctgtatgtcactaaagcaaatgcaaactcttcatgttctacctttcactcctccattcagaacttgtactgttatgcgtaagcacagcataattatccctagtagttttatcttttcactctcttccccctagatattttctccttaattaccctaaatgaattgtcattgtctcttgattgctctcataaactactgtcattttctcactttcccttcccctgcaagtagactacacagctctctcattccccagcattctcgttccaatcctaggtcaccccatgtgctggactttgcctccctgtgtcagtagacattgttggtcctttcgccttctcacttctggaagccctgttcttaactcttgtgcctggattgctgtaccaccggtgtatagcagaggtttttcatcacttcatggtctctcgccactttccatttttcttcttcatcctcccaccttatctaaacccctgccttcagttatatatgtggagtgatgccctcatctgtgtctctcatccctcttaactcacccttccactgccttctgaatgtgtcattattcgtctttccaacactttgttcctattacacagcaaaaacttggatcctttctttgagcttacccactctttttgccctatattcagcagccaaatcctgttggtctctgttgcatccattacccagccacctctattcagtatagatatgactgttctaattctggccttttatcactcacctagtcggctaacaacctaattgtgatccctgcctcaggctctgcctcccggatgagccctctcccctctgctccctaggcatcttcccaaggcatagataatgctcagacctctacagctcctaagctgtgtttaccagctctcctgctgctacatagtcgcacagaccatctccagaatgcagcctgttctaggcagcatcctggaccttccatgagttggctccagcaatcttattttcagccaccttctttcataccccttctccatgccatctagagcaaaaggctgccatgataagaactgtaagtgtgccgctggcatccagccacttgagcttggaatccaaggttcaccttcctagctgcatgactccaagcatgttaaatagcctcctttactttttgtagcctcagtttcttcactgaaaccaggattttatttatttatttatttttattgagacggagtcttgctttgtcactcaggctggagtgcagtggcacaatcttggctcactgcaacctccgctgcccgggatcaagtgattctcctgcctcagcctcctgagtagctgggattacaggcacctgccaccatgtccggctaatttttttgtatttttagtagagatggggtttagccatgttggccagcctggtctcaaactcctgacctcaggtgatccacctgccttgacctcccaaagtgctgggattacaggcatgagtcactgcacccgacctattatttatcttattacttaccttataatattatgaagaccaaaaaacaatttttttttttttgagacagaatctccctctgtcgctcaggctggagtgcagtggcacgatcctggctcactgaaatctccgcctcccgagttcaagtgattcttctgcctcagcctcctgagtagctgggattacaggtgtgcgtcaccatgcccagctaattttgtgtatttagtagagatggagtttcaccatattagccaggcttatcctgaactcctgacctcaggtgatccacctgccttggtctcccaaagtgctgggattacaggtgtgagccaccacacctggcccaagaattcttatagaactcttaccacaatccctggtacttagtaagctagaggagcctcaataaatgctagaggatgatgatgttgatctcatcataattatcatccttattaaaatttcgcttggcagaagtgatgctgggtatattacccatataagtgtgatatgcccttgtcactgttcctttgtgcctttctctgcctggactaccaaaatcctaatcacactgtagtccccagctaacatgttaccttctcactggcttaatcacctcccagccaggagagctcttgccctcctttgaactgtcatatcagtttgtctggaccttggatcttatcatataattatctgttctcatgtcccattttctgtatttatgaggcatatagttactgaactccattgaaaatcctttcctctgcttgctggctatatagccctgggtacgttgctatattagtttgctagtgctaccaaaacaaaataccacaaactaggtggcttaaacaacagaaaatttatattctcacatttctagaatctgaaagttcaagatcaaggtgttggcagggttggtttcttctgaggtctctctctttggcttgtagatagccgctttttccctgtgtcttctcttttgtgtcctacatgtctgtgtctcagttttctcttcttgtaacaaaccagttggatgggattacgtcccaccctaaagacctctttttaacttaatttctcttttaaaggccctgtttccaactatagtcacattctgaaatatttgagagttaggacttcaactatgacttttggtagaacacagttcagcccataacagttgctttaatctttctgtgcttcaatttcctcttatgtaaaatctgcaaaaagtacctcttgagtggactgaaaatatgtaatatatgcaaagcaacaccttaataccccataatagatgtttaatgaatattcatgacttctacccttactacttcaagcttcttgagaatgagaataaagcatcttgtgtccttgcagttctaggacaaactttgaattgcttataaatatttggtgaatgaaaaatcaaatagcagaagtgagtctataataattgtatgcatttctctttctctcttagatggatccagatactagatgataactaagatttcaataacaaagagtataccaggaaacatgtagaaaagtcagtgttaccgctgtaaatataatatgccacactgagccagttcagtatggaatattttcccatgtcctacttgccacagactccagtaagtcatagggaaatgatttgtgacaaaattgcacacacacaaaaaaaacagtatcttcacacagccagagctttcaagtgatgagggacgcaaagacattgtgcacaataggtgttcctgtccattgtctgccgattcagctatctttgatctctgcaaaagaggaaccatgggtatggtactgtgaatgcataatagaccaggaattggaagagcggcacgcagtgtgctgctcagtgatcaagtcgtggagagacccagacaccatgcatctgatgataagcatcttctcttggtgccttggagtctctcatttccttccagttcgactccaaagggcctgtttcatcttcagcacctttacaatgtgccactttgagtctgtaggttctttctttcagaggccaccacagataatgggtacatcattatgttttcttgatatcactacattctttcttccccgtgcatctgcctcctgcagctctctgaagtggatttgactcctcatcatccctagtgataactaactctgctttaaaagaattgttatctgttggttggcttggagtcagggagttgagtgtaagttcttgttttattgtatataatgctagcaacttttaccagtgttagtaaagataagagataataagacaattccgtacctaagaattgtaccctttcataacagcaccacttggatatgtagaaagagtttgttgtgagatcagatgtaaaacaaataaaagttattcgtgaaatgatatggaagactgggattagaaactgtggcattcaagaagccagttaagctgattctcagaattgacagagattctagagatggtgtagtgcagatggtgtagtgcagggattctcagcctcactgcacatggtaatctcataggaaaattttagcaaggacagatgcagaaattcttattaaactgtcaggactgaagtccagaggtcactatattttaaaaaggtctgcaagtgattgtaacatgcatctatggaggaaaacatcagcgtaggagaaaaagggaaagaaaccaactggagtaaaggctctgtcttgagcactgtgctggctcctgtacattctccatctctttttatcttcatagtaagtgagatggtttgacaaatagggagaccgaagctctgccttcatgtgggacactcaactgcctccttccctgctgttggcagtgcttggatgaatatgcattgtatgcctcttctctcttccaagaagactggtttctctgattactttgcattttaccctggatagagatggtcttaccctcttttgagcttcaaaaaatcaggcttcaggctaattccaacctggtgaatctttctcagcaattctacccccataaaacaatctttacattttaaatttctattcatttttctaactattcataagattttcgtatgaagagttctggttcagaaacacagagaaaatccttaccgtgcctctcacatggttacttggttaggtgtgtttcaactcatcattctgccaaccgtaaatagctgagtccatatcacatgggaaatgtaggtgcaaattcacaaaacactcacgggctgtaaacaaccagggagttgttcttctcatggacctgcaggttgcagcagcagcatctgagcaaaacagagctgttctgagcagtagggcggggagcagcacgtctttgtgtggaccagaatgcaccagcctgtgggtgtatcatctcacactctacttcctagactaaggccctttcttgggcctttcagtgaatccaacccaggttggtattttgtgttgtcccccaacccaaacaaaaaattcatttgcacttaaggaagaacaagagtgacttgattaaggtatcaagttggtaaaaatggaaaaacaatttgatttagagagttaatgaacgaacatctttctttgattcttttcattaacattacacatattaggtaaactgtgtataggtgtttatttttctttatggaagtcacacatgatctatatagaaaaaatttcaaatacatcaaaaaaaaaaaaggaaaagaaagatacttgtaatcccaccacttcagaagcaccactttggtgtatttcttccacatggtggtaggggatggcagggggaaatgtgtaccagtattttaaacatatgagcatttttacttaaaagtatatattgaacatttttcactgttgactgcatagtatctccatgcatgaacatactcaagttcatttaacccatcccttaccattagatatttatgttgtttctaatttttctttccagcttttataaataatacttcaaaggccatccttgtagctagttctaattagtacagtatagtttggatgatataaaaatttcatatatgtgtgacaaggaataacaagttgaagtacagtaagaaagaatgtaattgcttgtgataaatataggcttagcttcaaaatagctagcttaaaatttcccttatagtgtactttaaagatttcactgatgatcttggaggtgaggcatctagccattgctggaatgaaataacacacgatgttcaaagtttggttggtaattgacttagtgcatatttttgctactttcatataccacttatctcatatgaaaagagcaattctgtacacaagtaatacataaacaaaaattttaagaatatgtaactccataaaatgagatttgatgattgacttgagtttctaagagaaaaaaataataactttcatctaagtttacgtgttcgctggcagtttttgaatcgttgccagaatcatgaaattcatcattcaagagcctttgtcctcctagtccccgttctgttctgtgtctcctcatttggatacgttctgtgtctcctcatttggatacgttctgtgtctcctcatttggatacgaatgcttttcattttattactgcctttgtgcccttggctttgagtcctgtggtggcagttgtttgtgcttcaaggagcatttgtaatttcagtgtgaggacttggggaggtcaacagaaatctctggtctttgccctccttcagcctccacattaaggacatagggcttcttcctaggcagtaactgtattttgattcatacttgtaatccctaaccgttttgattgatgggacaagggctgaaactacattctcttgaggatagaatatttttatccttgagaataatcattcatctcttcctgacccaccttaccatttctttgctttgatcctaaatcttttttgttctttttaggctggaggctcccaggtgattttcacaaatcctttagaaatcgtcaagatccgtttgcaagtggcaggagaaatcaccactggtcctcgagtcagtgctctgtctgtcgtgcgggacctggggttttttgggatctacaaggtaacttttttttttttttagtcatttatttgattactttctcatctcctaatgcagaaactattcttcaacatgaaatccatttttttttgcatttctacacctggagaagatgttctacccaagctgcagaggcaccttcatgccaattagaaggaggtgccccttcctgccatctgccaaaaaactatcctcatcaatacacaaatctaggatgactatgataggaatcgtgccctctagagttgttcagtgcagctctttgcagcaacactggctagaattttatttggatttgttattgatacgctgagttcagttcaaggagaaacctgtatcataatttattttctgatcctatgcatatggtccgatccatgttttctctatatatgtatgccttgtcttaattattataaatcttaatcatttttcatttagaaaatgttttttcagaatgattacaaaaccaaacttctagatgattcttgaaattttttattcatactgctctaccaaaaagttataatggaatttactagaactgtctgcctatatgccaacctataaggctttatcaaacataatgtatacacaagttttcaatgaagaattttttaaaaaaacattttacgctagcttgactaagtaaacctttagggatatgggagaaaaataaaatgtctacttaagatagtttcatttatttacacagaaatgtatacagtcacattatataaaattaatactgctttgtttctataaacacatatcaagaaatattaaaattattcatgaattttgaatcagcatcttgagctccatttaacccactttttaggtcatctgttagcatggttttgcagaatacattgtcttcatttttatcccaagctttgtaatttgaagcatttttgacttttatgtatgatattgttcctgcaaattttatcccatagacacataatattaagacagtcaattgcttttttcctattcccagttaatcctgaatggatataactggtccccataatgtaacaacttaccatattgctagagtaaacttgaaatgacttgttttgacatttgacacagtatttgtgagatcctcctcccagaaatacttttttactctttttctttctaacctgagttttgcaagtgacctcagtaaacatccagaattagtaataattgtggctgtctcaggagaatctcccttccccgaatggtactctgcttctccaggtcaagtgattggaaagagtactccatgatctgagactttgtgaagattgaatataaagtgatgccctcttttctgggattaattttagcaggggaaaattttgccttatatttaggcatatgtggtacttaggaataaacctgctgtttttttaagtagaacttaaaatgctcaatctgtgattctacaatataacacaatgttctatagctattttgcttaccaatttattacccagctgtaaaaaataaacactgttgtcatgaggcatagcattgatcaatttgaagaaaaatcatcttttctaaatttttaggctcttgcagtctgtaatatgatgtagcagcatgtcattttgacaagatgccaggagtctttcaatgggttgtctggtaaaaagcacttaggtactgtggcagtgactgttattgaaatgtctagatgagtaaaatggtaggaacttgtttgctgatacagaaacagagactgttaaactacctgcaaatgatacaatactgggacttagtgcttttcatcttcacattatttaataatcttaatcccctttaacacttcttggaagtagttggtatcctggttttgtagttcaggtgaatagaggctgccaaccatggtatctgagctgaaattgaggctcagaagtttcttgtttccacttttgtgctaaaattgctttcctgaaatgagcaggattgctcaagtttgagcaagagaactctcccatatgaagttagtttaattactagtctagtagtttaatctagttcagaagcattccacagggcttggtgctcccttctaaaatgctgtttttggtgtactggtaattaccaagaaaatcagtaatgctttgagcttctggaaccttgattttgttgcaagaaagtgacctagtaatctctatcttcctgttggtcatcagtatcagctacattcagagacccgggagtcaggatttcattcagcagatgttgacctctgtggtttggtctcctttcagtctgattagctcttgtattacaagtctggttggtcctcatttatatattcccagcattctgtcttgggctttgtttcatgtgaacctctcttctccagccccaccccacttcacctttacgtggtcagacatcacagcaggttaagatccatctttctagggagcatcacagcattagcattgctttgtagtttaatgtgtttttgtttcaggatagcactttttagtaataaagcttttctgtttctagtcctggttggctagaaaaatgcaaatgactaggggtgacctcacacagtacttttaaacctggtatgtgtccctccaggtgggtctttaaaaagaagaaccactgtcctagatttagttgagacaggtaatctttctccttccctctgttcttttgtttctgttgttaacattacaatgccagacccaagaagggtgagtggttggctctgtctgtgtgtttaggcctgctgagctttaaccttacctaaattggaaaatcaggctttctgtttttcttctgtattgacttgcaaaataagcaaactattctgacttcccagtaagtggcaattagaatacttgttttagaaatacatttgcaactgaaaaaaagtggaaaatggtaaacattttgcattcctaaagtaagaaatagtttagcacaaatatagtaaacaatgtaaataaagcccccctctaaaatgctaacatttagagagatttagttatagcacagaggatgtaggtgactgaagtgaaggcagcataattaattgcctttgaaagagctatttgaatgtaatgtagctaagaaaacaaatctgcaatgtctacttctttttaaaaagaattatgagaatgtatttccctttccctgcataacttctgttttattgcataaacccctggagcataaaaataaaagtcaaataaacttaacatagcaaaaaaagttgtatccatctacttttgaacattaccttttccgtaggagctgtcagagcgttaatgaggggacaaattatactttaggaatggaatgaaacttatcatttaacagtaaatggcagcacagctaattaggccaaaaagacgcttcgttaggaagcagtggaactgtccatgtctctttttgagtacaaaacatggtcagtgaagcaatgacagctgggatccatcaagcactgttgaaaagttttcaaattctataatcacaaattaaaccttgattctaccttggagggtcacttaggaatatggactctgtctgctgtgttctaatcaaaggcgttgtttttttccactgcatttgacagtattcaaagatatttttatccatatacataaatgttgtatacatgtgttcatctataatgtgtgtataaatgattcattggagctattgttcataaactcagaaagcaagttatgatatatcagtacattcttatttattctgccagttatctcaaagagagattgatttttttagtttaaaaagtaaaatataatttatatttcaaaaaaatcaagtaatttagaaaggtgtatgaagaaaagtaaaattatctctctaccctttactgctccattctcttcaaaggatagccactgctgaagattttatattaatatatccttaaaaaaagaaaaactttctgctcagattagtatttctctttcaaaaattttacgaatatcagcatcagaaaagtatgtatgttttccatagcaaagacatagaatcaccctaggttaccattaacaggagattggataaggaaaatgtggaaactacacacaatggagtactagacaaccataaaaaagaactaaattatatcctttgcagcaacatggatgcagctgcaggccactatcctaagcaaatcaatgcagaaacagaaaaccagatatcacattttcacttgtaagttggagctgaaccttgggtacacatgagcacaaagacaccaacaggaggaagggaaagaggaaaggaggaaagggctgaaaagcttcctttcaggtactctgctcagtacctagctgacaggattaatagaagcccaagcctcagcatcatgcaatatatccttgtaacaaacctgtatgtgtaccccctgaatctaaaattaaaatgaaaggagaatattttacttttcttaagtaaaattgtgttttaacacaaatagaatcttttcaaacacaatatatcttaaagctctttcctcattttatttaataactatggaaatttttttgtttaactgtttgctgttgatgaatatgtttctagtttgaagatatatcaagcaatgccatggtgatcatccctatgtatattttgacatacttttgtgattgcttagaaaagataaattcctagcattgaagttgttaggtcaaaggacatgtgcactttttagtgttaatagattttatccagtttttttcagtttatcccttttttcttggtaacatataagtactcataagattaattcttcagtttatcatcttttaaaaacttgtatttttacgtgctcacagccggacctgaaggaagcagttgtttagtctactttgagaacacattgccattctagttttctgatacccagggacatgctgtggttttacaaccagcctagtggtagttctcacccatccatttctacttttatccttcatctgagcatctgtgaaagcctcttcagggctttctttattttgtctcttgactctcctaaatccactgttgccacagcagccaaagtgatccatttaaaatgtaaatcatattaattcactcactcaacacactcattgagagcttactgtgtgccaggcactgttccagcctttaggagatggctgtttaaagccaagtccctgctcacagtatattgggtaggacagggcagctatcaagagaacaaagatatggccgagcatggtgccttacgtctgtaatctcagtatttcaggaggccagggcaatctcttaatgccaggaattcaagactagcctaggcagcatagcaagacaccatccctccaaaaataaataaatataagttagcggggcatggtggtacacatctgtagtcccagctacttgggaggctgaggcaggagaatcacttgaacccaggagttcgaggctgcggtgagctatatgattgcaccaccacactctagccctagcaacagagtgagatgctgtgtctaaaaaaaaaaaaaaaaaagaaagaaaaaagaaaggaatgcgcaaaattaatatgacatcagctggtgctaccgtgaagaaaaagaagctgattttaaaaatgagcaaaggactagaatagatatttctccaaagaggacataccaatggccaacacgtatgtatgtgaaaaaaggatgtaaaaaattttcaacatcactaatcatcagggaaatgcaaatcataactacaatgagatagcacttcatacctgttaggatagctattagcaaaaaaaaaaaaaaacaaaagataagcaatggtgaggttgtggagaaattgaaatctttggtggtaggccaggcgcggtgcctgacgcctgtaatcccagcactgtgggagaccgatgcgggcagatcacgaggtcaggagatcaagaccatcctggctaacatggtgaaaccccatctctactaaaagtacaaaaaattagccgggtatggtggacgtgcctatagttccagctacttgggagactgaggcaggagaatcacttgaacccgggaggtggaggttgcagtgagctgagattgtgccactgcactccagcctgggtgacagagggagactccgtctcaaaaaaaaaaaaaaaaaaaaaaaaaggagatccttggtggtagaaatgtaaagtggtacagtctctgtggaaaacagtatggagttttctcaaaaagttaaaatagaactactatatgatccagcaatcccccttctgggtgtacatccaaaagaatggaaatcaggccgggcgcggtggctcacgcctgtaatcccagcactttgggaggccgaggcgggcggatcacgaggtcaggagatcgagaccatcccggctaaaacggtgaaaccccgtctctactaaaactacaaaaaattagccgggcgtagtggcgggcgcctgtagtcccagctacttgggaggctgaggcaggagaatggcgtgaacccgggaggcggagcttgcagtgagccgagatcccgccactgcactccagcctgggcgacagagcgagactccgtctcaaaaaaaaaaaaaaaaaaaaaaaaaaaaaaagaatggaaatcagatatctgaaggagatgactaccaggttcattgcaacattattacaatagacaagctatgaaataacccaaatgtctatcaacaaaggaatgcataaagaaaatatggtatattatagccttaaaaaggaaggatatcctgcttttgcaatgagatggataagtctggaagacattatattaagtgaaacaaggcagtcacagaacttcaaatactgcatgattctattcatatgaggtgtctaagtgtacatattcttgatgtatgagagagagtgactgagtcttttcacaaatataccaacatcaaaaattgaaataagtaaataaataaataaaaatgttgtgccttactcctgatggacttttattctctcatttaaggaaggatttttagaaatttaaggagagggtatcaagtatacctcaaggagtcaggttttgtatctaatatgtgtgaacatttgaaaaatactacaggtcatgtaatgtccataatctctgcttaaagcttgtattaaacaaaaactggaaaaaaaaagaacttttaaaaaataatttcaaattttattttacattggagggaacatgtgcgggtttgttgcacaggtatattgcatgatgctgggatttgggatatgaatgattcagttacccaggtagtgagcatagtacccaatacttagtttgaaaaaaaaatttttctttttacgaaacttcccctgtgcttcagatgaatcattgactcgtgtgtagaaagaggataataatcatacctacctattcatagtatcgttgtgtggatttactaaaataatgcatgtaaagcatacaggatagagttgagcacatagtacacatgatgtgttagttgttatcaacttttcattattgagtgtcaactaagggattcttgcaggaatacctagtttcttccacattattccagtcctgggtaatttccaatgctgtgtggtcaacaacctctccaggccaggtcttctgctttgaactttagaatagcaaattaaaaggagatggcttgaaaaatattatttttataaaacaatgcccagaggaattgagtgtgctaaagacaccagaaaaaaaggattccttaaagtaacagcaaatgatcaatttttttaaccattcttttattctttcaccaaatgtatattgaatgctaacactattagatgctagagtaccaaagatgtgtacagtatcattgccttaaaaatgatctatgttaaggggcaagagaagagaaacatataattctagtgccagcactttgggagtgcaggagttcaagaccagcctgggcaacatagtgagacctcatctctacacaaaaatatttttttaattagctagacatggtgtcatgcacctgtagtcccagctacttgggaggctgaggggggaagagcacttgagcccagggggtcaaggctgcagtgagccatgattgcaccactgcactctaacctaagtgatagagcaagactctgtttcaaaaaaaaaaaaaaagaaaaagaaaaaaatgcaacaaattgcaggtgtaggataattgaaaataatccagactagacacatcagaggaaaactgctgaacaccagagctagagagaagctctttagtggccagagaaaaaaagtcaatttgccttcaaaggggcaacagttgaactgacggctaacctaaaaatggcaacagtggaagccagaagacagttgaatggggtgtcttcagtatgtggaggaaaaaaacttttcaacctagacttgtataccctgtaaaaattgcttttaagaacaagggtaaagatattttttagactagcaaaactcagaaagtgtgtcaccagtagaaccttaatgaaggaaattctggaaggtgatcccaggtggagatgtgtcaggaatgaatagcaaaaaaagtggtaaatgtttagtcttgttaaaagtaaaacttcagccaaagtaagggagtttaattgtacaatgaatgattcgtgaatcaggcagcccccagaatcacagcagagagtgctgaggcgggcagatcacaaggtcaaaaggtcaggaccatcctggccaacatgttgaaaccccatctctactaaaaatacaaaaatttgctgggcatggtggcgcacgcctgtagtcccagctacttgggaggctgagacaggagaattgcttgaaccagaggtggaggttgcagtgagccaagattgcaccactgcactccagcactgtctcaaaaaataataataataaagaaataaagaaaaggtggaacatgttttacagatgagctttgtgaaggtgacatgactagcagcttcaggactaaaattccatgtgataacattcctctgtaccatgtctaggattttcagtccatctcagtgatgagcattgttgatggcaaagcagtgtacaatactagaacaatagagaactagcactgacccaagcagcatttcctacaagaaacagagttgtcaagatgattttgttagaattgcaatgaaattaaggagaacccatatccctaaagtccctggattaaagaagccaagtaatagtcattcatatttcatattcaaattgaagtaatttccatgttcactgatatcaagtcttcaaatgttggctggcttatttggttttaacacaagtgacacaatcacataataggtcttggcaccattgctatttctcagcaagacactcaaactcaccctcctcaaatctcagccatgtaggtggggtctaaccatcctttgactgggctggagaggcactgccaagctgtgtatctaagggttaacttgcttgggggaagccaagaggaatgctaagggatcaagtcatgacatgctgcccattgtttgtagctctgggatcaaaatatataattatacatgccaaataaattctaaacctgtaaggtaggaaaagagggctgggtggctctgacgacaggtgccagaagcattgaataaccttctcagacaaggtgcaccactgttgtcttgaatgctgcagggtccccagtctggcattttccccgtgctagacaatgtgcattcactgctggagtctctgttaagcctccgtctcccagacctgctggctcctggtgcccggcccgacacagaggtgcctttgtgagtgtaattacctttccctgtattagaaatagtctgtttagagctgtgtttgcaggtacagctagaataagcaggaattagcatgcaaaaagacctgccctggccctgacttctttatcagcaccatccttcaggactggttttttccccactttggattgattgggcaggtgatttaccatccaagatgaagagttttaaaagaagaaaaagagacatcggaaattgctgtgcatgtgcaacagcatgcgtgcgagagaaagagagatacaaatcctgttgtgttatatctattgacagtttcataccaggcagagctggcaaaataaacttgagtggacgatcctagcaacttgagaattgattaaagcttccttgggctttcagcacagtgtccacatcaaaaaggcatgagaagcaaaataaatgattcttttgccatgatatgctgccgccagaatctctaagcctatctaattggcctgtgtcaattgtggactattaatttgaagttaagtgaggcctacccttaaagaagcttttctagatcttaaataggatgatgatggagagactttggcatgatatagaattggaatggaggcagagttgataattaaactagatctgagggttttttcccagtttataacgtaggtctaccctgagatgatttttgttgtccctgtctggatattagtgtgccttttatttaaaaagaaaaacccaatagtttatcatctttagagagattagatgattgtattttgcatttattaattttccccaactgattatagtatatactgaggaaattcaggaccaatcagagaatgtttaagggcagagctgcctagaaaaccagtttaaaaaaaaaaaaaaaaaaaaccaaagcaggaaaatgtggggattttcttatatggcaggaatgtttaaatatttttttttaagtggcacacctttgtaacttattaattctcaaatggccaaagtaatatttttgtgttgctgatgcaggctctagggcagcatggaatgtttccctttgttataaagttgccttttcagaatggctgatctcttggtaaaaattatacatggaacaagtagaattcaagtcaaacaggtttatgttttgctgtagtactggagaatgggtgttcaccacaaagtgaaggatttatcaaggaatctgggagagaaacattttcccccttagaactttaagtctttttaacatcctgcttcccttttcattgtgcaagagcaacaggtcaggtattgcctaaggcagtcttacaaattggcacctgcctttatgcctaagacctaaaggaagtggtggggaaaaagaggccagggaaatttaataagtctctgtctttccttgggaattgggctttgatgcctggggtgcaagagaggtgaagggccgcctcctgacgcaactgggagaggtattttctgcagggagacaccagagaaggtgctaggagaggcagggagacacagccctcaggtgaacacatttgtgtcctttaatgtttgtaatgcagtggataccttacaaggactttcacacatattacttcattcattcctaaagtttcagttgtcccagtcacctgaagaagatggcctttggtatttttgacaggtgaggaagcttaagagcttgatttctacaggtgctcatcacatggctaggggtgacaggatgatcacaccaggtggaagttcttttgcttccttgacttttccatttcttcctttttctcaggtaatcagacaccaaagacttcttgcatatcctaacatttgttctagtctgcataaacactttgaccacattgcttgattcctggaaaacgaaatacaacccatttctaggcatttttcctttagtgttgcaattctaccctttcctcagggttatatatatatatatatataaaattgtttgtatgtttggtttttaatcaagccatttctcatctcagccatgtagagttgttttccagcatctcttgaagtacatctcacatctcttgtagatgccattgtaacagggatacatgatttactgtcatgatttcaggaaaggaagaagaaggaggttctcagaaggtggaacactcagtgggtccttcttcagaagacccaactgattcttcatgtgcctttactcttcctgtgcctcagggatgtttataatttcgagtcatgtcttcccatggccttctgatcatactgaagccacatagcataagacaggttaatctgcttctctttctcccctcgccccctttttttaaactttaatgtttcaatacaaaattagtgactgtttcctcctacgttttgttacattcccaacaaataatatgtctttgtttgaaaagctaaaagtggccaggcgcagtggctcaatgcctgtaatcccagcactttgggaggccaaggtgggtggatcacctgagatcaggagttggagaccagcctgcccaacgtggtgaaaccccgtctctactaaaaatacaaaaaactagctgggcgtggtggcaggcacctgtagtcccagctactcaggaggccaggaggctgaagtaacagaatcgtgaacccgggaggtggaggttgcagtgagctgagatcatgccactgcattccagcctgggcaacctgggcaacaaagtgaaactccatatcaaaaaaaaaaaacaacaaatgaaagaaaagctaaaagcttggttttagtttctgatatgtttttccaagaaataatgttttttaatttttattttttatttatttatgttttttattaagatggagtcttactctgttgccctggctggaatgcagtggcatgatctcagctcactacaacctccacctccgggttcaagcgattcttctgcctcagtctcccgagtagctgggattaaagtgatcttcatttgagttgattatttgatgtctaatttgagtatcttctggactgaatctacatgtggatgaatagctagcagcacttacaagaaggcttggggcaaaaagggaaaaggaaggaaaaacagaaactaaacgctgatattgttagccttatacaataacagcccgaattataactttttaaaaaactagttgtaagaaaaggattggatgttacacacagttattaacattatactgtatgttttccctttgaaagagctgggagaagtggaaaaaactcttagagtattgagttttggacttgtctctggaactacctccagggtgccctctgaacaagccaagggcatagccctcggtaaatgcacaattgatagattacccatccaggacgatagattacctgtccaggacgttagtttgtacgtgcctaaaatgactagcttgggtgtggtggatattgtgattcttaattagacatctaacactttgggggtggacaagatacagaagcctgagccggttggcagtacatgaggtagatgagtgcttctctgaatacctgtatacacagagtgaacagaggcatgcttacacatccatgggtaagttgactgaggaagagccaacatgacagaatccagattccaagcatttgttctggttggcaggatgagccaaactaggatgcaacttaataggattaaatctgatgtcctgcctgtgttacttgtgtgaggcaactaattaagttatagtagacttgagttaatagtaattcatatgaaaaagactaagggttttattacccacaagctcagtttgagtcaggagtgaaatgtgcgtgtcaggaaaacaaaggctatagtaacagatacatagtgttaaataactttgacagtttggagcatcagacagaaatacccaagatccagcattactaggcctcaataagtgtcactgggtgtggctagatctgttgactctggctggattcattattttcttttgggaatctctgtatttggtggaaatttttagttattagaaatctgttaaagaaatggtattaaatcattacatgttgaaaagtgatgatttccttcctattcaccctacccaaaacacaatatatgtgttgtggttttcatcataatatatcatatttctgggcactcatcaattcgcggggcctctgcatggcattatgttggcaacagaaactatttgttgaagactttgctgtaggaactgattgttctacacacagctttaaaatgtatccgaattattgtgaatatttcaggctttagagcaggcatttatcaatgtttcataaaccctgggtggcaggtaagtaagtatataataaaattagaaggatccatgaaccccctgaaaagatataattttttatgtatgtgtaatttctttctgggaaacagtccaaacgtacaaaaagcaaaccccttttccccccacctgtataatttgtctacttcctagtgtgtaaacaaagaggcatcttgactgccgttacccgtctttggtgagaccagagaacagatcttccttgaaatgccagtggcttgccaccagtagggatttaaaaggatgtcacaggcagagttccaaaaaggttttaattgaagtcttagcattagaataaatgagaactgccctcctcccatcacagcacacaacaaaactagtttttgttttaaaaacaaagtttagatttattacttgcagaatttgggttatttttttctgttcccctttcaatgtgtgagtacaaatttggtcttctccaggaatattttgttctgaggtgagttccagagaagcttgatctcctcaatgggatatgtgtttcatgtggtttttcttcctttgcaaatgtgcagggtgccaaagcatgctttctgcgggacattcctttctcggccatctactttccgtgctatgctcatgtgaaggcttcctttgcaaatgaagatgggcaggttagcccaggaagcctgctcttagctggtgccatagctggtgagtgtcccccatggagttctcttacttccctgacccttgctgccccccttccctagctgcatgctactacattgaaatttttttgctgatagttcttgacagggtatgtgtgagtttgctagagattgaagagctactgaaaaaaaagggaaaaaattaatcttcattctggcagatgagattattagacaagcttaatttcttaactctagaaaaggctcattaaatattggcttattttgtggtattgtggaactccaattcaagttccatatcatttcatagtctcacttcacagcataagaataactgtttagctggaagtttttaaagatttgaataggtttgtcttaaagatgtctaaaaaaaatagtgcataaaagcctgtccagaacttaaacaatagttagagaaaagaaatgtagtagaaccagaaaagacctgggccaattagagacacctgtttcctccctgtgttacggggggatggtggtaattaaatcacagatggaaataactatcttctttttttcagtgctccattgaaaacatcgatagaaaataattaaccatgccagggatcagttcattttttgatgctgcttcttttcaagggtccctaagagcaggaacagtctggattagctctccaagtggtgacatttaataagttaacaaaccctaaggcggtcacaggatgcctggatccaaacatttttgatacctgtgctattctcatcagatatgtaactagagtctccatgcttttctcaaagatagcataagaacaactcccagctttgagaagttgtttgctgttttgtgcacaccccacctaccctggctgcagcctggggaacccctggatgcaggaacctgtgtagctcctccttaattcttagttaatccttttccttcaaaggcagtgatattggtatataaggcagggctactgtttcctggctgcttagaaacctcagttgtattagcagcagtgataccactgtatctagagcaagagatcatgatttcaggagttgagtataaaattcccaattttaattccagcttgactcatggtggcctatatgtaatttctcatatatctgtaaatgagaaaatgttttgaaccaaagggttataatttatttcaaattatttacttgaaataaggtaggacctaatgagaataactgagtaccacttattaatgtgtgaccttgggcaagttacttcacttcttgtaagctttggtttcctcagctataaatggagatcacaactgcacctgctacagagtgtgtgtgaggctcaaatgagaggatccatgtgaaagacttggcatagttcttagcatacagtaaatgctcaataaacattagccaagtattacattgaatccaaaagaatctgtctgtaaatcactccaaaaaataagttgtgaaattagaagttaagtagtagagctcagatcaaggtctaggactctttcctaagcctcactttcctcacaccataaaaataccatctttaactcttttcttggagaagacaggtacccagaaacgattctgtctctgtggaggtaatccattctaccagagctatagaaatgactggtgagattttttttcatttaaggtttatttttctccttttttaaatgattttgaaactaatattactcattataaaatatttgaaaagtactagaacaggcaaataacaaaaatattattcattatttcactactctaagataattgctatttaacatttttactcatttttcctattcaggtttttcacagagctgtaatcacactttgtatagatagttttcacttaaggttgtgtcttaagcattgttacccatcatggcaaagtagttaatgacatgtgcctgtggggtcagactaccaatgttcaaattccagtgtttccaccctgtgtgaaccacacacattattcattccctctctgccatttctccatctgtatttggagataagaatagtcttaccttacaagattattatgagaattaagtgaattaatagatgaaaagattaaaatagtgcctgatatatagtaagtattcaaaaatgttccataatagtaattttattacatattatttaaaactttccgaacatagtttctaattgctgcatcttatgtatttctcaattttagatactttaattttttccaaaaaattttaaatagctagtagtatgctttttcccctatgttgaatcagttatttttttttaagagaaatagattatctgaagtgagtttgttggtaaaaagcatggttgtttttcggtcattgacccattattcttgagagttttaagtagttggcatccctgtggtgatgttagttcagccctcttgccatcctgttgtctttataaatgccttctgtatttgttatctattactgcatgccaaattccctcaaaacttaatcagcttaacacaactaatatttattttctcacagtttctgtgagtcaggaaacaggtgtggggtagaagcagctcactgggtgcctctggcaccaggtctatcatgaagttgcagtcacagtagcagccaggcttgactgacattggagaagccactttcaagatggctcaatgacatagctgttgacaggaggcctcagttccttgtcatgtgggcctctccattggtcaacttggataccctcacaacatggcagtagattccccagagcaaagtctgagagagagagagagagagagagagagagagagagagagagagcaagcaaggcagaagctgcagtgtcttctatgacttcacctcaagatgatagagaagcagaggcgtgaatgtcacaagggtgcagatctttgagggccattttgggaactggctgcctcacttactatagagcattgacttttattattattattattattattattattattattattattattatactttaagttctgggatacatgtgcagaatgcgcaggtttgttacatagttatacaagtgccatggtggtttgctgcacccatcaagccatcatctaggttttaagccccgcatgcattaggtatttgtcctaaagagcattgactttcctattattatccaccttcctcctgatcccccgtttctggtaaaatgggaaaataccgagtttgccctgttgattttagtcttcaaagagtgaataagctacaaagcttgatggtctttgtgtattctacaaaactataaaaactgtgtaatgcgaagtaagctactttcttaatttaataacagatatcagaagccagtggtcaatgtcatagttaccattccaattaaagttaggaataagacaaggatgtctctctcatctttgttattcagccatattttggaggttccagtcagcatggtaaaataaagtaaaaggcataaataaaagaagaaaggaagcagtcattatttataaatgattatttacctgaaaatcaaaattaaaatgtctaagaagtatattagaattaggaaaaaagattagtaatgcattttgttataaaataaacataaaaaatctatatccagtgagcaggagtgatgtcatggggtgagcagggctgagtgtggaaccttgctgagatgctcaggcagagctgagttcagtgtggagaagggcaagacttttgtcagaagtgtgccccgtgcaaccccaagaagggcagtgagcaagcacaaatgtgcactaatcctgaatgggctgttgggtggaggacggatcaggcccccacattccctttgtggttgccaagaagagcaaaggcatttcttagggagaggatacatggtattcagagaatcccagaaagtatttaataggagaaaagcttctttcaaaatacaaaaatcctcctttttagatggagtttcaggcaactacaatgaataattgttggcctctaacttataaaacaaaaatgtctcatggctatttttatatgtaccatatttaaattgatcacttatacataaaatattttttgctgaacatcagcctattataaataatatggacctgtgattaaatgaatatgaccacgctttctatgtttagataataatttcaattattcagtaatgttatctcactgttttctttccaaaaatttgattagccttgaggttagattgttttagtaatatgtagctttttagcaaaagtggttattggtatcctcacctagagaatgttgggttttggtgtttttgtttttgttttgttcatgtatctagttataaactgggactatatttaaatactggaacatctactccgttatttcacaagatagaacaagactaaccaatatttgaattcatgttcattggccaaagtacatcagctttgtcagaaagtgaagaccgaagcgggggtcctgaaattaagaaatcaaattctaattatctataattaacatggtgctttatcattaatgaagggcatttcaatacaccttgtgaatgatatcaaataaaatatatctaatactcaaattttatagaatgctctatcataccagatgatttttatcagagtgataagatagaggaacaagtcaaactgtaatgatggtctcacctttgaattaattagcttgagattaagttgtaatacagaaatacctttaaaagctgttccagtacacagaagtggaagtgtgttatacatgtgtgatcatgatgcttttgcaaacattagattgtgtattatgagaaaactactgttggtacaaatttgttaattatgtggacataaagcttaagttataatagtttaaaaccagtccttaaacccttaaaaaaagtaatgaagaaattgaatcaagacaatagactgagcatattcatccatctctcctgtcttcccaaataccttaaaatgtcaggaaatgcatttttaaaaaattctttattggcactagaaaatgctaatctggccctcagcagaaaggaaatagccatattgactctgaaactggactgagagatgccccagtccaaaacacagcaggagaaactacctctaatgcaagggctgaactggagaatgttaacctttgagtgaagaatagaatgcctggggtggaggtggaggttttagggtaaatcattaacatgagttaggcaactatactttcttcaggattgccaggcttggagctctctcctggttttcatatggagcttcaggagacagttgtatccaagttaaaagctcagagctcaattttaaagaaagagaccacttccctagagaggataagtgtaaggaatggacagaaagtagggcaggacttaaggtaattcaagacttctaccacagatgcaggaaaaaataaagtgatggcagcttttcccaagaagaattaaggatttaaaataaattcttctacccccaaagtgaagttccctacatttcagcagttcggagggtccacaccctgccagcatatcctaaccccttgcacccagttacacaaagcccatagaccctcccattcaggagagagacctgtgggtgaagcatacctagaatatggtagaagtcacccacaacatttgtatataatactaatcagcctatcctttgaacttgaataatatcaatagacaaccagagatccccagccatgaaggagcaacaaagtaagtgaacagaagaattagagagaaaacaggcaattcaggggacagaagacaacttttaagaactataattaattaatataattaattagagtcctcagagagatttgaaagaaataatcagtaaagaagctttcttgaaaagtaatagaagaactgccataattaaatatcaagcgttagttctgaatgatataatggatatgatcaaagaccaaatttagacatgtggaaaataaagacatgcaaaaaaaaaaaaacccctctagaatgtaatgtgtagcaataatatagagatagaaaaggagagaaaatttaagatacaggtagaattaatcttggaaatctaacatctgtttcataggagttccctagggaaaagtaataaggaaaaggagaatagaaaatgaatcaatagaagattgacttctcatcttcttatctgtaatactggatactttcaaaatcccaaggaaaggatgtcttgagtcgtaattatgttcctgggcacactaacactcaggagggggaaggcaaaactaaagttagtttttcacatgcaaggactcaaagctttcttccccacagaccttctctgaagcaattaaaaagtgaatttaagggcccagcacagtagctcatgcctgtaattccagcactttgggaggccaaggtgggcggattacctgaggtcaggagttcgagaccagcctggtcaacatggtgaaaccctgtctctactactaaaaatacaaaaaatagccgggcgtgctggtgcacacctgtaatcccagctactcaggaggctgaggcaggagaatcacttgagcctgggaggcggaggttgcagtgagccaagatcgtgcgcagccccagcctgggcatcaagagcaaaactcagtctcaaaaaaaaaaagtgaattaagaaggaggaaaatgtaggatatatgaaacagcaaatagaagttaaacctgtggtaggtctccattattgctgactttggtatatgtattcatgcaagaatggttggtttttgggagactgacaaatgaaaggaaggacaaaagtgccagtgcgccaaagtcctccccttgctggaggatgcaaatgctaattaattgcacctgttgtaaatgtacacctatataacaaatgcatgtaacgtttaaatatatttagtcagggaagtggtggggatcaaaagggaaataactggaagcagagaaaatagcataatataggatggcagaaataagtctagtagtcacaagcactgtaaatgaattcagtacccctagtaataacaaacactttaagatgagttttgaaagaaaatctagtcatatgaagtttcataaaacagtgacatagaaagattgaaagacagctgattgaaaaatatgtaccaggcaaatatcaacaataagcaagtagcaatattaatgccatactgaatggaattcaaggttttaaatagcgttcagaagcacacaggcatattttataaaagataaaattcactatgaagacgccatcaatttctatgtaatatcaatgtataatgtcatctctcagcttcaaagtatgaagaaaatgcgatattttctcatacctgatgaaaaactttatcacactgcttttagaagctgacgtattaagtagataatatagatagagatgcaaaggggatttggaaaacagccttgatccaaaataaatagatattaacctttgtattcaataaaaagaaaagcactttccttataaatataaatgggatatttataaaaattaacgatgacttgtgccctaaagctgtattttgccagtcatgttttctttttgttgtaaattatattctactctagctgggccccctttgaagacttgtaattttttaattggttgagacatgccccaagttactcctgtcacagaggtggtggatggcccctgggtctctgtgtttgtcttgtcattgaagaatcaggcagcctgccagtccctttcctgctgagggacctagaggaagcatctctgtttcccagtctcctcttgctcccctgtctttaggaatagagaaaattcagaccacttgatcagcattggcttagccttttggaatccagaagagagcaggcagatctaccagacgtccctgccaaccctggcccccaaaatcaacagctctctggtggccaagttcttgccagtatctgctgctttcccagccttgctttagggcagcctggtgcagttctccaggttaacttagcaaatcctcacactggaaatctcctgtccaccaagatgtccaaaattccttttaggccttaccagatacctgcctaggagaaactggagctgacaatggagatgatgggagttatgttcaagttgccatattctagcattcgccacaactcctatcagttttgccaggcaacttactaggtgtctttcatacctgcttccttcacccccagtacctctattttcataacaaagaagagtttatgaaaattaccctagccaaagggaactttttgcccattttattgcttgtatgtctttcacagtcacagtctgacatgcctgcccaccattgcaaggcggcttttattgcatgtctaaagcaggctgtcttgctaaactctttctaaaccaggaagtaaaacaaaatcggtggtgtgaacacagtgggtttctaagcatttttcttgtttccttccattatgttggaggataaattcctggcccaaagttaaaataattcctacaaatgaacaggaatttcagtatgacttatccagtgaagcactggatataaagtgagctttttgcatgcagaattgtgatgtattttataaaacctcttgagattaatgtttgaggagctaggtaaagatggaagagatactccttcagtaatataaatggaagcgtgtagtatgcagatttacaccccccttccaactcactgtaactttaaagctgtctgttagaaggatgaaatgtagttgtgagccagaccatgttggtttggacagaaattcttacagaattattaagccttaaaaaaagcaaaggagatttatgcatctgcatttgaccaatttggtttggaataagttcataatggaaaagtaataaaaccataagagacagtgtcttctgagtacagtctcgcttttaaaaaatctaaacatgcactgccctattttggatacagtgactgtagaaaaatttcccattggtaactttgggagggttttctgttgttgttgttgttcctttttcattgattatcagccagtataaattttaagctttctgtcaaatatttttctggagatgtcagtcttagggaaaagaaatcctaaagtgttatctgtaggagtctccttctcccaatttcaccccctccccgaaacctccacctcccaccccccaacacacatagtgttttttagatatcagtaaagtctttttctggtgtaactggagaggttggggtttggagagtagggggtggttgaatgtgtgagagaaagcacctcctgtgactgccagcagccacagaagaccatgaagaggaaacgcataacaagcttcacctctgaaaaatcggacctaataacttcgcaagtttttgatttcaacaggaaagaaaaagaaaagaaaaccgctttctccacttattctcaaccacttgaagtagtgttattgataaacaatttcttaaaaatatttaaagatttaggaatagaaacaaaggaaatgaaggctgagtgatttgggcaagggaaggtgtgagtctggtggggaggggtgtaggagcagacatcttgcacacaggagaggcatggttgcatttcccatagaggacagcaaaataggcattttattgaatcggatttttaactttctttccacggccagcagttcaaagcacagttatttttatatagtgagaatgtgaccagactgagatggtgttgtgtctctcctgcaggtatgcctgcagcatctttagtgacccctgctgatgttatcaagacgagattacaggtggctgcccgggctggccaaaccacttacagcggagtgatagactgctttagaaagatactgcgtgaagaaggaccaaaagctctgtggaagggagctggtggtatggaaataatgtgttcttaactaactctttggtatcaggtaaatttttaaaatatctaattatatctgtgatttctccatttttttaaagctcgtgtatttcgatcctcaccccagtttggtgtaactttgctgacttacgaattgctacagcgatggttctacattgattttggaggagtgtaagtatcatgctaaatctgctgctaaattttggctgctgctaatgctctgttgtcgtagggaaaggtacctcagtctagtctctataataaaatagaagagatttagggaaatgttgaaattgtgttaacaaggtcatttccaaggggaacatacaactgatgagaatgtatcaactcctttacattaaatatttgaacaggttttgaatgttatttttatcaagttaaaacaaacaaaaaatacagcttcttactctgttttctcttcttttagaaaacccatgggatcagagccagttcctaaatccaggatcaacctgcctgccccgaatcctgatcacgttgggggctacaaactggcagttgctacatttgcagggattgaaaacaaatttggactttacctacctctcttcaagccatcagtatctacctcaaaggctattggtggaggcccataggaagatcagccctgggatagtgctgtctttttgtgggtactgcagtaaagaacatccctcctgggaatgaagcaatgcttcatcccttttacgtccatctcttgtttaaattcaagtccaggcttttttatcatgtgaaatcattcattttctgggtgttttcttaaccagatcattgtgaaattattcataattattatttggccctctgcccagaaacctttgtttgcatctgaaaattgatgggatttggtcaacactaacatgatttggggaaaggagcaagtcagaatagaaattagtactcccctccttgaactaggattgtagtcccaaagaggctactgtaaggcaatcatggtgctcagagcagtgtttcgtgtgtgttttaaactggtaggaaactaggtgcatatttataaaaataaaaaacactgggagaaatgaaaaaatatatatcaaatatattcagcctggcttcaaattgtaagcatgcacaaattctgtctctggattatattatgaagcttttatgtgaaacatgtttctttgtaatgaaaaccacattggagatgtttagtaatcatattgttactggtaccaagactactagggaaatgcctttgtactttagggaagtacttttggcattttactgtacagacagaaaaaactgagatgtagcccctctcctggaagtgctaattttgaaaaactgctcatatgatgtacatgtactgattactgcctattttaataaacactcttgaaaaatgcatgttgccctgttgctgcctgccctattctcctcatctccccatcattggtacccacttgcttttaaaatccactttatcttgaataatgtaagacaaatatgttctgacataagtatttaattcatgttgccttgcataatggtcagaggcgcatgaatttgtgaaggtggaaataaactatttgtaaagtg

SEQ ID NO: 15811 - DNA, 128989 bp, Homo sapiens
agcatccacatgacccgcgccggcgggagggcgtggggaggcaggccaggaacgcacgctgcctggccgtatcgccgcccccaccgccgccgccgccgggactagaagtgagccgcccgggtcccaaacgccagccagccagtcagtgggtcccgcagtcgcccgcaaccggggcgaatcatggcggccgccaaggtaaccgcgggcccgaggccggggggagcgcgcctgccggatcagcctgggggtgcgagaggctcgggcgctcacgtgtctgggttggtgccacaggcggagcaaaatggggtgccgggcagccgttccaccttgcggctgctggagggagggggccactcctcccgggcagcacaggcggtcggtgcagagaccgaggcccgacctcgcagcggaaactttgtgggccggacactcccacttggccggggagggaagttggtgcctgacggggctgagccagggccgacgaggaggagcgggcgcgactggggcctggtgcaccctgggccggcaagcgctgggggtcctctctaccttcccagcgcgctcctgctcctgaccccgctggttgttgactccggcttcttccaggggccagagcccgggctgaagcctgatcctattacgtttcaagggctccgccctcccgcgggtggggaagttactttgacttccgttttggaaactgcctaggagacttggtctgcgcctttgtgaataaaaagtccagggactctccccctccccgctttcccatcattcccatcttccccctccctctctccatctgacaacacttagatacccgcctcggagcatttgagaggcttctttttgggaacgatgaaacagattgtcctgggagcctgtcactcctgtgaagttgtacttgaaaggggttctgtgtaatgtgaatcattcactaacccagaggaaaggcaactccaacacttgacctttcctctttcaccatttcttgaaacctggacaccatttcagtctctttggactgcatttcaacttctctggcagaataccatatttagtcccaatcacttgaatcatttggaatttattgcttttaatttaagttcacgaaggcagccctctaatcaagcctatacaacttcttagctcattttaagtgcagtgaacttaaatatacctaacatttcaaacatttgtccttaatcaaaactctgtgataaccctcaagaggaaaacatggccaacacatcatattcctatttattcaagcaaactaatcacatttgcaatggaaattgtaagcagacaaatatatttaaatgctgttctatgacttaagtctctccaggctccccaaatccgtaggcttcttcatgttgttagtttctgtggtctaagtggcatttctcttttctgtaattactctgagtttcatccttaggaaagtactctgggtgtgtgggctcatgtatgtttgcatatgaacacacaggtgtgcgtgtgtatatctatctataacttttcagcagtttctctgagcatcactaggattcaattttggaagctgccttaaccctttcaagcccaatagcccttgaccttttttttgcattaaatttgcatgcaaccaaggtacaaggcttggtatgaactaattccctagagtaggtgggactaggtacccattctttactgttagttttatatctgcaggtaatgtaaatacttttactttattaggagataaggtaattgaggaacataaattgagacgtgtgcatagaaatggagtataagacttgagtaatattaagtaaaataagtgacctggtgctgtggctcatgcctgtaatcccagcactttgggaggctggggcgggcgggtcagttgaggccaggagttcgagaccagcctggccaacgtggcaaaaccctgtctctactaaaaatacaaaaaagttagctaggcgtgctggtgggcacctgtaatcccagctactcaggatgctgaggcagaagaatcgcttaaactcaggaggcggagattgcagtgagccgagattgtgccattgcactccagtctgggcaacagagcaagaccctgtctcaaaaacaaataacaacaacgacaaaacataaaataagtgatatggaagttagttcaactctttggttgtacttctacataatagtagaagtgtcacatatcaagggcagttgatttttagctaagtattgagtcagggaaaatgaaatgttcatttttactacttgggagcttgtgtttttgtttatgtcttcatttgcactcacctctttctgtgatatctgatggctcacatcatatatacttattttgcaatccaataagatatataaaaatcaattccaagtagatgggaaaaacaggacaaagggaaagtaagacaaagccaggactaaggttagtggaacattatgtgcttactagaggtgattgcattttctcccagccaaagcaaagaggaaatgatcagtgaggtcatttacttgggagagaagtctccttatactgctctctgagagcagttttttttttttttttttttttgagatggagtcttgctctgttgccaggctggagtgcagtggcatgatcttgcctcactgtaacctctgccttctgggttcaagtgattctcctgcctcagcctcccaagtatctgggactacaggcacgtgccaccacacccagctaatttttgtatttttagtaggccaacatcatgttggccaggctggtcttggatctcttgacctcgtgatctgcctgccttaacctcccaaaatgcagggattacaggcatgagccaccacgcccagccgagcagtttcttttatatgctgtgagtgaacggcatttgaatctaccttgtgaccacagatatatgtctgtgggttacataaggccatttcttatcatgtccttcattataactcaatggcagtgcagtaaatgtggccttaaaaggtccctcaatgaagctgctggtctaacttattccaagaatgtcccttattgaactgcctttgggcatcacctttatcggttgattctgttggcagcctgagttaaaggctgtgctccttgctttttccctggagcatagctattccatgttgccagctgaacacagagccataggggtagggttggcattccctcttaaaagttgaggagcctggataggagaggacttcacctcaatggactgttaggaaattgggctgagactctggggactcagcaactgtgagaattccaacactcactacactcactgtgacaaattgtttgaatatttaagcagatttggtattttctggatagatgtagccacaactagcaattagttttctgatctgtttctttctttggtctttatacttatttaaatacagctaattattcatgaccttcctttaaatagttttaatggggagatggagaatctagtctttggctgctttttattttgaattttgctatgaagattactagttaatggttcaagaagtgtttgttttctttcgtgaatgaacattaatctaaaactcttagtattctgagattatctcaaaaagtgtccattctcttgctgcctacgtttgtaggaataatccttgtgggttcccttgttagatctgcctgtactgtttgcgttgtttgaatatttcttttaaacatttcccaaaactgccataaaaaaacagttttaaaaggtggtaattgagaggtcacccttttcttcgtctctgcccttttcttggttaaaggagagctttcttcttcgtcattggttaaatttatgcgttacgaatgatgtaattaacctatatgaacctactaaaagttagaatatgctcccttgagttcagacctgtgagatgttctggggtaaaactgaacacagaccaatattagcctagaaccaaaagaaggaaatttgggggcacattaaagcattaataataaagacaatttggtctgtaggactagtacactttgtattgacttttcattcttggatgagttgttgctgtgatcattgattcatttatgtgtattgtgttctttccagtgttgcaaatgggacaaaattgagaatactaaaatgaattgttagctgggcatggtggcacgcatctgtggtcccggctacttgggaggctaaggcaggaggatcacttgagcccagaaggcagaggttgcagtgagctgagatagcaccactgtactccagcttgggttacagaacgagatcctgtctcaaaaaaaaataaaataaagtaaaataaaataataaaataaaataaaatagaataaaataaataaaatgaattggactccattttgatgttcaagaaaaccaaaaccattccagggggctaagttctctgatggaaatgctcccactacaaggtttgtgggagcagtaggagaagagcccatttctgaggagatgagggaagtcttctgaaaattgctagtatttcagaaggaatggatggggaagagtaaagatccaatccagtggttggaaacaaatgaagggctgggaggtgagagcacaggctacatttagttaacagcaggtaataaaaactaaaagcagctgacacttactgagcgcttactagataccaaattcagttccaaatgtgtttcattgttgattcatttaaaattcagttccaactgtgtttcgttgttgattcatttaatgcctcagccttttgagttagttactatcatcctttttttatagatgaaggctctgagataccaagaggtgatgttagtggcctaagatctgataagtatggctgggtacggtggctcacacctataatcccagcaccttgggaggccgaggcaggtgaatcacctcaggtcaggaatttgagaccagcctggccagtctggcccatctctactaaaaataggaaacaattagccgggcatagtggtgcattcttgtaatctcagctgctcgggaggctgaggtaggggaatttgcttcaacctgggaggcggaggttgcagtgagctgacgtcgtgccattgcactccagcctgggtgacagagcaagactctgtctcaaaaaaataaaataaaataaaaaagatcggataattaggaaattatcgagctggggttcaaatcctgccagtctggctccagcagctgtggcctcactctgtccaccatgtgtgcctggtagtttagtgtggtggagaataaagtatatgggagaggtgtgggagatgacttaggagaggggtaggtgtctcagtgtaaaccagacttttatttgagaactgccttacctagtgctttttgcatgccaggtacttttccaagagccttacaaatagtaactcaattaattttcttaattctaagaagtaggtgctttctgtttttgacttcaacttacaggtgagaaaactgagttaggggaggttaagtaatttctcacgcttgtgcaacaggtaagtgctacagtcttgatttgaaccttgccaatgtgtcttcagagtctctgctcttaacctctgcgctgctctcccaggtcttaccaagagttccatttgcgaaggtgtatgtgtgagagttcacatgccatcgggtatggatgtgtatatttcctgatcatcccagtccagtagttcttatcttagaacacctttgtcactctgtatatgcttcatttcagtgtttattaagtgtatttctcatctctccaaccagatcgcaaatccctgcaggacaggaattgtcatataccttttatttaattgctttattgagatataattcaagtactatacaatttacccatttaaagcatatgatttattggttttcaatatatgcacagagttgtgtaactgtcaccactgtcatatacctttaatccagtttccattaggatttggactataatatatatatatatatttgggacagggtctcactctctcacccaggtggaagtgcagtggtgtgattattgctcactctagcctagacctcgtggatacaagagatcctcccaccgcagcctcctgaatagctaggacctcaggcacacaccaccacacccagctaattaaaattttttttttttttgtagagacgggggtcttgctatgtcgcccaggctttgggctgtatatttaacctccatgtcttccacattgttcacccatcataaaaccctcttcagaggtttgtcattgaggataaaatatattgaggttattaaagatattcttcaaatggcagggttttttctcccctatgtaaaaactctactaagtatttggtgatatcataataaaacaaatcagtttttgtgctaggaatggaggaaagaaggtttgagttgtttttatgctaccatgatgatgattattaaaacaaatatctatggctccactgtttgggttttaggggttcttatcttgttggagctggatggccttggaatttatgttaacacaatgatctttactctttccttcctcagtcctgtccccttttaccaggagagtcctagaaatggagtcccagaaacatttgttattggtccaaattcccatgaatgcctttgcttttggcactgctctaggccagtgattccctacatactgaagtcttctggactggtataaaaaactgctgatgcctgggtctccctccagagatcatgattgaattggacttgggtgtggcctgagcctcaggatttttgaaagcttgacaaccactgttattttggtgcacattgcttcaagagacctgctggctccttcttggagtaagaatggaatgcagtgagattaagttaaagtccctggtgtgtcagttcaaaggaggggtatgtaggggtttctccaaatttctcttctttcttgacagctttgtcttagtcctgcctggtgtctccagggtgcttaggcatcaagtttatacagttttgtgataatcctggaatagaggttttaatcccaaacttgactgaaagctccatttgtctcctgcagagtctcagtggttttttgtgatcagagaaggtgctggaggagggaagcattacaaagagcaaacctggtctcagagccctctcctgggctaacctcatccagggccatgtggtgccagtgttccctggcttaggtcatatggcttcacagcaaatagagggttggaaaggtgtggggagagttgaaaggtgatatgtagcgtaaaaaagtcagggagcaggtcttttttggatattgagttcttttagaagattgtccgaggagctctgactcctctgtgctttggtctcttagacctttagtcccatgaccagtctctgcttttgatgaattcttagagggaaccattcctccctttgttctccactatgtgtgaggattatctattatggcattcctgctgagcgcttcctcctctctggttggcatttgctgcctcataaacacctacagatttcctcataagactctgtgggtttgccttagggtggaccttgcaacagaggaatgtgtgacgctgagacatgtgttggttctgcttggaggtaaggagggggatatgcctttgtgtagtgatacaattcctttagcaaagtatttaacagctactgagcaaactctattttcatggcctgtttaaccagacagaccctctaattgggtgaaatgaactaaattaaatgtccttctcctaaaagtcaccagtaacctcagttctaaacctgttggcttgtcctcatttctggcctcacatgaccctgtgtcctaccctttctttctcgccatctgctttcatgatgtcccctctcattattggcctctagcatctcatattacccctttattctcctttgcaggcttcttcttcttcttccttcttcttcgtccttcatcctttctcctccttccttcctccttcttcctcctccttctccttccttcttctttcttctttcgtcttctttcttcccagcaaagatatatttttattttagtgtttagcagcatgacatatgcatatagaatgatagtacactttaccctaatcttcaaaacagaatgtactagtttaccaatgaggaattttggccaaaaatgtagtgtttttcccttccctgtacaggtcaggtatatgtaggtccagcactaatgctgcaccttttgagaagcattactttagcaaaaatctagaaatctttcactttttctgaatctaacaaagggtcttactttctttttttttaaatgtacattttaaaaaataatttcaacttttattttagattccggaggtacatgtacagatttgttacctggatatattgcatgatgctgaggcttggggtacagttgaccccatcacccaggtactgagcatagtacccaataattagtttttcaacccttgttcccctccctcctccctctagtagtccccagtgtctattgttgccatctttatgtccatgagtacccattgtttagctcccacttataagtgagaacatgtgatatttggttttctgttcctgcattaattcacttaggatcatagcctccagctgcatccatgttgttgcaaaggacatgattttgttctttttatatctgcaaggtattccacggtggatatataccacattttctttatgcaattcaccattgatgggcacctaggttggtttcctgtctttgctactgtgaatagtgctgtgccttgtgggcttctcttcattctgcctggacacctggaaggttagtgtcccccaaggctgtgcctgagattgtctcctccctccagttcctgccgcactacctgcccccttaatgggtattggctccttaacactcctcagcctgggtggctgtctcaagctctagccctgcacttttagctgtttagtttgagctggaagactcaacttgtctgtctcaaagatatttcaaactctgctgacctagaactcaccagttcttataactgaatccatctttttggtcattcctgacttcatcctgcagcttcactttcctgataaagtttctagttagttcaattaagtacctgttatgggcagataggagagacaccatcagcctgaattggatgtggcaaaagaggtggatcagtgaaacccttctacggccatggagcatgtatgtcctatcttctctgttcaaattcagggcctctttattttgtagctgtaccattgctgtagctcccactgatccccttgcttttgatctcatccctacaccttcctctccattctgtccagactgccaaaggacttttctaagattggctcttgttgccatgataatagcactaccgtgttcatgggtacagtacttagcagctttaaaaagtgcattcaagggcataagtgacgacgactgtttgtcagtgcctacactgtgctgggattccaaaaacaggtaagctactagatttgttttcaagaagctcaaagtcttcagggattaatataaccagataatataaagacccaagcttcattatttgatctttataatcatctacaaggtagcagggaacgtgttgataacctcatttgtcagataaagaaacctaaggctcaaaaaggttatgcaaataataataataatattagcatatgtttatataacacttgtaaaagccggacactgttccaagcactttatatctactaatgcaatcttcataacaatcctatgacatgtaagtgctctcaccttcataatatacatcgagaaactcatttgtacagagtagttaagttctttgaggtacagagagattacataacttgcccaagatcacatggcttgtaaataggagagctatgatttcaacacaggcagcctggctccagagcccaagcacataaccagtgtgctgcattgccctctttaatttatcttgctatgcagtgtggcttctgttgcctgcagaataaaatttaaactctttagccagctaaaatctccttggtcttggctgcattttcaatacttttaatttagtactttcccagtattaccccagactcattcgattttcatattcttcacagcagtttgtgaacgggacataacaacctctgttcatatttcttgccataaagctatggcaacagggtagcaggataaaagagagcctgtttatttgtttgtttaacatagaggtcagtcagagacagaaatgtttctttttttttagcctttgtcagaaagaaatacttcttttcatttctctgtattggtgggcagatatatatatatttgtctgagttcttctcttcagttttcagaaggggttgtggttctattttcccatttcttgaagtccctgtaggaatgctaaaacccatgtcctaagattacagtttttatagttggtttgttctaatcaatattcagatatagtccacacatggctggttgatacgtcttttaaatcttgttaatctataggttttcctgccccctttttggttgtttccttgcagtttatttgatgagggaattgggtcgtctttcctgtaatttcccacaatttggactttgctgattacgtctttgtggtgttgcttggcctcagtatttcctgcaagtgacagtttaatctaaaagcttgatcaagttagagtcttttttggttttggctagaatacttcctagatggtgcttagagcttcccatcacattgctgggtacttggtactgggtactcacatgaggaagcacctaattcttggttgtttcttgtgatgttacgttttggtcagtggtttcagatgttgttatcttaagtccaccagctttttgcataatggttttaattagctaactttaaatattaacatttgcccttcctggtacattgagttaaaagtgattttcattatttaaatacacactcttgtgtgtatgtatgcatattatgtatgtatgtatgtctatatatgagtatatatcattgttataaaaaataatggcaattaaaattcaattggatattaatgggtttagagtttatgtttgggatgatgaaatgggtaatggtgatgtagaacattgtgaatgtacttaatgccactgaattgtatacttaaaaatggttacaatggtaaactttatggtatgtatattttaccacaatgaagacaaatcaattggaaagggattgtaacacatggaattaaaaaaatccaacacaacataatgagtgataattattgctccctaaaaggagccaaagtgagttggagaatagactgataaagtttctttactgaagaatgctagctaataaaggtagaagctatgctagaattagaaaaaggaaaaaaaattgactttgccacctgcaagtaataattgattcaggcatggatcatcattggatgctgaagcctttcagtaaaagactgttggaattcccattgtctgaatgcatctcctagtaaattacttgctgtttacagaggggaaaaagtacctttacaatggagaaatctgcttcaaccaagtgatcatcagcaaatgggataaactagcattatgttaccgactgatattatgcattgggaagtatacaacatgaacctaaaaatgttcttgccaaaaatatttaatctggatctaatcgtgaggaaacaatcagacaaatccagaaagtaggacatgctgcaagacctctggcttgacttcaaaaatgtcagtgttatgaatgaagaaggctggaataaaggaaactcccaaagagacctgatgaccaaatacaatgcttgagcctgggttaaaaacaaataaagaaaagaatcgaaacagctggaatatggggaccatattaaaagatattgtattagtttgctagggctgccataacaaagtactagagactggatggcttaaacagcagaaatttattttttcacagttctggaagttaaaagtctgagatggagaccccagcaagtttggtttctcctgaggccttctctccttggcttgtagatgggtgtcttcatgtggttccttctctgtctgtatcctaatttcctcttcgtataaggacaccagtcttattggattagggtccccttcatcatctcattttaacttaataaccttttcaaagaccctatcttcatatatggccagtcatcttccgaggggctgggattggaacttcaacatatgaattaggtgtgggggacacagttcagcccataacagttattgaatcatttaaaaatggcttgggtgagataatgatgtcaaggttctgaagggaagtgatctttgctgctgatttattttgtttcctcctagattttgaactcttgaggacaaggaccttctctggacacagatatgcctcagagtaactgttgcatagcattcagacactgctggttgaattgtccatttacttggcatgccaacacatggcaaagtaaagggggaaggagattttctgctgcatgtatgtggtttgttgtaaacctttttctaataatccatttgctcaatcctctccatcccccaacaaagtaatatgatgagaatttggaaatacttgaggagttgtgcatgggtaatcgccaggtgagcacatcatggagaatcagaaattcagaacagaccttggcaggggttgtgctgtcccaaggtagatgaatctctatgactacagaaaggctgcttcaaaaggaggcacctagagaaactctcccttgtgattaaaaaagcccaggtacattagagggcaaaattcccagcaggtccaaacaatgtgttccattgctgctgtttcagccctgctagtctcagtagtaccctgggtcatcagatggcttgaaggacaagagggtgatatcctgtctcttctttgactttgttgtgctcactggcaaggagtttcattcacttctgagaattcacacactcattttattgcaggctgatgttgattctgagtttgaggatgccaacatcttttcattgcctcccagctcagttccagaagtgaaagctcagtcctagattctttttttatggtggttcatgaagatttcagttaatccatttgtggtgtccaacagcaacttgagaagagcctggtcttgacctttgcccaattttctattggtttatttgccttttcacattgatttgttctaagagcgcttgtaaatgaagaacattgcccctttgtcctatctattgcaaattttgttgttgtttttcttctcagttgttgtttaactgatttatattcactttttaaattgttatgtcaaatatttatcatttttttctttatggcttctggattatatggcttctgagtttgtcatgtttgaaatcagcttccctacttaacattacataagaaaccacctgtgcgtttttctagtactttttgaaattctctctctctccttttaaagattaactctgatccagctgtagttcttttggtataagatgaaaggtagggagccagtttaatttttgttgctcaaccccaggagttcgtgacccttcactagtgccacatcatcagctagagagacctgctgctaattcagcctgaatctgctggttcagccttcagaggaaatctgattagttcagaaagccaagatcacctccccacaggggtcaggtatctgctgctgcctcaatcagctaggctgctctgaatatgaagagtaactgggaagcaaggcgctgctagattgtctcaagttgtgctgttttcattcaattgttattctctattctcttacttttagcagatgagaaaacaagaggtcatgctgctggttaacagtggagtcagattttttttttttttttttttggagatggagtttcgctcttgttgcccaggctagagtgcagtggcacgatcttggctcactgcaacctcttgaaccctggttcaagtgattctcctacctcagcctcccgaatagccgggattacaggcatgtgccaccgtgcccggctaaatttttgtatttttagtagagactgagtttctccgtggtggtcaggctggtcttgaactcctgacctcaggtgatccacccacctcagcctcccaaagtgctgggattacaggcgtgagccactgcgcccggccgcagtggagtcagatttaaatgttccattgcaaagctcatgaaataggaaacattctatgaggggaatctggttggagaatcctggaggaagaggcatttgacttagtccttgaaagaacagcatcattttttaaacttctcattatggaaatttcccaaaaagtgcaaaactggaatagtataattaaccctcatctccctatctagccagtagtaatcatcaatttatgtcctcaatattgtttcatttatgccatgccctctttcctccttccatccctacttttttttttttaattaaatttttgtttttggagacaggatgttgctctgtcacccaggctggcgtgcagtggcgcgattatggctcactgcggtctcaaccaacagtcctcccacctcagcctcctgagtagttgggactacaggcacatgccaccatgcctggctaattcatccccatatgtttttcaaagcaaactcagccatcctatctgtaaatattttatgtatctctaaacaagatttcttcaaagcacaatcacaatatcattattatactttaaaaaattataataattcttcaatatcttcaaataggtgttctgtacacattgtacacatttcccgtattgtcttaaaattttttaaatagttgttgaattgtgatgtatataaggttcatgcattacaactgatgtgtcttaattttctttatttttttttttaaattacaaagctacctttatacttttaagccccacaggaataaaaaacactgggaagggctaaccccctcaccccaggagtggcccatagggagagaggctacctgaggggaaggaagtacaaaagggacccaccgcagactcatggcaaagggaagccatcggtgctgggacctgtggtcactacaggaggaaatgcgagtgtggtgggactggctccaggcacacaagtgaagggcaagagagattggagtgaagccacaaagctacttgggttcctccttcttctcgtttgcctttttctgcttctgctgcatgatctcctgagtccctgggggtagagatgatagggcactaggaggtatcagagggcaaaaagaacaaaatgcagagggatgaagggcacaaaagagaagatggaagtggatgggactaagctcaccgtttggctgctgtactcccatcctaggagaagaagaggaagagagctgaggctcaaaaggcaatcagtctccatcctgcagttgcccaagaggtcagaagtctggccacataggcccaaggctctctaccgtttggctgctgtactcccatcgtaggagaacaagaggaagagagctgaggctcaaaaggcaagcagtctccatcctgcagttgcccaagaggtcagaagtctggccacacaggcccaaggctctctattcttacaccagtaagaaggttgggagaagggaggagaaccgggaacagcaaggagggccagaagcactgggctgtcataaccacaggtgtatctgaaatgggaagctccctgcccttgccctgaaggtcagactgggggatgctcagaaatcagactcttgtgtcctaattttcttttgatctctggattctcttgcctgctcaatactgtgctttcttttcctctgaaggacagtgtcacataatggctgaaatcatagatttgcaatcaaattagggctctgccacttgctaactgtgtgacttggggaagttactcaacctctctgtgcctcagtttcctcatctgtaaaatggacataacggtgtctactcctcagggctgttgagagtgtcagtaagctaatgtttgcaaagcattagagtcatgtcaaaagctgtgggctgtggaatagggcccaggagggctcactcaagtgagatggtgtgtcgtctttgagatgagcctccagctgtgcagagagcccctttccttttcctttttgcttccttctggttcttgacgtgcttcagttagatgaggttgatagcaggaatttggacaggtaaggcatatttaatggaagcaacttctttattgtcctttcatttttggcttcctcttcctctgtatttattaaattagcttttctctctcagaagtgtttaactttttatggcattatctgggcttcagcaacttgtgatctcctaagtagagcttttcagcactttataaatacgtcatatactttttatattcctttgttccccatcaggaacatagccccagtcttcagaatagcacaatcagtttttattcatttaaggagcagtagtaatttgacacttgctaatatgtaacaaattatattgggcgtggtaattacaattgcagctggttcctaattatactgtaaccttgatgcttacaaaaattgagactgaattcagcataaaatactggagaataatattctgcactaggcatttctgccttctactgagccatgggcatttatgaatcataatgccaaattaaaaagaatttattttaaattggttacaattacaatgttgtccagtgtctccattcttaaaggtagctttaaagtccccctttttgcttgctaaactctgggaatatccttcaggtattataattagtgtctaaataacctgagctcaggggtcatttctggctgtgtgatctactggtattcatttaagactctttagtacctcagcttctttatttgaaaagtggggatattactcactcttccccttaaagagttttaatgatacagtatataaatgaaataagataaaaagccattagcataatgcctggcatagagttaaggacccagtaaaagttagctggtcattgttatcgttataattaataataagtgatccggctccaaagactgcctctgtgaccctcaactttagcagaattagtgtattaattctcctgccactctgccttatgatagcatgtatcatcatacattttgtaccaaccacttgtcgataagtcagctttccctgcttggggcagggtttctgatttattgggtgttttctcctcggtgcctggcgctgggcctagtacactgcagctttcccataggtgattgtgttgcatggatgagcaagtagagcatcaccatctaaggagtggttgttagctggggggtggggtagtttggcccccaagaggatttcttttagcaacctctggagacagtttcttggttgttgcagcttgttggggaaggggttgctactcccatctagcaggtagaggtcagcttaataacaataatagtaaaatccagaactagtatgtttcaggctcttttggcataacagaacccagctaaaacaccaccattcattcttaactgttatactctgcctcttaatatcagaattttaatgatgatggctttctagtttatgttctacaacagagcagagtgaaatctaacatacatcacaacctactgaatccttctgataaacatctctagtgcctctgaaatgactcgctgatgtaattacccagtgggttaacatttgtggtgtctgatactttataagtcaactgttgagtgaaatgaagttttgccagctgattacatagaaatgttgtggtttgaagaatgcttaacagggcatcttgtctttgtactaatttatatttcagtaacttttcccataatgactgctcttcatttattaggtcgtagggaaactgtaggatgaaggatgagtgactcagtggtttcaataaaaaattattttcttaagtttgagatacctttttcttcttctcaagttaatggtaactgtggttttagggaattccaaactttcttttgcaattactgattgtatcagtcagggctcactcgcagagaacagaatctactctagctggtttaagcagagagagatttattacaggatattaaatggcttacacaatttgttgggaaggtaaagaaacagacttgaggttgagctctaaagaatgacgtctagagtctcaagcagagcaggccaccaagacagcagtgacctcctgtgcagtcacaatgctgcctgccaagtggagagtgtttcaggaccatgtggccactgacatgggagggcaggaggttgccacaggaaaactagacacttccagcaatggtgcgtgcttggcagaaacagcagaaggtgccccccaactcccaaacatttgccaaatctcactcaatttcatctaattgatggcacataggccgcatagcagcaagggagtctgggaattgtagtttcagccttctagtgtctttagtataggaagataaagaaggagggtgggcccctgcttctaagtggttaggttacacccaagaatacttttctttgggattcagggccatctactgcactatttcctcaggttcaaaagactatgcaggactgtttctccttctctctccgtttcctgcttgtcactgcatgcttatttacacccacccacccacacacacacccagaagcttgcttttgatgagctacctctttgagtttgtagttcttatctaaggcaaatatttactttatgatagtagaattttcagtgtaagtctgtgcttgtcttggctttcagatgtttcaggtttgggagggtgactggggaagtattgctgaggaagggctgtgctgtacagttggtgacgtagcagctgaggttgggcctcgggtcctaacgcagttgttctcagtccacccacacatggtaatttcttgagggagctctaaagatatccattctagaaattttcatttgattgacctttggtatggtttgggttttgtaaaacctaaaagcacctcaggggacttgaatatgcagcgaggactgagaacctacatcttataatccgtacattaaaattggacattatctaaagctgtggttcttaaactttaactgcatcagggtcacctggagggcttgttaaatcataggggattgctgggcctcacccagtttctgattctttgggtctgggatgggtgtgataatttgtatttttaaaagttcccaggtgatgctgatggtctccacactttgagaaccattggtctgaagagagttgcctattttcattgtaaatgtcagatttttactgacctgaaagactttattctatattcagcacttccagagaatctactttgtttcctgatctttgccagagttggggttgatctgaggagtaaggtgccctcacagagatggtggtctcacatctctacagcctcccagtgaaagaggagagctttgcttttctttgcattttatttttcaaattagcatttcttattttcgtgtaggttttcttatattcttccccaccatcctctcttagatctgacaactattttgaatacaccattctataccactgtgatttgttaaagtaatgagcctgcaactgtggcttgattcccttgtaagaaagtctgtttaaaaaatattcctacaggtaggaattttctggtgaccccctacctatggctgctctaactcatattaggagagtgaattcatttgtcctgaaagatgacttttgtattcttcttgccatgttctcccctaccccctgcctttttaaaaacaccagttcttgaaattgtgttattgtttttctttttatttctaggatgtacctacctagtatgtgttttgcaaacgctattgatgacttacacaattataaccagtgtttatcttgtcaaaaagttttacatattcagtgattctcaaattttgctcctgtggagcatagactcattgaatcgacctgaaatttccatactaaatttaaataatgatagacttttcccagtttatggaagaaactatgcatagagtttttctgttccaacattgccactttctgggccaggcatggtggctcatgcttgtaaacccagcactttgggaggccaagatggaaggatcacttgaggccaggagtttgagactagcttgagcaacatagtgagactgtctctacaaaaaaattaaaaaattagtggggcctggtgacacatgcatttagcctcagctactcaggaggctgaggtgggaggattgcttgagcccaggagtgtgaggctgcagtaagccatgatcgcaccactgcactccagcctgagtgacacaatgagacccccaactaaaaaaaaaaaaaacaaaacaccaaaaccctctctttttcccttaaatttggaatcagagtaaaatgttatcaaatttcaacaaaattctttatcttgttagcaaataatatttcatagtaatctgtaaaggacccctttcttcttagtgaattactctgtatgtttgaaaaccagttacttgatttaaaattcttgatataaaatttttgttttaatgttggaatccattcttacaaatgcaaattcagaagaagaatcataaagaaaatcaggcagttataacaatagtagctgtaaatatttgcatgctattaatatatgagaaaaaaatgtaacagtgaaagtaagccttctggaaacaatctaaagtttgatgactcttctaaaccccaagaatgaacgaagtctaataattccaggcttctaaagcccaagaatgaactaagtctaataatcccaagcttatgtgatgcaaagtatgcatgctggacagctgttctgaattgactttaaaagggtggctacatttctgtggcttcctttttccagctcatagaacttcctgggtattggttttgccaccaggtagaattcattgaaatacacctttaaaaaactggtacatctcatggtaactttgcattgtcttcaattaagttgtgtaagtgttcttcattcatagcaaatgacacttaaaacaagaagataggaatgggaggtagcagtataaatggaaattccgaacagccacacagcatttgactggtgaataatagatggaattactatagagatgaggcccaggaggctggtagtaatttttctgaatccatcccctgttgaaccatacttatctatccttaaatagaatgtaccaggacctgagccaaattttagtgggcctcagagaaatcttgtggtgatcattaaccatttgctgtacctggaactctgggttgggggtagggtagctgagacaattatcagttaggatggccacaatgtttatttagtggtttggtgagtgtgtttgaagacccatgagtttctcttctcttttgctaatttatcccttctaaattatgagccagtttacccatcatttagatttcttaaggagtaaacatggtagaacataaacatctttggataaataatacaaatagtaatagataccatttattgagcactttaactgtgtggcccttttggtgctaagcactttgtgtaattatctcatattacttttctagctgtctaggactccccattttataaatgaggaaagtgaggctgagaggtcagggcctccaagtcacatggccagtgagtttatgaggttggtcctgctccctatttgaggatgatctgacactaaggccatgttctttttttttaatgaagatggggtgtcactatgttgcccaggctaatctcaaactccagggctcaagtgatcctcccaccttggcctcccaaagtgctgggattataggtatgagccaccattcctgtaagatcatgtccttaatcacagcattggacagacactacacactgttaggagaaattgggagagttttgatttttaggcttgtactatattgcagttatgtaccacataaggatgttttcatcaatgaaggactgcatatatgatggtggctccataaattatagtggagctgccctgtacaggtgttccactttttatcttttaaaaccatatttttaccacaccttttctatgtttagatacttgttttacagttgcctacagtaatcagtataggaacatgctgtatagatttgtagcctaggagcaataggctatctcatttgcctaggtatgtagtaggctacaccatctaggtttgtataagtacactatatgatgttcacacaatgatgaaatcacttaacaatgcatttttcagaatgttatcctgttgttaagtgatgcatgactgtattatattgccagctaatgcaagttatcaacactttgaagctgcctgtaatgtgggtctgtaggaaggccactacggtaagagatggaatatttgggatctgatctcagctcagaaaacatttagaaatgtcagcacagattggcacttaatctgactttttgggggaaataattgatgctttctgagctttggtttcctcttctgtaaaattagggcagtaatatccatcttatctgactgatttgcagtgagaatccaacgagataatagtcttgcttagaaaactgtaaatgttaggcaacatgccttataagtgttgggtcattctctgtctttgttttgatttgtgttctctgccctagaccctgagaaggttacaaagtgaacactttttttccccctttgaggtgtagttctgatggggagcactgaatatacatttcaggatccttaagcagaaatgtgctatgaaaattgagggcaggggaggttcactctgaaatagcattgcccaggcaagaccttacaaagttcatggcataaagaattaattctattttagaattacgaagaatacttcattttgtggaaaatttattttgcttttaagaggaaaacagttaagaacttagggtaccatatgcttttgaaaaaagtgttatgtacttccatgagatgtgggactcttaccatcaaggaggagatttttctgctcttaaagtggaggatgggggcattttatgctgtcccatcttctcttgtgttcgtcctaccctacctttctcagaatagagacctgagaggagggagtcctctctgaagcttttagggcagcagagtcattcatcttaggttaactagcagtacattttcttctcctctattgaacagcagagaacacttactaattcaggatttttaaaaagattaaaaattcatggctgggcacagtggctcatgcctgtaatcccagcgttttgggagtctgaggcgggcagatcacctaaggtcacgagttggagaccagcctggccaacatggtaaaaccccatctgtactaaaaataaaaaattagccgggcatggtggtgcatgcctataatcccaactacttgggaggctgaggcaggagaatcgtttgaacctgggaggctgaggttgcagtgagctaagactgcatcattgcactccagcctgggcaacaagagtgaaactccatctcaaagaaaaaaaaaaaagtattacaaattcttatgaatagccttggtggttacaagcactcagctgaaatgaagagttatcagtcttgctttgggaaacaaggtgaccaaccatctggtttcagaaagactactcccattctagtgattagttaataaaattattcctgacagtggagagcctaggagctcaggcagttccatatttagagacagagaactcattgtccaaagatctcagaacagccttcactagctcacagaagggatttaggacaatttgcataagtttccctgtggatagcaacatgggtccagtgttgggtggttccaggaacctctccttggcttcatcatggggtggctctgtgcttggtgggaacccagtctcatgatgttttttgctaggaggattgggtgttgggacattgaataaacccactgtttggttccacataagggctcttttgtgttggcctgaggaagccatgttgaagtttgtcttgcttttccccagcaatgtttttggactttgtggcctgcagaattaagcacaacacccattctgagctaatctgtcaatttttgctcttcaaagataaccacagccacttgtatttctaaaatatgtagaataatatcatacctttggagacctatgatttattaattaaaaactgaggagaggaggagaggttctttggcatgcccaggtagtgaggtatacatgcctgttcatggtgaaactgtgagaagtaactcccttgagttaatatgatttccctagttcactgacttctttaagaaatatgttctcttggctgggcacgatggctcacgcctgtaatcttagcactttgggaggctgaggcgggcagatcacttgaggtcaggagtttgagaccagcctggccaacatggtgaaaccctatctctactaaaaatacataaattagctgggagtggtagtacgcgcctgcaatcccagctactcaggaggctgaggcaggagaatcgcttgaacctgggaggcagaggttgcagtgagccgagattgcaccactacactccagcctgggcaacagagagagactgtctcagaaaaaaaaaaaagaaatatgttctcttgcatagttgacaaacatttgtttacttaaattctcctgtgaaagggcatggtttacactggattataagtaaaaaatgacaggtgtttgcaatgtttcaccttttctttttaagaaatgatatacattcaacattagatattaagagattttgctactggttccttgcataaaattttatcattttagaagctgcataaggagtctaatttaaaatgggaagggggcatagtttatgcactggggcaacatggtatttaagtacaaaaatgaaatgcactaatttttaatctgagatttattttcctttagtcggctagcttgatttctcagctttgttgtaataacataaacatttttatgtttatttataggtggctttaaccaagagagcagatccagctgagcttagaacaatatttttgaaggtcagtataaaggaatctattttgtttcttgtttgatttgtgttctataacttttaaatattattttcaaacagctctttatttcgttgttatattttgaaaaagtcccaaagtgtcagcccggcacggtggctcatgcctgtaatcccagcactttgggaggctgaggtgggtggatcccctgaggtcaggagtttgagaccagcctggccaacatggtgaaaccccatctttactgaaagtaccaaaactagccaggtgtggtggcacgtgcctgtaatcctggctattcaggaggctgaggtgggagaatcgcttgaacctgggaggcggaggttgcagtgagctgagatcgtgccactgcactccagcctgggcgacagagcaagactgtctcaagaaaaaaaaaaaaaaagaaaatcccaacatgtcttaagaggggagagccttacaaatacgtctgctttttaaaatgtaggtgactgtgatgacaacatggcttatattttaatttcttttatctcatgtggtgtaaggtatgtgaataaaagcggttgctggagtattcagttttgcaacccatttacctttccaggattgacccgtatagctttttctcctaggaagtttaaagctcattgtaaacatctcagtaatccttcactcatccatgggactatactgtctctccctggtagaagcctattgttgtggtcatcatcattatcatcactttatgatgactgcggtatcctgagaggaggctccagtatggataatactagatactagagcacaacagacaccatggaagtttgtgtcttatactggcatcttatatttccacctattttgtgatagtgggcagtgaatgattaatagaataaaagtctgtctcaggttccagacaccgaaacacctttatgttattcagctgaaattaaagtactcagaaaagaaaaggccacttttgtaagataatatacacacatataatatatatgtatatatacacacacatatatgatatattattaataacatatattaatatacacatattttatatatatatgtttttctaaacattatgaaaaggcagctgagttgtatggaaagaggaccagggtgtcaaatgagaaatttgatgtgtactgaatatggtgtagaaaggtattaaatctatgaacctctctttcctcatcacaatgtgttactattaaaactaattgagacatcaaggactttgaacatggacaggatatttgatattaaggagttggtattaatcgatgtttaggctgataatattctcattatgggaaatatagagtctatgttttagagatatacactgaaacatttttacagatgagactaccgtttctgagatttgcttttaaataatccagttttgttgagttgaggaaaatgagtaggcagtatgatgataacttttgaaattgggaaatggaatattgggtttattacactgttctctctactttgtatatgtttgaaaaattttcttttcttttcttgttttctgagacagagtttcactcttgttgcccaggctggagtgcaatggcgctttctcagctcactgcaacctccacctcccgggttcaggtgattttcaggctcctgggtagctgggattacaggcatgtgccaccacacccggctaattttgtgtttttagtagagacggggtttcaccatgttgatcaggctggttttgaactcctgacctcaggtgatctgcacgccttggcctcccaaagtgctgggattacaggtgtgagccaccacacctggtctgaacatgttcataataaaacatttttttaaattgtaacgattcagtgaggtaacttatatgaaaggtgtcctgcatctgatatgtgttatgtattgattcagtaaatgcttgaaattaagtaatgatttaagtaaaggagaaataaagactccaaaagcaaatgaattaaaagcagggatagttttgtggggaggaaaaaaaaggacacatttgtaaggagatttagattatacataaaaaatcaggattctggacacctgtaatcccagtgagaggctgaggcaggaggatggcttgagcctaggaatttgaggcttcagtgagctatgaatgtgccaccacattccagcctggatgacagagtgagaccctgtctcttaaaaacaaagcaatgttctttataaatttgtttttagcccagaaatacagtgtagagtttcttttttttctttttttttttttctgagacagagtctcactgtgtctcccaggctggagtgcaggttgcgcatgtcagctcactgcaacctctgtctcccgggttcatgtgattctcatgcctcagcctcccgagtagctgggattataggcatgtaccaccacgcctagttaatttttgtattgttgttattattatttttttattatactttaagttctagggtacatgggcacaacgtgcaggtttgttacatatgtatacatgagccatgttgatgtgctgcacccattaacttgtcatttacattaagtatatctcctaatgctatccctccctcctccccccaccccacaacaggccccagtgtgtgatgttccccttcctgtgtccaagtgttctcattgttcaattcccacctatgagtgagaacatgtggtgtttgtttttttgttcttgcgatagtttgctgagaatgatggtttccagcttcatccatgtccctgcaaaggatatgaactcatcattttttatggctgcatagtattccatggtgtatatgtgccacattttcttaatccagtctatcattgatggacatttgggttggttccaagtctttgctattgtgaatagtgccgcaataaacatacgtgtgcatgtgcctttacagcagcgtgatttataatcctttgggtatatacccagtaatgggattgctgggtcaaatggtatttctagttctagatccttgaggaattgccacactgtcttccacaatggttgaactagtttacagtcccaccaacagtgtaaaagtgttcctatttctccacatcctctccagctcctgttgtttcctgactttttaatgatcgtcattctaactggtgtgagatggtatctcactgtggttttgatttgcatttctctgatggccagtgatgatgagcattttctcatgtgtcttttggctgcataaatgtcttcttttgagaagtgtctgttcacatccttcacccactttttgatggggttgtttgtttttttcttgtgagtttggctgagttctttgtagattctggatattagccctttgtcagatgagtagattgaaaaaattttctcccattctgtaggttgcctgttcactctgatggttgtttcttttgctgtgcagaggctctttagtttgattagatcccatttgtcaattttggcttttgttgccattgcttttggtgttttagacatgaggtccttgcccatgcctgtgtcctgaatggtattgcctaggttttcttctagggtttttatggttttaggtctaacatgtaagtctttaatccatcttgaattaatttttgtataaggtgtaaggaagggatccagtttcaactttctacatatggctagccagttttcccagtaccatttgttaaatagggaatccttccccatttcttgtttttgtcaggtttgtgaaagatcagatggttgtagatgtgtggtattatttctgaggcctctgttctgttccattggtctatgtctctgttttggtaccagtaccgtgctgttttggttactgtagctttgtagtatagtttgaagtcaggtaacgtgacgcctctggctttgttcttttggcttaggattgacttggcaatgcaggctcttttttggttccatatgaactttaaagtagttttttccaattctgtgaagaaagtcattggtagcttgatggggatggaattgaatctgtaaattaccttgggaagtatggccattttcatgatattgattcttcctatccatgagcatggaatgttcttccatttgtttgtatcctcttttatttcattgagcagtgatttgcagttctccttgaagaggtccttcacatcccttgtaagttagattcctaggtattttattttctttgaagcaattgtgaatgggagttcactcatgatttggctctctgtttgtctgttattggtgtataagaatgcttgtgatttttgcacattgattttgtatcctgagactttgctgaagttgcttatcagctgaaggagattttgggctgagacgatggggttttctaaatatacaatcatgtcatctgcaaacaggacaatttgacttcctcttttcctaattgaataccctttatttctttctcctgcctgattgccctggccaggacttccaacactatgttaaataggagtggtgagagacggcatccttgtcttgtgccagttttcaaagggaatgcttccagtttttgcccatttagtatgatattggctgtgggtttgtcatagatagctcttattattttgagatacgtcccatctttacctaatttattgagagtttttagaatgaagtgctgttgaagtttatcaaaggccttttctgcatctattgagataataatgtggtttttgtctttggttctgtttatatgctggattacttttattgatttgcgtatgttgaaccagccttgcaccccagggatgaagcccactttatcatggtggataagcattttgatgtgctgctgaatttggtttgccagtattttattgaggatttttgcatcgatgttcatcagggatattggtctaaaatgctctttttttgttgtgtctctgccaggctttggtatcaggatgatggctggcctcataaaatgagttagggaggattccctctttttctattgattggaatagtttcagaaagaatggtagcagctcctccttgtacctctggtagaattcggctgtgaatctgtctggtcctggactttttttggttggtaggctattaattattgcctcaatttcagatcctgttattggtctattcagggattcaacttcttcctggtttagtcttgggagggtgtatgtgtcgacgaatttatccatttcttctagattttctagtttatttgcgtagaggtgtttatagtattctctgatggtagtttttatttctgtgggatcggtggagatatcccctttctcattttttattgcgtctatttaattcttctctcttttcttctttattagtcttgctagcagtctatcaattttgttgatctttcaaaaaaccagctcctggattcattaatttttggaagggttttttgtgtctccatctccttcagttctgctctgatcttagttatttcttgccttctgctagcttttcaatgtgtttgctcttgcttctctagttcttttaattgtgatgttagggtgtcaattttagatgtttcctgcttctcttgtgggcatttagtgctatagatttctctctacacactgctttaaatgtgtcccagagattctggtatgttgtgtctttgttctcattggtttcaaagaacgtctttatttccgacttcatttcgttatgtacccagtagtcattcaggagcaggttgttcagtttccatgtagttgagtggttttgagtgagtttcttaatcctgagttctagtttgattgcactgtggtctgagagacagtttgttatagtttctgttcttttacatttgctgaagagggctttacttccaactatgtggtcaattttggaataagtgccatgtggtgctgagaagaatgtatattctgttgatttggggtagagagttctgtagatgtctgttaggtctgcttggtgcagagctgagttcaattcctggatatccttgttaactttctgtctcgttgatctgtctaatgttgacagtggggtgttaaagtctcccattattattgtgtgggagtctaagtctctttgtaggtcactcaggacttgctttatgaatcttggtgctcctgtattgggtgcatatgtatttagaatagttagctcttcttgttgaattgatccctttaccattatgtaatggccttctttgtcttttttgatctttgttggtttaaagtctgttttatcagagactaagattgcaacccctgcctttttttttttttttccatttgcttggtagatcttcctccatccctttattttgagcctatgtgtgtctctgcacgtgagatgggtttgctgaatacagcacactgatgggtcttgactctttatccaatttgccagtctgtgtcttttaattggagcatttagcccatttacatttaaggttaatattgttatgtgtgaatttgatcctgtctttatgatgttagctggttattttgctcgttgcttcatacagtttctccctagcatcgatggtctttacaatttggcatgtttttgcagtggttggtaccagttgttcctttccatgtttagtgcttccttcaggagctcttttagggcaggcctggtgttgacaaaatctctcagcatttgcttgtctgtaaagtattttatttctccttcacttatgaagcttagtttggctggatatgaaattctgggttgaaaattcttttctttaagaatgttgaatattggcccccactctcttctggccagagatctgtcgggagatcagtttctgtcgagagatctgctgttagtctgatgggtttccctttgtgggtaacccgacctttctctctggctgcccttaacatttttttccttcatttcaactttggtgaatctgacagttatgtgtcttggacttgctcttctcgaggagtatctttgtggcgttctttgtatttcctgaatttgaatgttggcctgccttgctaggttggggaagttctcctggatattatcctgcagagtgttttccaacttggtttcattctccccatcactttcaggtacaccagtcagacatagatttggtcttttcacatagtcccgtatttcttggaggctttgttcatttcttttttactcttttttctctaaacttctcttctcgcttcatttcattcatttgatcttccatcactgataccctttcttccagttgatcgaatcggctactgaagcttgtgcatttgtcacatagttcttgtgccatggttttcagctccatcaggtcatttaaggacttctctacgctggttattttagttagcctttcgtccaatctttttttcaaggtttttagcttctttgctttgggttcgaacttcctcctttagctcggagaagtttgatcgtctgaagccttcttctctcaactcgtgaaagtcattgtccgtccagctttgttccgttgccggtgaggagctgcgttcctttggagcaggagaggtgctctgatttttagaattttcagcttttctgctctgttttttcccccatctttgtggttttatctacctttggtctttgatgatggtgacgtacagatggggttttggtgtggatgtcctttctgtttgttagttttccttctaacagtcaggaccctcagctgcaggtctgttggagtttgatggaggtccacaccagaccctgtttgcctgggtatcagcagcggaggctgcagaacagcaaatattgctgaacagcaaatgttgctgcctgatctttcctctggaagcttcatttcagaggggtacccggctgtgtgaggtgtcaatctgcccctactggggggcgcctcccagttaggctacttggggctcagggtctcacttgaggcattctgtctgttctcagatctcaaaccctgtgctgggagaaccactactctcttcaaagctgtcagacagggacatttaagtctgcagaggtttctgctgccttttgttcggctatgctctgcccccagaggtggagtctacagaggactcctggagctgtggtgggctccacccagttcgagcttccaggccgctttgtttactactcaagcctcagcaatggtgggcgcccctcccccagcctcactgccaccttgcagttggatctcagactgctttgctagcaatgagcgaggctccgtgggcgtgggaccctccgagcgaggcgcaggatatattctcctggtgtgccgtttgctaagaccgttggaaaagcgcagtattagggtgggagtgacccgattttccaggtgccgtctgttaccccttcccttggctaggaaagggaattccctgaccccttgcgcttcctgggtgaggcgatgcctcgccctgcttcggctcacacttggtgggctgcacccactgtcctgcccccactgtccaatgagccccagtgagatgaccctggtgcctcagttggaaatgcagaaatcacctgtcttctgcatcgctcacgctgggagctgtagactggagctgttcctattcggccatcttggaaccatccaccaatttttgtatttttagtagagacgggtttccccatgctggccagactggtcttgaacttctgacctcaagtgatctgcctgccttggcctcctaaagtgctgggattacaggcacgagccaccatttctggccacaatacagtatacagtttctaagttggaaaaggattctggaggatgaaagtccagaaaacagaaaagcatttgttccttacctaagctgatctctatggttgtgcatgttgggaccaccatggttggaatgaggtctgtatgagagaaccagagaaggtcttcgtatgtgcatttaaggtgtgttgatattgtaaaactccagtgacagaaatctgaaagatcacttgcagaaaagtaactaagtgggctgccaaagatcctatcaaaatggaaagtagctcattagcttaagctggtaaagaagtcatcgttctttgaaccgaggacctatctgttacttctgttttctaaacaagcaagagtggtgggcatccttctgacaggaagtgggaacaccatagagggtgtctcaatacatggtgcatcttacaatctcactggttggtgtgatccattgataagactccacttaaaggctgtgtccacctttcgaggaggccacatggtccctggagaagctaggctgagaccttagtttggaacgatgtatctttgtcagctgctacatccactttcagcagccagcaggactatactgggggagagtctaattgatcaggtagacctagagagggtgagaattcatgcagagttctggagagacacctgtagtgtttctgtttaagtgcacttgaaggccgagggtggaatctttggtataaatggggaagtactctcttcccttggggtggctgggactatgtgacttttgagtaacagtttgtgtggcttggagtcctaagagatgacgtcagggggaccatacctgaagaaaacagcagtcagcagtttgtggaaaggattgtggatctggcaaaagttctggtgatctcaccaggcctggatagtgtggtaccaacccaaatctgccttggcttagcatgctaaggatgtcaggtttaccatttatcacagatggtattgtggtgaggggaagaacgggaaacacagcaatgtggggaccgtgccaggccgagcttcttagttaattatggatcagcagtaagcattctgtaaacctgtctactttgctgattttctgtgactttttcctgacttgactttcttcctagtaaaaattccatgtgaaatatcccagccttctctctgctaacctgtgtaaagagaggattcttctttagcttgggaggtggaagggagcttcattgcagccttcacaccaggtgtgatggtagcaggaaagttggcagctctgtagatcagcgacagccagtggaactgagccagataaggaaagagggctcctaggggattaaaatgagcccaattctgcccttttcatttgtttgagaatttagaatcagttccactgtttttttgaaggtacctagatacagtgtcatggactgggtgtgtatcaatgcatacatcatggctcctgtccattaatatcagagtgagaactgtgtgtaagtgtaaaaaaccccagaagccatgatatgattgataagtagtgtacaggattaattagcagaagatggtgtggtctaattatatctttctatggagagtcattaagttatggagaggtggtaatgtttgaattacgctcgaagatgagtaggtagagaagggtttgttggcaatggaagacctttttaggcaaagaaaacaacacatacaaagtaaagagctgtcagagtgccacaggtgtggagggaatggctaaacacttgggctggctcggggcacaggatcctgggtggtggtagtcaggacaggacttgttataaaacatgtggggctaaggcatacgacagattttttttttttttttttttgagatggagtcttactctgtcacccaggctggaatgcagtggtatgatcttggctcactgcaagctctgcctccccaggttcatgccatcctcctgcctcagcctcccaagtagctgggactacaggcgcctgccaccatgcccgggtaattttttgcatttttagtagagatggggtttcaccgtgttagccaggatggtctcgatctcctgacctcatgatcctcctgccttggcctcccaaagtgctgggattacaggcatgagccaccgtgcctggccaacgacagatgttttcttatggaggatgttcttgtggcaagtgtcaggtaatgtttcatctagatgtagaagttaaagtctaggaagtcagttttgtttctagtcttaacgacatgcgtttttctgtttgcctagtacttttggtgttgcttcctgttagtttaaacagatgtgtattgagtgcctgccatttaaataaaacaccaggaaactctgtggtgagtgggaggtgcaaaagatgtataacaatgaccacatcttaaaggagctcagattttatataagagaccagatggataggcatgcaggaggtaacaaagaatcttaaagttggcataccccaagggcctgcgttgtggttaaagcaaatgctgtaggaggtggaaggagggagcagcccccattgtggagagtggtcagggaaggcccttaggagagagaacttggggagtctcagggacaagttggagaggcgacaaggaacacgtttgagggaaggcctggagatgagttgaggagaaaacaacctctgcaggttgaaggagtattgctcatcctttaagtgtttatttaaatacaactctggctcaaagtatgctgagtatcacagggtgtgggtgacaggattggaaaggtaattgggggtttggaattccactaaacagtaggaagcattcgaggttttttgacgaggagatgggtgtgagatttgattggtgcagcaaggccacaagttaggcagccttagggttgcggcagcaggaggaatggagaatggcaagatagagtcactttgaaagaatatttgattaagatggctgattttttataatggatgagagagagcagagagaaaatacggtctgagtgcagagaggtgccagtaataagaatagagaaagtgagagggagccagtagctcgagggaggaaaagagatgatgcgtgctattgtattagtaacagagaaagtgagagggagccagtagctccagggaggaaaagagatgatgcctactattagtaatagagaaagtgagagggagccagtagctatggagagcaaaagagatgatgtgtactattgtattagtctgttctgttctcatgctgctaataaaggcatacctgagactgggtaatttatcaggcaaagaggtttaattgactcacagttccacatggctagagaggcctcacaatcatggtggaaggcgaatgagaaacaaattctcgtcttatattgtgacaggcaagagagcttgtgcaggggaactcccatttataaaaccattggatcttctgaaacttatggggagaccgcacccatgattcagttatctccacctggccccgccctggacacatggggattattacaattcaaggtgagatttgggcggggacacagccaaaccatgtcaactgtttagaagtatatagtctcaagtaactaaatctctgtagcgaaagatgggaaaattggggaaaagggctgaatgagaaacagaagacatattacagagtaacatagtgaattacacttggatttttataattgttttgtcagcaaaagcatgatatccacttttaaaatgtctgtaggcaaattttgaaaaacagttaattctgtttttggaaactttttatcacatcaattttatatgcattgaaaatttaaaaggcagatacataaacaaaagtaacttgtgatctttgtgtaggaagatagatatttatatatttatttatctctcagtctatgtgtctctctgtatgtatataattttttttccccttaggagaaaaaaatactgttttctatctagttttttcccttacctgctatgttacaaatactttttcctataattcagtgtgcttctatattttttttatttttgtaaattattttgtttcttccatgatgatttagaggaactacttttaaaccagtacaaatatgtcataaataatatctggccatcttctaaccagttgagtaatttcttgcgcagtaagttacctcacatcttttggtaagcaatacgttaaatttgattagtaaagacattatacagttaattaggacacaattaaaatttgctttaaatatttctttgagggagtggacaccacatttttacaatccagaggtctttttttttttttttttttttttttaaacacctatttgccatgaagtcataggaaatagcttccagcaatgcaagctccttcccgtgagttctcacaaagtgtgcttctctgcgtggagcaggctgacaccaggtacaccttctttttctgatcatttttcttcatgcatttcaggaagctatctcagctcttagagtgcttaatgtgcccagcacacacattgattctcttagcaagagtcttgcccttaacttgttgtttacaacagtgccaacagcatgctgggggcattgtagactcctctacttttgccatggtaacacttgtaaagcattcctttttgaacagtactcattcccttaatgtctacaatatcacctttcttatagatttgcatatatgtggccaaaggaacaactctatgttttctaaaaggcctacagaacatatattgagtgcctctcctctttccctttgtgttcatcccattttggtgaattactggaagatggtggttccagctgaaaggaaccctactacaatatttttaatgctgcataatattcctacatatggctgtttctgttttgccctaacttattgaagcactatttaattattgaatatttagttgtttcctgtgctttactatcatgacagcactgtaatgatagtattgtacctacatttttgcatatagctagcattattttcttaggataaattcctagaagtggcaccattgggttagaatgggtttagaacatattaaggcttgtgattccccttggtagactgcctctcatgaaggttatttcaatatttattttgggtgggaacacggaagtgttcatttcctacattatatcaactcagattattatgagtttttgttgcagcagcaacaaaaaagactttatgccaatctgttggttgaaaaattgtatcttatttaaaattttcatttttaaataaatagagcaatatgtttattggccatttatgtttcttaaatatgtttttaactttattgtgacaattttcagacatacagaaaatagaatagtaaacacccacataaccaccatctgatttaaagtaatacttgtcatgttagtttatacatttttttctgatttatgttaataaatataacttagctatcactataattcaccctaaataatttagcatagagcttcaaataataaaaacaatctcctacacagtcataataccattgtgcacctaataaagttaatgataattccctaatataaaatacccaatccagatgcaaatccttaaattatattttgttccatccctataacagggaatcaaagtaaaggatgggcagatgcagtgacctgttgtgtgcaccttctcagtggttggaaaacaatgtaggggatttgtccttcagtcccaggatatgagtgattcatgacaaaatgggtagctggatgattatggttctaccctggctcattcacagcttacaaacctttatcaatttactgtgactgatggtgagcaggccagataggacccctgccctcggggtatgggcatttgtagtgataggttccttctggtttcctttgctgtcatcttcactgagtatggtggtatttcttggtgatgacaataagtattatacaaggttgcatgaggaatcctaaaactcttcccattttgcaggtgtatgtttaatcataataaaactcctgaaaattgcaagggaggaaggcttcagctcactagtgaaaaatattcccaaagaaggattaatgacattttaaagatgtggtggatataaggatatagtccgttccccctatagggaccctctgctcactgctgcagggagagcagagctgcatttatcactaccctcatacatatttttattatggtctgcctctgtccatcaatcctaaggagcaacctttgacatgtttacttaaatcacagagcagactgcccagccgtggtgatgagcttgttttaaaaactggagaaaactatttctgtgcccagattaacatgctcttatatttaagaaatgatttctttattgcatctaaaaaaatgaagctgataatatctctcaaagacttctaaaatgtaaactgttgaaatataaattgaatgcatacatcacaaatgtacagccatgaatactcagaaagtgagtaggcccatgtaacgagcatcccagaggccctctgatgccccttctgatcagcacccaccaagggtaaccagttgtctgaattctggtcactgtatgttaaaactaactgtatgtaagttttgcctgtttatttcactttgcgtgaatggaattatacgctaggttttcttatgtttcttttcttttacccttaggattcgtctgttgtcatatgtagttggagttagtttattcttttttttttttttttttgagatggagttttgcacttgttgcccaggctggagtgcaatggggcggtctcagctcactgcaacttctgcctcccgggttcaagcgattctcctgcctcagcctcttgagtagctgggattacaggcctgtgccaccatgcctgggtaatttttgtatttttagtacagacggggtttcaccatgttggccaggctggtctcaagcgcctgaccttaggtgatccacctgccttggcttcccaaagtgctgggattacagatgtgagatgccgtgcccagctggagttagttttttctcattgctgtgttgtattccattgtgtgaattcaccacaagccattaatgtatcctactattggttgacatttgtgttatttttagttttttggatactacaaataatgccgctgtgggcattttcacatagtttttgtgtatatgcacacttctgttggtgatatacttctgattgaaattggtgggcttgtggttgtatgttcagctatagcagatactgcccagcatttttctaaaatggtttactcctttattctcataccatcagtgtgtgagagtaacatttgctccacatttttgccatcacttattattctttttcgttatcttgggggtatggcatggtattgcattgtaggctttttgttttatgttttgagacagggtctcactttgttgcccaggctggagtatagtgatgcaaacatggctcactgcagcctcaatcttttgtgctcaagcgattctcctgcctcagtctcccaagtagctgggactacaggtgcacgttaccctacctggttaattttttattttttgtagagatggagttccgccatcttgcccaggctggtcttgaactcctgggctcaagcgatctgcccaccttggcttcccaaagtgctgggatgacaggcatgagtcagtgtgccctgccttgcattgttttattttgcatttcagtggaatttttttagggagcagcaacttgataatgattctaaaggtcatttgtggaaaatcaaggagtgatcatggccaaaaaaatttccaagtgtaaaataattcaatgtcttttttaaacctttcattcttttaaaaaaatatttatttgaacatgtttcactatctaccaggtactagtctgggaatttgaggacacagcagtaaaaatgagagaaaaaaaattctgtcctaacagaactttccctctagttatagcatgtaatcttgcaagagtagacgagacaattgaaaaggatggtcctgaaacatctctgactgcagtgatgacaagagctgtcattcgatcccagcattctcccatggagcgtaggtcagcctcagaatacatgttggccctaggaagcctttgccagttcatcagaactggtactgcagatggagccattttgtcacgcctttccctggtgaccatatgataattaagtatgtgataaacatggcatcctaaagacctggaagagagaatgatttgctttgtgttcgtgggacaaccaagagattaagtggaaaaattaaagttgggggattcttaccttagatcacacacaaagataaagtactaatgtactaaaacttaaaggtaaaagataaacctactttaaaaaaactcagataaactctctgatatttagtcttgaaatgaagaaagactggtgatatggcttggctgtgtccccacccaaatttcaccttaaattgtaataatccccacatttaaagggtggagccaggtggagatcattgagtcatgggggtggtttccctcatactgttctcgtagtagtgaataagtctcatgagatctgatggttttataaatgggagttcccctgcacaagctctcttgcctaccgccatgttaagatgtgactttgctcctcattcgccttccaccatgattgtgaggcctcccagccatgtggaactgtgagtccattaaacctctttttatttataaattacccagtcgcaggtatgtctttattagcagtgtaagaacagactaatacagctagtgtctaagcttagaaaagtaatggaagaaatttcaaaggagaaaaaaattctatacactcaattatataaaaatatcaaactggaaaaatatttgcaacaaatataatagaccaaagtgagtaaagggcatgttcacacactgttggtgggagtgtaaattggtacaatcttttccggagagcagtgtgataataagtaccaagagcccagaagttcctctcctttgactcaacaatttctcttctgggagcctagcctttgaaaattgccaggaatttggacaaatgttatattcaaagcttactaccttagctttatttaaaaatacaaaaaactggaaatgtctactggtaggagaaaagttaaattgtatagtaaaataaattattcactatcaggggcaaacttaggtataattactaagtcataagattgctgtaattagcagtgatatttcctttatattttcatcttgttttggctcagttaggaaaatcaaaatataattctttacatgtccaaaaagccgaattaaatgctaactgaagaatagtaggatcactggggcatctttgagcctttcccttgtagtgtgctaaaaaaaatgttaactgtaagacaatactatagaacatttatttaatataaagtacttattgtgtatagggcgttgtgctaagtatatgacatgagtatctcatttaaatatttctagcatcagtcttatgaagctgtaatgttattctattcattttgcaaatgaggaaccagaggtaccaaaagctttagttacttacctgaggccattcaagtggtaagaggcacagtccagacccgtgggatgccaaagcatattactactgagtatctgagcaaagccttagtctgcattggaattaaaatgtagaaataacaagtgacttttaaaaacagttttaatcaggtttaactcagattagagagagaggggagacactgccctggcacttcactgcgcaccctccatcactatggctaccagtgtggttcttatcacccagctaggcttgttcttgtagatgcactatccttgcctcctcagtccccaaaccactgctttgtccccaggatcaagaggccgtctcctgcttcataaggacaccacatgatcccatgtcgtttctcagcatttctgcccttagggctccatgcaacagaaattaatgggctctctcttatccaggctggagtgtatcacattaaaggccagacctaggagaacactgtgaggaagcgttgtttgccacctaattcttactgagcatttctgcatggtaatgccttagaatggagaggacagtaactagagcagcatttactgcctccctccataagattgcccaagatgacacgcacttagtagtttgctgtccagcttagcttgtttgccatcctttcttgtatcattgatgctcttaaagcaggaatggggcaaaggaattaggttgtttgcctccatgacttcgtaattccactttttttttttttttaaaaagctatgtgcctttgctaaaaaacaagacatagtttgtctttccaaatttctataaaccagggtttctgaacctggacactgcccacactttgggctggagaactgtctgttgcagggagtcatcctgtgtattgttggatgtctagcaacatccctggcctctacctgctggagccagtagcacccttcctcacatgttatgacaatcttaattgccatcagatattgccaagtgtccctgtgggaaaacattgctcccagttaagtttataaacataaaacttgacttgttttttctttgaactgttgggagataatggtcattatgaagcgtacatgatcatatctgatattttatcgtttggatattttcaactttttcacatatcactctcatgattatatactgttgaaaatcaaatatataaaatactgtttttcttttttttaaacagtatgcaagcattgagaaaaacggtgaatttttcatgtcccccaatgactttgtcactcgatacttgaacatttttggagaaagccagcctaatccaaagactgtggaacttttaagtggagtggtggatcagaccaaagatgggtatgtttatttttaattattttatttaattctttttgtttgaaacagctttcttttgctctaatgaccaggaagtcattaaatgtataccttcccatctcttaggaccattttctgtacttactactattattattacattatttgagtaataatgtagttccttcaatcattgtttcaagttggggattcaatatgtatatatttgactcttttaaagaatgctttatcgtatcagagaactattattgtcaacaaggtggtgatgtgcagatgtatgagagtatttatatgcctttggtatttttcaaggcagctgtaaaattgtgagtaaatgtacaacatagctctatgaacgttacttttctataatctttctttctgagcaaatcgcctttaaaaattcacaggtgattccaaagccccaagaaaggcactctgcaaaagctagaggaaagaaactgtaccatatagaatcaaataggacacgttgcagaatgcctttggattctttttttccctaccagtcttctctgcttccattttgttggaacttttttccctccttcttttgaggcaggttctcactctgttgctcgggctggagtacagtggcatgatcttggctcagtgcaacttctgtctcccaggtacaagctatcctctcacctcagcctcctgagtagctggtatcaaagccgtgcgccaccatgcccagctaatttttgtatttttttgtagagacgggattttgccgtattgcccaggctggtctcaaactcctgggctcaagccatccgcttgcctctacctcccaaagtgttgggattacaggtgtaagccactttatctggccttctgcttacattttaaaaatgggttttccttaagctgtataagattgcaatggcttttaccattacacgaagaattttggactctgaactcttgctaatcaaacaccaatgtctgctaatagccaaagtataatgtacaagaactaaccttctctaggtaaactgtaaaggaccttgccttcttccttctctaggtaaactgtaggagactttgcttctgtccctgctgcttgccagcacccttttgacagattgcagttacctatcactctgaggtggagttctctagctctgaattttctctatttattggaatcttcatgtgtctgattttcccacatgcagcagtttgagatataacccatgtataatgtctttatgtacttcgaatactctcagttttcactagcactttccttttcttatttatgcacttgtcacccaatttttttattatactttaagttttagggtacatgtgcacaatgtgcgggttagttacgtatgtatacatgtgccatgttggtgtgctgcacccgtcaactcgtcgtttaacattaggtatatctcctaatgctatccctccccactcccccgaccccacaacaagccccagtgtgtgatgttccccttcctgtgtccatgtgttctcattgttcaattcccatctatgagtgagaacatgcagtgtttggtttttttgtccttgtgatagtttgctgagaatgatggtttccagcttcatccatgtccctgcaaaggacatgaattcatcattttttatggctgcatagtattccatggtgtatatgtgccacattttcttaatccagtctatcattgatggacatttgggttgattccaagtctttgctattgtgaatagtgccacaataaacatacgtgtgcatgtgtctttatagcagcatgatttataatcctttgggtatatacccagtaatgggattgctgggtcaaatggtatttctagttcaagatccctgaggaattgccacactgacttccacaatggttgaactagtttacagtctcaccaacagtgtaaaagtgttcctatttctccacatcctctccagcacctgttgtttcctgactttttaatgatcgccattctaactgaactacaaaccactgctcaatgaaataaaagaggatacaaacaaatggaagaacattccatgctcatgggtaggaagaatcaatgtcgtgaaaatggccatacaaggtaatatatagattcaatgccatccccatcaagctaccaatgactttcttcacagaattggaaaaaactactttaaagttcatatggaatcgaaaaagagcccacattgccaagtcaatcctaaaccaaaagaacaaagctggaggcatcatgctacctgacttcaaactatactacaaggctacagtaaccaaaacagcatggtactggtaccaaaacagagatatagaccaatggaacagaacagagcccccagaaataatgctgcatatctacaaccatctgatctttgacaaacctgacaaaaacaagaaatggcgaaaggattccctatttagtaaatggtgctgggaaaactggctagccatatgtagaaagctgaaactggatcccttccttacaccttatacaaaaattaattcaagatggattaaagacttaaatgttagacctaaaaccataaaaaccctagaagaaaacctaggcaataccattcaggacataggcatgtgcaaggacttcatgtctaaaacaccaaaagcaatggcaacaaaagccaaaattgacaaatgggatctaatcaaactaaagagcctctgcacagcaaaagaaactaccatcagagtgaacaggcaacctacagaatgggagaaaattttttcaatctactcatctgacaaagggctaatatccagaatctacaatgaactcaaacaaatctacaagaaaaaaacaaacagcgccatcaacaagtgggcgaaggatatgaacagacacttctcaaaagaagacatttatgtagccaaaagacacatgaaaaaatactcatcatcactggccatcagagaaatgcaaatcataaccataatgagataccatttttttttttttaatggaaagaacctcctgtaaaatgaaggccttgatgactgggagggagcaggcagggaattaggtgatctacttgttgcagtattctggaggattgttggattatgccttctctctctgttccagcggcagaaggtttcctttttaaccttcttacctttgttttctaccctaaccccaagggggattctttgcttggtaggaaaatgtaatgtatgagcagggtggtgcaggaaaaggctgggctatatttcacactagttcatttaagctgaaactatgcaaaacacagacttatgccagcaagcatttttctgtggaaaatctagttgttttttcacctcctagaatggctcatgtttcagaggaagtgtgaccaagttcacatgcaacatggattatctgccttaatatttgagatcagttttttgtaatttggaaaaattttaaactacagaaaaaaaaatctgagtcacaaaaaagttgagagaagaatatggtgagcacacaatctatacccttcacctagattgactttttattaaaatttttaccatctttgtgctgtctttgtacacacacattttctacacacaaacacgtacacacataatttctttttatggttggaacacttaagtgtaaattgtacacatcacaatatttcagcatttatcttctgagactaagaacattctcctacataaccccccatgctattattgcacttaggagaattaatgatcatgtcaagtatcagctaatgtctattccatatttaaatatactagaactttcaagtatatttgcagatctggtgtgttcacctcccttcccaacctcaaatggctctttgcctattcttgtttctttctttttttgttttttgattgaagattatactgcagttagttatgtctcttttactctaaaacagaacagaaatattatattgtttttcgtgatattgacttttgaaatccaggcgagttatttggttgaaggtcctgcattctggacttgtctgattgtttcctcattgtctgattcaattcaggataaattctggggtataggttaggagctattctatactacccattgtatctcctcaggagggatcgtgtccaggtgttggtgatgctgtttgataagttggtgaagctggcatccacctgatatttccattgtaaaggctacattttgttgttatatgagtagataatttgtgggatgatatgtcaagatcacatggatattttctccagcaacctttcacctgatggttttagcatccatgatgattctttgctgaaccggttattctattgatgtttaaaaggtggcgatttttctaatcctataatttctcctgtatatattgtccaacattccttggtaaacagaaactttctttcctcttcccccttttctttgtcttttaatcttttttatcaacataaattactggatttgcatactttaattctgtattatactccattaccagtatgcccttacaggcaaagcgtctcataactggtcagtgggagggctgggcctcaagctggcttctcattctcagctttcaggtgctccttgcttttggcaaattagttgttccaggctcaccttggaccgttcctgcctttgacctggaaatcacttttccccccaacaagaagctctgattccttttatttaggaatggtgcttaggaacaaagctctgggcactggcttattgttaccagggtgttactgcttctctgacttttcagtgaaaagagctgggaaatatataaactttaaaaaattgaaagttcataataacatctccttttaaatttaacattacaggatttttctttgttttttaaattttgtgtctctctctgcgaaaattttggttgctacatacattaatatgtttatgggcctttatttgatagaattggaagacctctgaaggtataagaaagagcaaaaatgtttaaaaaataaatgaataaataggctgagcgtggtggcttacgcctgtaatcccagcactttgggatgccgaggcaggcggatcacctgagatcaggagttcgagaccagcctggccaacatggtgaaaccccatctctactaaaaatacaaaaaaattagccaggcatggtggccgtaacctgtaatcctagctactcgggaggctgaggcaagagaatcgcttgaacccaggagctggaggctgcagtgagccaagatcacaccattgcactccagcttgggtgacagagcaagactctgtctcaaaaataaaataaaataaaataaataaaataaaataataaaataaattggaataccttctgatgtgctttgtgttctattttatcccccttcccattaatagacatgctttttctttttttaaacatataatatccaaaaatacagccttacatttatcagataacaatgtgtaatatatattttacatatatagtataacataatgtgtgtattttctcaaaagcttgtgacagatttgaaaggccgactttgttttcttggttttatcgatgagataactgaagctcttggtatttaagcagtttgtagctaaaaggtgctcaggcctgtcaggttttaaattccttggccttttcagtgttctgagctgcctcttctcataatctcacagtcctcttttgacattttcttttagattttgtattatcttaaatctcagtgttttactgtgacacagaaaatgttagatggccttaatcctttgccctataacaaaccttttagttgcaaaaactgtgaacatctcagttatttttttcctttcatttctagttggcgtgtagtaattgtacatattagatacagagtgttagttcagtacatgtatataatgtgtaataatcaaatgagggttttatatcaatttgttgactaaatttagttaagtgtactaagaagcatttttacgaaagcccgggaatagaagctgtattttgaattctgttactcaccttaacaggctgaataatggccacccaaagagatctattcctaatccctggaatttgtaaatgttaccttatttggaaaaagggtctttgcagatgtcattaaatcaagaattttgagatgaagatattactctggattgtttaggtgggctctaaattccatcacaaatgtcattagaagatagaggcaaagggagagttgacacagaaacagggaagaggaagagacggggtgaccacagaagtagaggttggagcgttgcagccataaaccgaggaatgcctggagtcaccagatgctggaagaggcaagaggggattttccgcaagagcctttggagagtctgtggccgtactgaactcttgatttagggcttctcatccctagaactgtgatagcataaattttgttgtgttattatgggaatttgttttgtttatttatttatacttatattttattttatttttagacaaagggtcttgctctgttgcccaggctgatctcaaattcctaggctcaggctatcctcctgctttagcttctggagtagcagggattacaggcatgtgccactgaaatcaggtatttatatttctcttttttttttttttggagatggagtcttgctctgttgcccaggctggggtgcagtggcacgatctcagatcattgcaacctctgcctcctagttcaagtgattctcctgcctcagcctcctgagtagctgggattacaggggtccgccaccgtgccctactaatttttgtatttttagtagagacagtgttttaccatgttggccaggctggtctcgaacttctgatctcaagcagcccacctgccttggcctcccaaagtgctgggattataggtgtgagccaccgcactcagccccagctatttatattttctaattgacaaaagttgaatatatttatgatatgcaacatgatgttttgaaatatgtatacattgtagaatggctaaagcaagctaattagcatgtccattacctgatatacttatttctttttgtattgagaacacttaaaatctactcttagcaattttcaagtatacaatatatgattattaagtatagtcaatatgttgtacaataggtctcttgagcttactcctctaactaaaattttatattgttggaccaacatcactccagggcctttccccatactgtccccttcccccaagggaggccctggcaaccaccagtctgctctctgtttctatgagtttgacttttttagattccatgtgtaagtgagatcatgtagtatttgtctttctgtgcctggcttatttcacttaacatattgtccttcaggttcatccatattgtcacaagtgagaggattgcctttttaaaggcttaatagtattccattgtgtgcatgtatcacattttcttcatccgttcatctgtaatgggcacttgagttgattgcatatcttggctatggtgaataatgctgcagtgaacctgtaagtgcagatgcctcttcagtgtaccagttttattttcctgttgtaatttgtcacagcagccccaggaaatgaatacactcatgtagctgttttttccgggacgttagaaagcttatagttgtgaagaattttctttgccaagggccagcctgatccggaaaaaaacctttttctagtggtagttttggcttgatccagacattttccagtcagtgacccctgttgtcaactgtctctgtgagggcatggctgcttcctaaagacttcacctatgtgtgggctgggatggaactctgggcagggaatttaaatgcctgtgcacttacggccttaacacctccagcttgctgagagagggatcctgttttctgtagcactcttgtttctagtggaatgatgcatgagtgccttgggtacattggtcagccttccatgttggagcttctctctgaacactctccagttattcagcagctctttgggaacctcatctctgtgcttggcacagttgtgtatattgaggataacatggtgaatggaaaaaaaaacacagtgcttgttgccctcttggagcttctaatttaatggagcagacaggtattcatcagggagcctgaaataaatgtgaattgatgtagtgatactgctatgaaagagagagatggtgtgagtaacaccaaataagggcttcatttggactgggaaattgggaagactttccatgagtgacatctgagttgcaggagttggaggtgggagtacagaggacagagagttgcaggcagagggaacagcagttgtaaaggtcctgtgttttgaaatgcagaggctggcttgcctggagcatggaagtgcagggcatggtggtgggagaggtgggctgtgcccagactgtgtagggacttgtacctcatattaaggattggggttctttatcttgagagtgctggagagccatcaaaggctaatttgaatgaggggattggcacgatttgcctgtgtaacagcatacttgctgttaatactctttgttgtgtttagacctccctgcattccactgttttaatctacttaatgatggatttaatcaatttatgaagttccgtaagggagatgagaggagactttgagtgtctagggctggaagccttttgtttttggtgggccttaatgaatgaagagggcttgtcccagcatttgaggaggaggtgggactctaaggacttctcagggcctagaccttactgtaccacgtaactgaactgtaccttttagatttggttgtgattattattttttcattcaaaatgagaataaagctttgtatatcttctaagtataatttttatacattgttcatacaacttacctgttaagagcaaggtgaaaattcttcctttgatctttgcacacgttctatttgttgttgttactgactgttatctcgttaaagggagtcaaggctaaagaactgtcttcacttgtgactgaccttctcacctgggaagaccacatgggactagaataagctggaggtgttgagtgcctgacttactgagggttacgggtaccaagcactgtctgtgaggtgggcaccgggtggctcagggatccagttggcttgctagggtcacaaaggaatttaccacacatatgtctttcatctccagtgtggaacctctttgcactccatgtgcaaacagaagttggcacttcttttggaaaagggaatgttagatatctcagtttgctagtgatgaagctgacagattcaccataccgccttgtcagccccctgccactttgttgtaccaaaatgacagcaatataatcaaacccttaatttttttttttttttttgagacagagtctcaggctggagcacagtgggatgatctcagctcactgcaacctcccttactgggctcaagcaattctcctgcttcagcctccccagtagctgcgattataggcatgcaccaccacacccggctaatttttgtatttttagtaaagacggggtctccccatgttggtcaggcttgtctggaattcctgacctcaagtgatccacctgcctcagccctcccaaagtgctggaattacagacgtgagccactatgcccggcctcagataattcctttctgttcagagtaaagagattgagtcctgggacagttcctgttttgatgcatgaagaataaaggcatcaaagaagaaaagatgaaaaagaaatctaaagtttagaaatatgtggcctatataaataaagcatgttctctgcctttcctatgtttgctattctttttctgaggaaagaatatatggccttttaaagatttcacaaggtgaaggaggatataataatgttgatgataaaatcatttttatatacctgttttcattttgtgaggctgtcgtgatgaaatccaggccttggccacatgctgggagttaatgaggtttacaattggcaatacttaaagaatattagggtaatatatttaaacatcagcagttcacagcctgaagtgctcatcatctgtcaagttataatacagaatcaataaggggaggtctttcaatttgctaatgaggaaagttttctatactattagggtagacatagatttcagataaacatctaaaattcataaactatagaatttggcgaaagcatctcttcgattaaaaagaaaccttgataataatcaatagcagtcacctgagaagcttagattttcttcttagtcatcagactcccaaattaatctaccaaaacaaaaagcctcattaacagctctcattgaatcagtgttattttttcctttctctcaaggtgtctgattaaccccctttctttttgcattactcactttgtgttaatatttgatgtctgaaatcatggggcaggggaggggttgtgcaatgtggtggctagacactgtctacaagcagtaaattaaaaagaatttttaaaaaggtttgtattatgttgctgatgtattagaaaatctctaggaatgtcaggtgcctgggttttctttttctttttaatttcagaaagggttgattgctgattgggtgctgattttgcttctcattcatatgtacagatagcgctcctcctcctcttacccagctcctcttgcttaccaatccaagccttcttttggagagttttattgaaaaggaaaggtgagaaataaggccataactggagggaaaagggaggttgaaggagggtcttttctaggtgaatgccaatgggaaagactcacttgagagtagataagattgacaatgtaggagagaaaggaaagacattctggagcattgtctaggaggttggcctcttgtaagagcatggagagttcatccagaacacctgacctcaaagtgtagccagtggactcctggaagtccctgagaacttttcagaagtccaggaggtcaaaactatttgcacagtagtaaaagcatgatctacctttttcaccatgttgatatttgagctgaggtttctaaaagcaatagtgcgtaaaacttctggtgtcttaacagcaaataaggttttgtctgaacattgatgtccctccaaaattcatgttgaaacctaacctgcatggtgatagtgtgaagaggtagaactttggggaggtgattaggtcatgagggctctgctctcacagataggattagtacctttgtgaaggaggcttgagggaatctgtttgccccttctgccatgtgaggatggagcaagaaggcaccatctatgaaggagaaagcttttaccagacaccagacctgctgctgccttgatcttggacttcccaactcctagaactgtgagcagtaaattctgttacttataaattaccaagtactaggatattttgttataataacctgaacagaataagacagacaccaatccaaacagagtaagcaatcattattttcttcattacacattcatcatcttcgtcatactgattctgcttcagaatgtccttgaagaagcagtcaaaatcattgattttattaaatcttgctcttgattacacaagattacattttaaaattctgagtaattaaatggcaagtatgcataaagaactctttaatgtagtatggtggttgtctgaggaaaagtacttgagcagttgttttgaattgctagttgagctagtcttctactagaggatacgggataccattcttatttgaaagaatgacttttttgaaagatttaaaattttcatgtttcatcttcctaatacttaaagactttctgatgtcattggtggtgatgttaatgaatgtggcttttaaatatagtttaatgaagtttcctaacatttggatgatctgcataatatagagaaacagtattttcccagttgaccggtgtgcatggtgttacaaaattatgcatgggtaacagatagtttgaaaagtgctcatagacccatgaattttaaggtaacagagaggagaaaagttcactgatacagtttcagattgcacattgccactagtctttaagaaactttacttgttgggatttggtgttgtatcaaagaagaacatccccagttatctaaaaaggccattaaaatacttctttcttttctaactatgaatctgtgtgaggctgaaatcctttcatattcttcaaccaaaacaacatattacagcagattgaatgcagctgttttccattaaagtcagacatttaagagatttgtaaagatataaaactgcttttctcactaaattttctgttttagaaaatatagttctttggctgggtgtgctggctcatgcctgtaatcccagcactttgggaggctgaggcgggaggatcgcttgaggccaggagtttgagaccagcctggctaacatagcgagaccctgtctctacaattaaaaaaaaaaaggtatagttctttttcatacaaatatatttatattaccatgtaatagagttactttttaatgaaataaatattttctaaatttcccaattttaatttctagtatggtaaatatgatagctataatccacataaataaaagctctgtggggacctcaacaatttataactgtgttaagaggtcctgagacctaaaatttttgagaaatgctgagctagaagagaagatagagactagagtagagagagagtgtagatgtagtggtgagatttggggacaggttgtcttttggtttctttgatttttttccaggaaatagatgagatggaggtgcaggttgaggtattggcagtttgtggagagagattcgtatactacatagttatctagaagtgggagggtgaatgtgtgaggaacagcatgatggctgggcaggacccacttgagtgcttacctgaggattagtggtcatgaaatttaaagtgagaccagttagtgtggctgtatgtttttcagataaggccagtcgttcaggcccaggtagtaagggttggatgtagctagggttgaggtcatggccactgaataatccagagtaggtgaggttccagggaggtaggtgcaggggcgtgcaagggagtaattatgatgatagactatagatttagtctgggcaaggagcaaagagaggacattgggtaggacgcaatgagggatggtgagaaggtgacatgcttaatgaattgtgagtttcagcatggttgaaggttgttgatcaattgggatgtgtttatgagggactgaacaggaagactagaatatagtggccataaagtgagatgcatgaaattgagaaaaaggagtttttggtaatggcaagtaaagtctagagtgtgaccatgggagtgagtggctgaggaaggatgaaagaaaggccatcggaggagatgagttaatgtaattggaggccttagtgtttgaaggatcagtatattgaaggataagtatgttgaaaatattgagaactaagatagaagttgagagagtgtcatcgagccaagagctaaaatacggggtgagaggggaatccagggttattagatcacagaaacaagaggtatgctgagtggtatagtcagatgatgggaatatttgaatgggtgggggttaggaaggagaatatgggatctacccaacctgcttataggcctggtgcaacctaggactgcaagaggaaagctcatccctacacgtaagaggggtctacagtggaagcattgtcctcaagggacagccaggtattggttagagcaagaaagtgaagagatattttatggaaggattgaggaggagattttggtcactatacactgaattctagagaacacagttggagggtttctgggagatggtgacagaataggcaaagtccagggcctctcagggattagacgtgagtggtaaagggtaacctgggtgtccgggactgttggtcaaggctgacattcacggaataaagagaagaatgcagttagtcctggtagactccagattgtgcctgctggttgatagggatctttgcagagaggcaaggaagcttggagaggggcaacttttattacttaaagaacttttaaaataaaaatattttgtgagcagtagctctgctgtttttttttttttttttttcctagatggttggaccaaaggatgaaggaaatgaatagttactgagcatatatagggttccatatctggtgctaacaatttccacctgttttcttatttaatcttcatacaagaccttaaaataaatattttcactgcccatattataaagggaggtggagaattagagaggttaaataatttgctcaaagtcatatagctaatgagtggtggaactagcatttcgacccagttctttctggcttgtgctcaatctgctctaccatgaaactttctatgcatagagaagaatatttaaaattgagctttgcacgagaactttgcttatgtctttgcttagaagttctgatggcctttgcaagattctttgcccttgagactagtcatttagccctcatatttggccaacataaggtgaatataaaacctccatgagaggctcttcgtcacccatacccacacttatgaaaaactggccttgcttacctcttactctttttttttaaactgaggagtagtttttggaacacttttccctttttactgttcttatattgaaccttgagttaccattgcgtatcatattctcagaataagaataagtatcgttactgggccaacttaataccaacagttcttccatattcttcccagcatatgatgctgcttagtgaatgcctgaaagagcaaatactgttctttcctctttctttgtttggtgttagtgtagaaagataagctggattaattgtttgatttgcttgatctagactgtaggtgtttaaaacataaatctaaaattttaaaggaaaggaaatcaaatgtaagctctgtttcctagctacttgagaatctgcttctttaccactgtcagaattagaggtacaggatgtggagttgcttaaattaaaacagtcttgtactgagctatgaggaattcatgaagcaaaactgctatagtttgaatgtgtcctgaaagttcatgtgttggaaacttagtctattgcaacggtgttgggaagtggggacctttaagagatgaacatattaatgcttttatcgcaggcatgtggtatgtgggagtgggttctttatctcaggagtgggtttcttatcaaaggatgagttggtcctcttccccgtctctttcccttgcccatgtgatgccttccatcatgggacaacccagcaagaaagccctcaatgtcagtgccttgatcttggacttccaaatcccacaacagtgaggaagtaaatttttaaaatgaattactcagtctcaggtaattctgttctagaagcataaaatggactaagacaaaaatgttaggagatatagtacccaactttcccattgattgtggcataattgtgccatgattgtcagtgagttgcttcctagtaaatacagtgagattcagagattttaatgaaggtttttgagagtaaagtaagacttctcttgcaatctgatgtaaaggttttgagatcttcagtctggaataagcaaaaggtgaaagaagataactgatgaaagaacttaattgtcagaaattttagagtaacttagtctgaaataaatgatatatggtaaggtaaaatggccttctgctacaaatctgagacaaccttgatacttgaaaaatatagattaatttcagatttggtaactcatttaacaaatatatattgacaccaactatgtgccaggcactgttctaaacagtgtgcttttatatagcaaacagataatgtaaacaaaagatatatatagatgatatagaggtaggttgttatatttattaaagtgctatggtcgataaagtggtcagggaagatctctctgaaaagtgacatttgggcaaagacttgaatgaaggagtaagccatgggagaccctagggattgagccttctcaatagagaagaatagaggggataacaggtgcaaagagcctgagaggggagggtgcttggcatgtttgagaagcagcaaagagaccagctagtagagagggttgataggagagtgaaagaagtataaaatgtatcccagggccaggttatgtagatgttgtagaattgtattttgagagtagtagaagtcattggagggttttgagcatgggaatagcatgatctgcattacattttgaaaggttttgcctggctgatttgagagaatgggatgaagtgggtgacagtggaagaaagggaaattaggactgtgctgcagtaatctgtgtaaaaggtgatggcaagactagagttgaatggtaagaagtggttggatttgggattttattgatggattagatatgaaatatggggaatggcgatataagcaaatgagatagggaatgttgggggaagagtaggtttggaagcaaaattaagagttctttaggacattagaatattgacctccctgttaaacatgcaattagagaggcaggctgtgagatgtatgcttagagatgagagtcaatgtaattacttatttggtctgagccaattctcagcataaggagttggtgctgttgtaacttcagtgagttgtgttttgtagggtgggggaattggggtcttttttgtattgattattatgaacttacaggtttttatatgtttgtgttttaattgcaatatctcatctttggccagtaggaacccttttatattatctcttttgtcctttttgatatgatccattgatttttggtagcttccttgtttctggcaaaataggttgttattttatatatttcctgccctgaacctggaatcagttgctctgcttgaatctcccccttttttaattattattatattttaagttctgggatacatgtgcagaacgtgcaggtttattacataggtatacatgtgccatggtggtttgctgcacccatcaacccagcatctacattaggtatttctcctaatgctatccctccccttgctccccaccccccgacaggccccagtgtgtgatgtttccctccttgtgcgcatatgttctcattgttcgactaccacttatgagtgcgaacatgcggtgtttggtttgctgttcctatgttagtttgctgagaatggtggtttccatcttcatccatgtccctgcaaaggacatgaactcattctttcttgtggctgcatagtattctatggtgtatatatgccacattttctttatccagtctgtcattgacgagcatttaggttggttccaagtctgctattgtgaatagtactgccataaacatacgtgtgcatgtgtttttatagcagaatgatttgtaatcctttgggtatatacccagtaatgagattgctaggtcaaatggtatttctagttctagattcttgaggaatcaccacactgacttccacaatggttgaagtgatttacactcccaccagcaatgtaaaagcgttcctatttctccacatcctctccagcatctgttgtttcctgacttttaataatctccattctaactggcgtgagatggtatctcactgtggtgttgatttccatttctctaatgaccagtgatgatgagctttttttcatatgtttgttggatgataaatgtctttttttcagaagtgtctgttcatatctttacccactttttgatggggttgtttttatcttgtaaatatatttaagttccttgtagattctggatgttagtcctttgtcagatggataaattgcaaaatttttctcccattctgtaggttgcctgttcactctgatgatagtttctttcgctgtgcagaagctctttagtttaattagatcccatttgtcaattttggcttttgttgccattgcttttggtattttaatcatgaagtctttgcatatgcctatgtctgaatggtattgcctaggttttcttctagggtttttatggttttatatcttacatttaaatctttaccatcctgagttaatttttgtatacagtgtaaggaagggatccagtttcagttttctgcatatggttagccagttttcccaacaccatttattaaatagagaatcctttccccgtttcttgtttttgtcaggtttgtcaaagatcagatggttgtagatgtgtggtgttatttctgaggcttctattctgtcccattggtctatatatctgttttggtactagtaccatgctgttttggttactgcagccttatagtgtagtttgaagtcaggtagcatgatgcctccagctttgttcttgttgcttaggattgtgttggctatacgggctcttttttgtttccatgtgaaatttaaagtagttttttctaattctgtgaaggaagtcaatggtagtttgatgggaatagcattgaatctataaattactttggtcagtgtggccattttcacgatattgattcttcctatccatgggcatggaatgtttttccatttgtttgtgtcctctcttattttcttgagcagcggtttgtagttctccttgaagaggtccttcacatcccttgtaagttgtattcctaggtattttattctttttgtagcaattgtgaatgggagtttgctcatgatctggctctctgtcttttattggtgtataggcatgtttgtgatttttgcacaagaattttgtatcctgagacattgctgaagttgcttatcagcttaaggaggttttgggctgagacgatggggttttctaaatatgcaatcatgtcatgtgcaaacagagatcatttgacttcctctcttccatttaaataccctttatttctttctcttgcctgattgccctggccagaacttccaatactattttgaataggagtggtgagagagggcatccttgtcttgtgctggttttcaaagggaatgcttccagtttttgcccatttagtatgatattggctgtccgtttgtcgtaaatagctcttattctttttgagatacgttccatgaatacctggtttattgagtgtttttaccatgaagggatgttgaattttatcaaaggccttttctgcatctattgagctaatcatgtggtttttgtcattggttctgtttatgtgatgaattacgtttattgattatcacgtatgttgaaccagccttgcatcccagggatgaagccgacttgattatagtagataagctttttaatgtgcagctggatttggtttgccagtattttattgaggattttcatataaatgttcatcagggatattggcctgcaattttctttttttgttgtgtctctgccagattttggtattaggatgatgctagcctcataaaatgagttagggaggagtccctctttttctattgtttggaatagtttcagaaggaatggtaccagctcctctttgtacctctggtagaatttggctgtgaatccatctggtcctggactttttttggttagtaggctattaattactgcctcaatttcagaacttgttattgatctattcagggattcaacttcttcctaatttagtcttgggaggatgtatgtgtccaggaatttatccatttcttctagattttctagtttatttgtgtggaagtgtttataatattctctgatggtagtttgtatttctgtgggatcagtggtgatctcccctttttcattttttattgcatctatttgattcttctctcttttcttctttattagtctggctagtggtctatctatttggttaatcttttcaaaaaaccagctcctggattcattgattttttttgaagggtattttgtgtctgtgtctccttcagttctgctctgatcttagttatttcttgtcttctgctagctttcgaatgtgtttgctcttgcttctctagttcttttaattgtgatggagtgtcaattttagatctttcccgccttttcctatgggcatttagtgctataaatttccctctaaacactgctttagctgtgccccagagattctggtacgttgtgtctttgttctcatttgtttcaaagaacttatttatttctgccttaattttgttatttacccagtagtcattcaggagcaggttgttcagtttccatgtagttgtgtggttttgagtgaatttcttgatcctgagttctactttgattgcactgtggtctgagagactgttttgatttccattcttttacatttgctgaggagtgttttacttccaattatgtggtcgattttagaataagtgctatgtggtgctgagaagaaggtatattcttttgatttggggtggagagttctatagctgtctattagttctgcttggtacagagctgacttcaagttctgaatatccttgttaattttctgtctctttgatctgtctaatatggacagtggggtgttaaagtctcccactattattgtgtgggagtctgagtctctttgtaggtctctaagaacttgctttatgaatctgggtactcctgtatgggctccatatgtatttaggatagctagctcttcttgtcggattgatccctttatcattatataatgcccttctttgtctttttggatctctgttggtttaaagtctgttttatcagagactaggattgcaccccctgccttttttttgctttccatttgcttggcaaatattcctccatccctttattttgagcctgtgtgtctttgcatgtgagatgggtcacctgaatatagcacaccgacgggtcttgactctttatcccatttgccagtctgtgcctttgaattggggcatttagcccgtttaaggttaatattgttatgtgtgaatttgatcctgtcattatgatgcttgccatttattttgcccattagttgatgcagtttcttcatagtgtcgatggtttttacattttggtttgtttttgcagtggctagtaccagtttttcctttctatatttagtgcttccttcaggagttcttgtaaggccggcctggtggtgacgatatccctcagaatttgcttgtctgtaaagtattttatttctccttcacttatgaagcttagtttggctggatatgaaattctgggttgaaaattattttctttaagaatgttgaatattggcccctactctcttctggcttttaaggtttctgcagagagattcactgttagtctgatgggcttccctttgtgggtaatccgacctttctttctggagcccttctttttagtaggcagttgtatttatagaccacaatctggggattaggtatgtttccttcttttgagttgtcactactttgagaccttttgtttttctcttctctttatttattattattattttgagttagggttttgccctgttgtccaggctgaagtgtagtggtacaatcatggctcaatgcagcctcaaccgcctgggctcaagtggtcctcctgcctcagcctccggagttgctgggaccacaagcacacaccaccatggctggctaaatttttaaattttttgtaaagatggggtttccctgtgtttcccaggctggtcttaaacttctgggctcaaatgatcccgccacattggcctcccaaagtgctggaactacaagtgtgagctaccgcacctagctgatgccttttcaattcattagagaaaaaattttccattcatgctgatatttcaaatgtaaagataaattgacacagttaaatccaaagtaattttattgttttgatttttctatctccgctctttcattgaaaatcctggttaccagcaacattcacagtattacatatttgccatgtgtaggatatatccaaaatagtaacacctttattgctgccaacaattagatactgaatgaagtttaagatttctttttagttctgttgtacttagactgtgttccacaaagtatatatagttaaaatactgtattctaaagttattggaaagaattcatttaattctgtgtggttttgccaccaacttaatatatatatagggaggttcattttttcagtttattttcaatttttagggattgtcttttttattttcaacttaatttaatttttgagtatgtaaaacatatgtttcccaaatcaaaactatacaacagaaggaaggtatgctcagggaagtctgtcttaacatgcccgtccttttcaccctgactcttccttcctttttataggtcattcttttttgtattagttttttggtttctcctcccacagggtattttttccccaaatataagtaaatttatatgtgtatttgtgttcatctttccttccccattcgtatccaaaaggcagctctatcaactctatatactatatatacgctcctttgagggagtgtgtatgtgtgtgtatatatgtagtatatgtgcatgtgtactagggtttgctcatgaaacagatccaatagggtatatatacacacacatatgtgggtatatatgtatatttatataaagagagacaaatacacatgtaaatgtacatgtaaataataaatgaagacatttattataaggacttgtctcacatgactgtggaggctgagaattcccagtatcagctgtctgcaagctggagatctgggaaagccaatggtgtaattcagtttgagtctaaagacctgagaaccagggagccaatggtgtacttcccagtctgagagcaggagtagatccatgttccagctctaacactcaggtggagaaagcaagttatccctttctccacctttttggtttattcaggacctcagtggattggatgttgcctaccacattgggagggcaatctgctttacccagactgcctatttacatgcaaatctcatccagaaacacccatacagacacactcagaaataatgtttaatctgactaccacatgttgctatcgaggtaacacataaaattaaccatcacagcatttgtataatgtttgtctccagggaagacagacagacagacagacatgcgcacacacacatacagcacacacacacagttgcttttatctcttagtcgtgtgttttgaagataattctataaatatgtaaagaaatcttcctcattcctttttatggctgcatagtgtaagcatatacatttataattatttttccagtttattccaatatctgttaaagtttacagaccagtgcttttaaggtttacattatttggctcatcaggatcttttcccaaaccattttagggctgttgtcaaagagcaatggacaaaccctaatgatgagatgaactttactctcagaataccgtctcacttgctcctatgttctgcattccctgcaccaaacacttcctatgctgtctgcttccctgtccactcatacaggaaagggcttcgatgttatagagtcactcttattgctcctgctaactgctgtcctgataacaatgggtcttttgcatgggaaaagcattatagagtgaaaggatcactgatagcagtcaaaaaaacacattttactatgtcttttaaaatctgtgggatcttagacaagtgacctatcccatgtgagcctgttttctcatctgattaaatggggttgttacttgctcggtgaatgcttgtgttgtcacccagtgaaataaactccagggaagtttagttagctttcccttctcaatttacctgcagatactgtttcaacattcctctctcctctcattccttccctctcttattcctttcctcacctcctacttttcttccccaattcctggcatctttcctggtggcaaacagaccttccatgtgaagaaaaactcctcataattgcactttcctcttcagattctgccccatttctcttctttctgcaacactcatcaaaagcactgtctgttctggcccttacaattaattcctctgcccattgattcttttttgagatggagccttgctctgttagccaggctggagtgcagtggcatgatctcagctcactgcaacctccgcctcccgggttcaagcgattcttctgcctcagcctcctgggtagctggaataacaggagcatggcaccatgcccagataatttttgtatttttagtagagacagggtttcaccatgttgtccaggctggtctcaaactcctagcctcaagtgatccacccacctctgcctcccaaagtgctgggattacaggtgtgacccaccgtgcccagcctgcccattcattcttgaatccactctccccaagtttcctctgctgctctactatgctctaatctgcccttgttacgatcttcaaagcagaatccaatgataatattagttctcaggttaacacacttgcctcttacccctttttgcaatactcacttcacgttcattataccatgttcccttgcatccctcagacctcactggttctcacatctctagtttttcctaactactttttgggtgatcttgtcccatctcatggtgctaaatacttcataacttctacttttatgtcttcagccctctcctccctgctgcttctgtgagagtccatttgcgtacctaataggcccctcaaatgtcacatgtcctgacctaggctcctgagccttctctctccaagcattctttcctattgcttgctcagtagattctgtcttgcagttgctcaggccccaaactctagggacatccttgcttccttcttttctttcacacctcccttcaaatcttacatccagtctagttggcctcactatcagtatatgtatcgtcagtactccctctgcccaatttcttggaaaggtgacagtagcagcaactgctgttcaggcttcatgataccagcaaggataatacaaaaaaaggaagatgctggaaagttgaccaagaaagagacccagtaaataagtctggactcaagtccccaaataaaaaaagattcaaaggcaaactctaagacaagctctgtttttggtcttgtttcataaagtcatatagaaaaaaaatataaagacgtttccaactgtagttcataactgctgtattcatctgtgaaggattgatgacttgaggctctctgaccagggtgtccaataagaagtgcttagtaaagactcatcaggttggtttccaacacacagcccacattcagtctatacccaaaatagcaaagatggtgctacaccaactgctagtgaagatgcttcaaatgggcagtaagatagtaaatgtacacacccctgcaggtctgcttcacttttattttctttccaagtacagtttcaagaacagtttattaagtaaagcaaaaaaatagaaaagaaaatagtacgactcaatcagttcactccatatcaatgcaaattcagatgcaatgcaactggtgattggtgtgtggcttccagttggccagttctgtagaatcattcccactgagtgattcaacacccaatgatgtgaccctgcattttacttgatttactttttaaaaattctgctcagcattatggaggatgttactccataaccagacgcaggcatgaccatctctcacctggattattgtaataacttctcaccaaatcttcttgtgcagccagagtgattctgttaaaatctgagttggattatgtcactctctggctcacaatcctttatggctctccattttcactcagagtaaaagccaaagcccttctcgtggccaacaaggccttgtggtactctctccttacgttacctccccagcccctcacttcatctgctgctctttcccttaattactttgttctggtgacattggtcttcttgccgcaccttgaacacaccgtgcttgccgtgcttggtcccacctagaggccttgtacttcctcttccttctgtaaggcacttcccctaagaatctcactcacttcctttagggctttctcatggtggttatcttgtataatacatgtgggtttcattaattttttttttgtctcctcctctttcccacacacttgactgtaagctccacgaaagcagggatttttgtctgtttagttcactgctgagtcagcagatcctagaacgtggctggcacatagtagcactccataagtatttgtctaatttgaatggattgaacacataatgttccatgcacatgtgaggtattatccagaagaggtgggattcttagatttctctctatggttccttctttgaatttttacatgttaaaatctctgctgtcatttttctcccaggaccactgtaatattttatggagcctctttttttttttttgtaacaggtctaaaacttttagcaaatcttttttcttctcctgtcttcacttttctcctccccaagtagactgcttccacagtattttggggttgttctagtttttgtaaactttttctgaggaattctttgtgttgaaaaaaccacctatatataggattagattctcatatttttgagaatcctgccccattcttcagcatccttacaagggactggactcatgtcccaaagtgttggtggattccaaccattcggcatgtcctcgctcatttatgtcttatggtctggtaagttaactgccttctgccgtagagttaagtaaagacagccatgtcgctgctcttttagtgaattttggctgttcacattattcttcaagttatttagaatataactttttagattcactgaggatattgcatctacttgggcaaaaccctgaaagcccctaaggatttagctgaacatgtaattcatattgaaacccaccttctcttgccttatgattttctgattcagtactttcttctagagttttttttctttttttgagacagagtctcactttatcacccaggctggagtgcagtggtgtgatctcagctcactgcaacctccgcctcctgggttcaaacaattctcctgcctcactcagcctcctgattagctgggatcacaggcgtgtgtcaccacacctggctaatttttatatttttggtagagatggggttcaccatgttggctaggttagtctcgaactcctgatctcagatgatccgcccgccttagcctcccaaggtgctgggattacaggcgtgagccaccatgcctggcctagagtttttttttttttttttgctaagttaagaaataaaacagtaaccaatttctgaaggaaaaagcattaaaatattgatgttgcttttctgcaatacttataccaagaaaatgcaagagagtctcaaaagttgtgtagcttaatttcctcttgcaaaaatataaagtactcccaacagtttctaattttgatgatcttttacaattactgttctgtgttgtaatggcctgcgttttaaaaaagcttgaaattgttaggagacctttagacatagaacttggtaagaagtgcagagataggatggcatagaatggggaaacatgccagatcaattgggacagaaaatttttcttaactgcttttcagcatttatataggttcttccatgagcaaaataaaatatgaacctaaatagaatgggctcaaacagtcataataaactcctttggttattttcagaaaatctatattcacaggtggcctgtgttaataggtgaattcattgtattttggtgtggctatttgtataacaaaacatgactaaatatgaaagatgtgtatgtctttttctttaccagatcttgcgccagtttttaagcaagcaaattatgttcatgtagtaaaattttaatctgtattgggaatagaggtgggaatagtagtattctgtttactgtggatttggagtaaaatctagaaatgctacttaatcagcatattgtaagcagaaattactttttgtcttttttacaaaaaatggacatgagagctcactccgttgcccaggctggtctcaaactcctgggctcaagcgaccctcccacgttagccttccgagcagctgagaacagaggcacgtgcaattgtgcccagctttagaaatcactttttattttaattcttatttgtaacatttcataaggtattaggctacttttcccagtcactaccgtttatacaatttagttttaatttcttaaaattttatttgaaattgtagaatgtcttaatcattcagaatgtgaattgtcatggaggtgtcagagatgcaatttaatttctcctgatagcagtatatcttgaaaatattttgcttaaagatttatttatccttgctgtcaatttgtttcttataatttgcctcatagaaacattcattcaaaacagagtgctgaaaccaaaatggaatatacaattaaaaccaaataatttttttcctgctaactacttcccagcccccagactgaactcgtgattgaggttctatttacttttgcaaacagatgaatatttttggagcagtggaggtaggagcatggtacctaagtccaagttgcaccattttgtgtggctgtttctttcttattttgcattaggaaacaggtgcaagaaaaagaaaaaaaattccacttcatcatcgtagtagtatctggaatctcattccccataaccaagaagaactcatttattcttggccaccctctctcttttgttattctaagttgactgtggacagctttgatgctgcccctgaacttctatgagtccccctgcccttgctgccaggattttagaatctacccttctcctatactaggagtggtaagaaaataaattcgggtagtagtgccatttgatgattcattttctttttatatgtgtcctttaaaattaacattgacaatttggagcccctttgtaatgtggatgatagaggaaaagctgtgattgcttataggctgaatttaggttcatctgaaattatgatgtatctcagaaacatcataattccttggtttgggagtggtaataggattaggactgttgagactgtagaaaaagcacattgtttttcttagatgtggatgcttgtttggggtggtgtaggctgatggagagtatttgagacagcggctactctttcttttttttttttttttcccagctgctactctcaatgcagacattgctctagaacaccctgtataaactatatattgccacatctaaaccatatagtacttcattaaattttgaacatttaaaatattttaactatatgagacaactatgtggtgcatgtgttaattagcttgattgtgataatcatttttcaatgtatatgtatataaaaataacacattgtacactttaaatgtatacaatttttgtcaattatatgtcaataaagctgtaaaaaaattttagataatgcacaatggatcccatactttgtatttattcctatataccttgatttttaagcaccttattctttaagttcattttgttgccgaatttgagtgcattctccctagtccttattaaagagggtacaataatctttcatctgagatacaattgatggaattattttataggatcgagtacattttaaagcctaatctttctttgcttacattgaatattatgaccataatattatgaaatgttattctgaaacttggtctgagttctcttacgtcatcagaaatttctgcaaattcaatctgaaatcaacacatgggcactttttttttcttttttatggtcttaaatacagaaaatcataatctattttaagcttagataaatgatggaacacttgtttacatgggtaaaatgactctatctaagtagtatattgaagttcatgttaatgtttgctatttaatgacacctaatgatattcagtgaagggttatgctaaaccggagagaaaatgtgttacccaggcaactgcctctggcagactagagattcgggcatatggctctatagtacacattatttcagcatctttaagcataaagaaccacacatgtaattgactgtgaaaaattactgctcagttactgtattgtatggtcataatagaagtaaatgaatacgtcattgttgttggaacaagtctgttgggaatcacttgtagactctactatttaagaagcaaaaatacaataagaagaaaatagctggtttaattaacatgtaaaaattgggttaatttgaattcagctggcacagcagatattaatgttggcttttttttgtgatattctggctcaagcctgggtatttttatttcttcttgcccacaccatgaataattttatttcttaaaatgataagggctatttcagtcatttaatttttgctttgccagggacttttattacagtcacatcaagagaggttttgtgtgtatccaaaatgtaggaattacagttgaatgaaagaaaatgccaaaatgttcccgagtaattgataatgtttctcaaagaggaatcagtataattttgatttcatgtattttttaaaaattttagtttactgctgatgtatttttatttttttaacagtgacaaactaggaattgatcaacggcagatgcaagaaaatagcatgttcttgtcactttttgtgtgcctatgcttatgtgccttttgttcgttttagaatattgttttaatcatcattaccttgcttcagagattcagaaaaacctattgagaaaggcattgtgttccaattaaaaaatcgtttagctcaatcaatttttggtattttaaaatgttatttgagctgagaacaaacataggtaatatgggcattaactaaaagtatgtatgggaacattctgttccttgggctgtgccttcggtaccctgtaggtacttttgtgcttttcagccctaaatcaagggaatgatcaaactggagactatggttagagaagtgaaggatttggcagtgtgtgcccttgcatgcaggccagtctttctgtccttgggtgcattcaaagtacctggttatccagtggtaatgagaataaaccaacatgctgctttatatagtgtaggccagtatacgctgacaaattcatatgcctgctggcttttcagttactgatttcttatttgtggtttccccactatccttcttcatttgccattttaataacattgagacctttttatccagccttaattagtagaacaaagaaagatttaggaaacctaggtttttaaatctgctttatttgccttaatcagttttccatcatggtttacaattacttttcccttttttcctcaatggtctttctttacctcttttgatttcctcctgctttgaaggcaatacgtaatttaaaatgaggtatttatggtgttttttgtttgtttaaacttagtagacttttcctttaaaaagaagtctttggtagatctcaaaatatccatgatgtaattaaaatgcagactatttgtcatgcacattattaaattctgctctcagtgttggtaattatacaaaataggaacaatgtagtataataagatagcttttcggggtttttaaatgatgtctactagtatttaagaaataaaggatatttatctaaagaattgtggagatggtgaatatgatttgtctctagttttaaaagcttgtaggcttgtagtggttcttttccttgatgtagaatcatctttgtagggattggccgtgatcggagcatttttgtgacttgaaggttaaaagagaggttgagggaggtggcaaggacactggggcagattctcctcatctcattgagtaatggttattttacagggagggaaagaataaatggggtataggaagagtaaagacattttctagtgttacttgaattaactacgtactagcaagtgagaactagaaaagggatgaatcatacctgtcaaatgtgcttgatccatcttataagaaagagaatgttggaggtataagaataccccagtaaatccccctggttggcacagtcagccttgggcaacttgactgctgtttggagtcagctgcaaggcgatgggctgccaagtagagctggcagtatggacagatcacttactgagttaagctcacaattacgagagcctatatatatatatatatacttttgccaatatggaggcagtgatatatgcagaggtgatatttataggccaaatttgtgataacgatacagtaaaattgccaataaaaatctttaataggtttttaaagccaggcagtagcctgcttgtttgaacaatattcaatctgccagatttcactggagccaatgaatttaaataggcccttggcaaacactgcagcgagatttgaaccagagtacatagtagagctgaagagccctgctggcctcagaacacatgcactccagggaatgccaaggtcctttctggagccagggtgggcacagaatggctgcctgtaacctaaaatggaagaaaacaggattttagaatgaaaggcatccgagaaaagcaccttttatggaacaagaaaggatatctgttccaacttgtccaacaaggtcattcagccagttaggcaaaggtaagaccctataggactcagcttctgtccaccttattcctgatggtttttagaagattgggtaatcactcattgtctcttttcagatcagattagaaacaatagtcatgaatttgcataattggagtcgtgagtcttcgtttgtgtgcttgctgaccatcaactaacatattaaataaaaatctttacttaggagcatcctcttcatctgcctaactggtagtttccatatcctcagtgacttccaagcctcagagtctgtgcctgtgactgccatagcccctggccactgggcctcctcttgatggggaggggctgagcagctcctgggctttaaaaactgcttgctgtgacttccaggacaggacccccccagaccccacgtaattaagccttaacagctgtttagaaaatgtatcccagatttgactgctccttggttctcttgctacgacccaggtttagcctactgtagccgcttctaactgggctcactgcttcacccggcggcccgtgctccacagtgtcttgagtgttcttcgtaacctttctaactctgaggcgagtcacatcactcccctgcataaaacccttcaacagcagctgatttccctaggaataaaatccaggcatccttttatgcccggcacctccctcatcctcatcccctttcccttcccctgccttctctactctccagctgctcgaggtctccctgccctttggaacttaacaagggtggcctgctttgggcgctggcactgatgtttctcctcacatccctgtcctccaactcttttcctggccgctgcttttcaccattcagatctcaatacctcctcaccagaggcttttcctgaccgctttaggcaaagtagccttatctcccaaccccattactctcctgaagttgattttcaagcctggctatgtagtacaatcacttgagaagtttaaaaaaaaaccaaatgagtgtttaggcccctctacagaccaatgaaatagagtatctggggctgagaagcatgattccaaggcgttgctctattttaccctatgcagtggttgtctaattctggaatttttatgtatgcatgtgctcatcctccacccatctgcaaatgtggttccttgaggacatagatgttgtcaattttgaggtatccttagtgcctggggcatggcttatcatataataggaacagggtacacatttgctttgttatcaaaaagagtcagactctggggccggtgtggttgctcacacctgtaatcccagcactttgggaggctgaggcgggtggatcacctgaggtcaggagtttgaggccagcctggccaacatggtgaaaccctgtctctactaaaaatacaaaaattagccggggatggtggcgcacgcctgtaatccccagcttctcaggaggctgaggcaggagaattgcttgaacccgggaggcagaggttgcagtgagccgagatcacgccattgcactccagcctgggcaacaagagtgagactccgtctcaaaaaaaaaagagtcagactgtaaaatattggaagagatttattctgagccaggtatgagtgaccatggcctgtgacacagccctcaggagatcctgagaacatgtgcccaaggtggtcggggtgcagcttggttttacacattttagggagacatgagatttcaatcaattacatttaagaaatacattgattctgtccagaaaggtgggacaactcgaagtggggcgaaggcttccaggttataggtagagttaaacattttctggttgacaattggttggagtttacctaaagacctgggattattagaaaggaaatgtctgggttcagataaggtattgtagagaccaaagtgttcattgtacagatgaagcccttaggtagcaggcttcagagggaatagattgtgaatatttcttatcagacttaagatataatgagacatgtccaacccccacttcccgtcatggccagaaacagtcttttaggttaaatttgaagagtgccttggctaagaaggaagtccatcaaggggtcttagaattttatttttggtttacagcttggttgcctgaataatgtgtatttgcaaggaatatgggcgggaaagagaagagctataaaagccaaaagctattaaaagatgttaaaaatcatggagaccaaagctttggataaatttggataaactggtgatcacaggagagtccagttccagatttttcttaacacccacatatacttgtgtggtctgatggttagaactgtgtttttggagttagattttactttcatctctgccattgaccctggacaattgcttggcttctgctgtaacacacagaagaggtataaggagaagttatttttgtgaagtactcttgtggttaggaaccttcagtaaaagtggtaattggattttgatggtacattgtctacaaccaaacttcctgaagtatgaacagaacaattcctatgtgctgttgcttaaactttcgtagccacagagttggcctggagataggagccaggcaggagatgaaagggatcacatggggtctaagcctctgctgagtgagaataagcgaggacagagaggaggagaagaactggaggttgtccgttagtgtgattctttcagatcctttgtttcttttttcaatttgtcttcctctccccaaatctcttatatagtcctcctgccactatctaagttgaggactttgctattttgtttcatatgaatttttatttttttcttactgtaagaacagtgcagtatgtatattattgaaaggattagaaaatatggacaagcagaaaaaaatcttaaatttctaacaatttaaccacctagagatgatatccactgccaacactttggtgtgccttcttcagactttgtgtgtatgcaaaatattattgtccatttttaagaaacaaataattttctacacatcattgtgtaaatgactttttacttactaccatggatttgtttataacactttttagtggttggatagtatcctgcatatcaatgttctgtattcagtccatcacatattgttgtatattgaggttgtttgtacttttttcaccattaccagcagtgctgggtaaatatccttgtagattaaagtttgcacgcatttatgaattattttttaggataaactcctagaagtgcaattgtggtggctgaggagtaaagaggtgtttttttgtttttgtttttttctaactgcttcttgtggggcagggctaacccataggctacccagagtggccataaagacatctttgagactcttgctgtgttgtcaaattgttctccggagatgctgcactcccagcccttggtataaagtgcctttctttctttctttctttctttctttctttctttctttctttctttctttctttctttctttctttcctttctttcttttcttttcttttctttccctcccctcccctcccctcccctcccctctcctctcctttcggctttcgtagctcttccctggattctgccatcgcatctcctcaactctggtctcttccccttaagttcatttaacactcctctgtcagattaaatgttctgatgcacaaattgatcacatcactaaaattatcagatcttggtctaccatcacaggacctcataatcaggatgtgagcaactttgtagggtttttttctttcttttctttttttttttttctagtagatggtgtctcactctgtagcccaggctggagtgcagtggtgcagtcatagctcactgcagtcttgaactcctggactcaagtgatccttctgccttggcctcccaaagtgctggaattatagacatgagctgccacacccaaccccggcactgtattttctgttctagttttcctccagcaaatatggatttcttgtgattcttcatctctggtcttccttccttggtacctggcttaccttctgcccctctggaccaccatttctggggagcagagattgcgtccctagaactgccctctgccaaacatgtagaataggcattgaagtcaaactgcagctggtggactctcctcccgcatctcccatctttacttgatcacatttcacttttattgcaagactgagttcatgttcaccaaacacatcttccttctggtgtcatgtgttcgcaatttcagtaaggctttctccatctcctttcactcaacatgacagtaatctttccctcctctgaattcattgagtcatttatttccagttctcttatgttacttaacctactttttccataatatcacaatttttagtctgtattctctattatatttcagatatctccaggctaagtgctatcccttgcaaagctggggggaggagggacctaaagttacgctacagtgaagaagcaccatcatcattttggtatatatcttgtagtacctttccacatatgtgataaatgattaatatttacattgtgtaagcatagcatacagatgcaattcacttttcaactctttcttctttggcccagtattttatagtactacgcagtgctttggctattttattattacttggactataaaggagttacaaagtcgctactgttataaatggcttccagaaggagaacagcagctctaatgctttgtaaaacaaaaatgacttgcttacagaaaatatctagtagcatcagaaccatgaaatagagtagttagaaacctaccctcccctaatctctgagtggtataggcctgtggaaatgtgacttgtacatttgctttcatgttagctgacccatgttctactattagttcctgcagataagtgtggtggcaaatactgttccttagattctagtcatagagttaatcagagctgcatgattcattttaaagggaatctaacattgtcaaagaagttctgggagttgcgggtggaaaaggaactaagtgagttcaccagccaggtctgaacttgattaagcttgaattctttgttgtaacttacgttaatgctcattaaatctgtaaagcaagacggaagcactgtttgtctatatatatatatgtatatacatatatatatataaacatttttaggtatcatgctgtaaagtaatatagtactacataattattctcatggccttctagtcagattaccttgaaaatccaaaatgatcttggtgaacaataatacattatgattttatggttcatctatatacctcctgcatagatgtataatactcatatctaacaggattaccaaattacataccttttggtatcagtaacatgcctgaaataccagagtatttattggctattctcagttatgaaacattaacattgccagacaaggctttgtatatacatacatacatatatatatatatatatatatatatatataaaatatatagtcatatatataatatatattatatatatgtctttatatattataagctttgcatatgtatatggtctcctatatatgctttttttatataagccttttatatatattaagcctttctttattcagaccatgaaaccaaaaacatcccttttctagataacgcatagtgtgattctatttaatgaacctaatgtctgtgaaggggtaattaagcaaatatgattgttttcggcctcaacaaactgccagcaagttcccctggagagcagcactgtgtggctgcgtggctgtgggtgcctgctcagcagggttgggggatgtgaggaggcgtggcgactgggaagcaaagggccagaaacacatttgtcttctgtccggcttcagaagtctatagtgtggcgggcctgtcggtgaattcctcaaggtcttcttttattacagcatgtcttaaaaggaaaaggaaaaggaaacatctctaaatgaaatgcttgtgggcacttttattcacagctttaagtaacctttctttaaaaactgccagatctgtgtttccaatcttggcctctatattagtttcctcaggctgctgtaacaaagtactctaccgcaaactgggaagctttaaaaaaaaaaacaaattagttgtcctaagttctggaggctagacatccaaggtggaggttcagcagggttggtttcttctgagggctgtaagggagaatctgttccgtgcttctttcctgtcttctggtggtgggcgggcaacctttggtgttccttggcttgaagaagcgtcaccctgatctctatgttcatctttacttggttttctccttgtgtgcatgtctgtttttaaatttccctgttttataaaaaagactccagtcatattggattaggtgcctgccctactccactatgatctcatcttaactagttccatttgcagctaccctatttccaaataaagtcacattctgaggttctaggggttgggatttttggggacgggggacacagttctgcccataccagcatctctcttgagtccattgggtctcttttggcttctggctggacactgtactacatgtcccactgttacctcaaacacagtcacagttggttacattctcccacaggtcccttctttccaatttttacctttttttcttttttcttgtttatctttggtggtggtatcatcatcccactcagttatccaagttggaaatgttgggaacatcctggcctgtttccttggccttggcctccaacatccagtcctaaccacattttataatttctgcctctgctgtgtttctctagcctttcttctgcttccattcctagggcccccactcaggtttagaaccctgtgatccctggctgccaggctgtctcccacatctcatctctcctttaaattcatcttccacaccagttctttttctaaaacaaagttttgaatgtgacatttcttaatccagaaactgagtgatttttaactgtctgaaaaaaaagtcaagattctgttgcttggcccttaaggtccaccctaggtggctggcatctcgctcttgccagtcttttgctcctcatgacctgctagatggagaattggtaactcctacatgcttctccaaatacagcacatccatttgttttcatctctgtactttgcttccccagtgtagaatgtcctctctctacccttccctcctctctccattgtcaccaaaccaaagtcggtccatttgcctgcacaaaatggaaagccaaacacaaagcaccagttttttgcagcaagaaagtttattgccaggcaactgagtaaggggagaggagtcacactcaagtttgactttctctaccagccttacagccatagatttaagggagggcttctgagtgtggagtttaggtggtgaacagtgattagtgattggctgaaaggaaagggggtttggaaagtgtcttgggcatgctgttgcccttccatgctgcttcatgggttgcacctttggacagtggtggcattagcttgaactgagggtgagtttttggccctctaacgtcaaaaggttactcaacaggagaagaagtctattctgcccagactccagtcagctatgttggttccaaccagcctcagtctgtcagccaattttgtggcaaacagagagaactgtaacaaatggttttcttctctgctgtcctgcaagacaagcttaataaatttttgttagttaccaaattctttaatcctgtggggcatggtttcaccatcttcccacagcagttggaattctacccaggttaaatggaagccaggagacctggttttcaggccaaaatgtcagaagccagttgttttgcctaacccaggtcattaactttttccagtttccgtttcctcacaagtaaaatgaggaggttgaagtagataatccctaagatcttctcagctttaaaatttgttcttcaaataccatgccgccatgaagcagtccccaactcttccaggcagaataattcaccccttttatgccccttagtgctttactttttcttttacagttaactcttaatttctagtggttatgtgtgctcatgactatctccccttcctccaaacagctggtggtaagctcctggagttcagccaggaatgcttgactcatatttgccccccttcttgcctcctacgcagagtctcggtgagagagaccttagtagaggataaaatgtccttgggaagtactcccctgtaacacatgctcttcctgagtgttcccaggcattgagaagcatgtgttttggatggttaatgatacagagatgctatattgaacacactgcgtttttcctttctttgtagcattattgtaattgggtgacattctgggaaacagctaagttcactttgtaacagtttttataaaaatgtgttctctctataggatgtttagaagtaactaagttttctgtaaaatatatgaaaaccattcctattttcttcctccttccatatcctccggaaacttggagtatctcaatgtatcattaaagtatttggatacttaaaatagcagttgttaaaaaataaaatctaggaaagcttttatggacccatttcctctttggaagtcaaaacgtccttggcctctcatgttcttcctaaagcttagatttgacccacattttgaccttcggaaagttaaagtcactcctttttcctagagaagaatgaccaggcccttttctttcttcaaggccacctctggtcctatatttctaatcttattttacattgttcttttatgcactccactgtccagacaaaatctgtcactcatcagtttccctgtacactccttagctttcttgcattagccttctgcctgaagtgccctctagtctacacccattaccgcatatccaagttgtactcattttttaaggcctagctcaaatgccatttctgccacaaagacttttattaccatactagttcttgtgttatgatttgtccttcctctatacactagtctgtttctagaccagtgctgtctgcctcactagactagaagtcccttggggtcatgtttcatgtatcatttatctgtattccccttgtactagccctaggtcaattcacaggtggtcagtaaataccagtagtgaatcaatatctgtgaaccgttttttgcatggtgtataaggatactaatgcataacaaagttgctctattttgctgttaggcagtcacatcttagtctaaagtatctgcacttttattatagaacccaaaaacatgcctgaaggaagactgaaacatatatgatgctggataaaacagttatatttgaaattataatgtatttagtgtgtaacttcatggtcaatgctgtcatgtcttttagattctgtgcattattatttcagtccactatatgtaaaagtaaatgctaaatgtttataaatgttttcagtttgaattttatgttttggcagtgatatcttattttttccctcagtgtatgtttgtatatgcttctgttttccacaagctactgacttttgctttatgtttgttttatgttgcagattaatatcttttcaagaatttgttgcctttgaatctgtcctgtgtgcccctgatgctttgtttatggtagcctttcagctgtttgacaaagctggcaaaggagaagtaacttttggtaagaagcatgcttctgtgcacgtctgtgtaagtgtggacttgtgtgagcattttcttttttttttttctaggaacaaaataaagtgtatggaaattctttatagaagatagtatatcccttttagtaaagatacttcaatgttttggagctccagttcaaacatcttcctattcgaaaaaaacaagtttctggcttagtagttttgatactctgatttagttttaaggtgagggagatgtggcatgactgttttcatagagtcatagcatgtgagagccagacaggacttctgtttcttccctgcatcatcagtagtgctttccactgatagaacgaagaagtgaataatctgcctacacacagaagttacttatgcaccctatacttcttgtcttcacgttgttcccatggagtagtttgcggccagagctgctgcacaagatggtggttcagaatggtacatgaaggaccttgttctaaacaacccccgctcccccgacctgactgctgtgctggcagtgtctgctctcctgtggccttctttattttgcaaggcacaaacatcatcatgggaattagctacaaagctgcagaaaaccctgatgtttttcaaattcttagaagaaagggaaggcttggaagtggtgggacagtggtaagttattttttaaaaaactggctactaaggacagatttaacggaaagtaccatgtttcccttggactctgtggtgtccagcatatgttgtctctgcatgcaaatctgcagtagcattgctcatgaagaattttggagccctttaggcatgtggattgtgctttcatgagagatggctttaaagattagggagaatgtggcatgactgttttcatagcgtcatagaacgtgagacccagacaggacttctgcctgtcttgtgcttggcatgtgcccattttaagtgtctctattcatagtttctaattcattcagacctttgggacttgtcttatttgatgtattgtggaaaacatacagatatgggaaaaatacagatggtgtaacagtgttgcttccagaatcagataagcttagccccttccagctctgctgctgttgtctctgagccaaattagtgatcctctccagtcctcatttatcttatcaagaagtgaatataataattagataaagtattggtaagatagtataatagatttattgtgccaacccccttcgccattccgtcatactcatttggcatgacagaattaaaggttaaatcatcttgagcaaagacaaaaaattatatacttgcccggtttctagaagatcagatgctttccattaatacttcatgaggattatttaatatttacagatcctcagaagaaatttatttccatcacccagttcctcttagcaccactgcaaccacaacttttcaatggaataccaatttttagaaagtccccatttaaatcttcaagtaatgagtaagcagctagctcatggtgttattgatttactcaatggaagcgagtttggtgacattgttataatagcgtttcctggggatgaacagaggaaagcctgtgagtgtaagcatgttcagcataggtgtgttctgtcttgtcctcctactttccccagcaagtctggatgtgaggaatggaagagagttcgatttgatattagaggactgagaaatgggcttcaggtagttccttgatatagatccatcttcccttcatgcgtgtgaagtggcaagggatattggtgacaccagctttaccactggtcctagaaagacgtaggagacttccaccattgcagggcaaagtgtgtgtgttagtgtgattagaagaaaatgatagtgaagaagcaggatgtaggaaacaagagctgtctttgaattgtagaaggcatagttgcataaggattttgtttctgcttcttactagctgaaggacaagtcatttcaaccctctgagctttattttcctcatctctaaaatcggggtaataactactttacaggactatgtaaggattaaaagattcactgcataaaaggcactgtctgaaaaacaaaggcctttatacaaatagtgatactaaaagaaatagcctaaaagaggaaaagattttctgtttttttttttttttttcatttttctttgggaagcccttttttttaaaatttttttaaattttttttttttaacgtaagttcaggggtacatgtgcaggtttactatataggtaaatttgtgtcacaggggtttgttgtacaaattatttcattactcagatattaaacctagtacccattagttatttttcctgattctctccctcctcccaccttctaccctccaccctctggtaggccgtaatgtctattattcctctctgtgtccttgtgttcttatcacttagctcccacatatacatgagaatgtttggtttttggttttctgttcccacattagtttgctaaggataatggcctccagctccatccaagttcctgtagaggacatgatctcgttgttttttttaatgactgcatagtattccatggtgtatatgtaccacattttctttatccagtctatcattaatgggcatttaggttgatgccatgtctttgctattgtgaatagtgctacggtgaacatatgtgtgcatgtgtttttatgacagaatgtttatatttctttgggtatatacccagtaatgggattgtgggttgaaggataattctgtttttaggtctttgaggaatcaccacactgttttccacagtggttgaactaatttacactcctaccagcatttacactcctaccagcagtgtataaatgttcctttttctctgcaaccttgctagcaccagctattttttgactttttaatagtaaccattctgattagtgtgagatggtatctagttgtagttttgatttgcatttctctaattaccagtgatgttgagcctttttccatatgcttcttggccgcgtatatgtgttcttttgaaaatatctgttcatgttgtttgcctacttttttcttttcttttttttttttgagacagagtctcactctgtcacccaggttggaatgcagtggcacaatctcggctcagtgcaacctccacctcctgggttcaagcagttctcctgcctgagtttctcgagtgcctgggactacaggcgcgcaccaccacgtctggctaattttgtatttttagtagagacgtggttttaccatattggtcaggatggtctcaaactcctgacctcaggtgattcacccgcctcagcctcccaaactgctgggattacaggcatgagacaccacgcctggcctttcccccactttttaatggggttgttttttcctggtaaatttaagttccttatagttagttgctggatattagacctttgtcagatgcatagtttgcaaaaattttctcccattctgtagggtgtctgtttactctcttgatagttgcttttgctgtgcagaatgccctttagttaattaggtcccatttgtcaatttttgtttttattgcaattgcttttggtgtctttgtcatgaaatctttgcccattccactctccagagtggtattgcctaggttgtcttccaagaatatagctttgagttttacacttaagtgttgtttgtttttcagatgaactcttgctctattgcccaggctggagtgcagtggtatgatctcggctcactgcaacctctgcttaccaggctcaagtaattattgtgcctcagcctcccaagtagctgggagtataggcatgcaccaccatgcctggctgattttttgtatttttcagtagagacagggtttcaccatgttggcgaagctggtctcgaactcttgacctcaagtgatccacccaccttggcctcccaaagtgttgggattacaggtgtgaaccgtcatgtctggccacatttaagtctttaatccatttcaagtttatttttgtatatggcgtaaggaaggggtccagtttcagtcttctgcatatggctagccaattaacccagcatcgtttattgaatacagaatcctttccccattgcttgtttttgtcagttttcttgaagatcagatagttgtaggtgtacagccttacttctgtttataagtatcttgagatatcaacaggtatatgacagggtgttggtatgactggtaaattctagttaatttgtgattctgtatgtgaggagaaaaaattaaatgtttccatttgtatttttagcctattgtatgtgacagtgattttttaaagtacactttgttgaatgacagcatacatgcagaagaatatacaaatggtgttaagtgtacatctttctgaacttttacatctggatctgcttaccacgagccagatcagaaagaggatggtaccagcagtttagaggtctcatcccagtcactgttccccaatcccaatggtaacaactgacatttatcactatcaattggttttgcctgtttttaaacttaatttaattggaactatatagaatgtactcttttggtctggcttcctttgttcattttatttgtgagattaatccatgtcgcatgtattttttgtttttcttcactgtattgaattccattatgtgactctatcctaatttatttatccattctattgttgataaacattttggaacattttcatttttggctgctgcaagcaatatgcttttgacattgctttacatattttttggtgtgtatagacatttctaggaatagacttgctcggtcacagaaaatatgtatatttagcttcagtagagcttgctaaaatgttttccaaagtaatggtgtgtctggaattggtgggttcttggtctcactgacttcaaggatgaagctgcggaccctcgtggtgagtgttacagttcttaaagatggtgtgtccagagtttgttccttcttatgtttggatgtgttcggagtttcttccttctggtgggttcgtggtctcgctggcttcaggagtgaagctgcagactttcgctgtgagtgttacagctctttaggtggcgcttctggagttgttcattcctcccgtccagagttgttcatacctcccggtgggttcgtggtgtcgctggcctcaggagtaaagctgcagaccttcatggtgagtgttatagctcataaaggcaatgcggacccaaagagtgagcagcagcaagatttattgtgaagagcaaaagaacaaaagcttccacagcgtggaaggggaccagagcaggttgccactgctggttcgggcagcctgcttttattcccttatctgccccacccacatcctgctgattggtccattttacagagagctgattggtctgttttacagagagctgattggtccattttgacagagtgctgattggtgcatttacaatccctgagctagacacagagtgctgattggtgcatttacaatcctctagctagacataaaagttctccaagtgcccatcagattagctagatacagagtgctgattggagcatatacaatcctcctgctagacataaaagttctccgagtccccacccgactcaggagcccagctggcttcacctagtagatcccgcactggggctgcgggcggagctgcccatcagtcccacgccatgcgcctgcactcctcagcccttgggtggtcggtgggacctgggcgctgcggagcagggggcggcacccgttggggaggctcaggctgcatgggagcccacggggttggggggacttgggcatggcgggctccagctcctgacagccctgccccgccgggagtcagctgaggcccggtgagaattcgagtgcagcgtgggtgggccaggagtgctgggggacccagcacaccctccacagctgctggcataggtgctaagcccctcagtgcccagggctggcggtgctggccatccactccgagtgcagggcccgcggagcccacgcccacccagaactcacgctggcccacgagcactgtgggcagccacggttcctgcccacacggtctatctccacacctccctgcaagcagagggagctggctctggcctcggcccagagaggggctcccacagtgcagtggcaggctgaagggctcctcaagtgtggccagagtgggcgccgaggccgaggaggcgcctagagcgagcgaggactgccagcacattgtcacctctcagtggtaccagttaacactcatgccatcattgcatgatggttttattttagatctttgccagttggtatcagccatttttattttagtgatatctcactgtgtggcttcaatgagcatttatttccctgattcctaatgggttatatgacatttttccatatttattggccatttggctatcttcttcagtcatgtgcgtattttctggatacaagacctctgagggttatatgtttcacagattctttactctgtgacttgcactgtaactcatttgagtcttgaggaacataagtttctaattttaatgtagtacaaattatcagcattttcttttgtggatagctctttttgtgtcctgtttaaaaaatctaggccaggcacagtgattcccacctgtaatcccagcactttgggaggccaaggcgggtggatcacctgaggtcaggagtttgaaaccagcctgtccaacacagtgaaaccctgtctttagtaaaaatacaaaaatgagctgggtgtggtggcagcacctgtaatcccagctactcaggaggctgaggcaggagaatcgcttgaacccaggaggcaaaggttacagtgagccgacatcatgccattgcactccagcctgggtgacaagagcgaaactctggctcaaaacagaaaaaaaaaattctttgttttcctccgggtcaggaagatattctcctatgttatcttccagaagtttgctttcctttcagatttacattttaatctttctagaatttgttatatttttgcatggtactaaaggtaaaggtcaagattcttccctggccctcttccccaaggatatgtcgattgcctggcaccatttattaaaaagatggttcttttctttattgcactgcagtggtactactatcataaatccagtatgggactgtatctgaatgctccattctttttacattattgtatattctccgctaatactatactatcttaattactacagctttataagtcatatctggttaggttttcaactttattctttaagattatctcggctattcttggccctattcactatcaaaacaattttagagtaagtcattaatttccacaaacatcctgctgggatttcacatgctattgccttgaatatgtataatatctatatgtatatgtataaataaatgttttattcctttaagaatttttaaagtttttaaataaaagtttatttaataacaagtgttagtctgtctatatctcactactctggaaattttgagttgatgaacactacaaattttgaaagagaaaggaacacatctatgttatttgttatctaaagatgctggtgcatgtgtacaattttgcagataggactactgccaaggatgaatcagtgctaagtacctcagaaggaaggtagtagaaacgtgagctgaattttatatttgagataacaaataagtattaccttcttaaaagttcataaatatttcaatagatatattttactacatattgaatataatacatttaaagaaacttcagaattatgtgagttggaatgttaccaatactgtcaaattttggttaccatagtggatgggaggggtattcaaagggagtaaatcatggtggaagacaagcagggtaagaagaggaaagaaaaaatgatattaattgcctagtcatttgtaaccaaagcagagaaataataaataagggaataagctgtcattatattaattataaatctgtgctattatgtgaggagacatttacacaaatttgtttttgaaatttaaggtcttttctctttaaacttagtgtttcgaatgtcaacatagttttctttttctttcttttcttttttatggtgttattttttatactagatcacgggtggcaaacattttctataagggtaagatagtaaatgtgttggtgcagtccctgtggaaaatagttatggagattctgacaaaaatttacaaatagaagtaccatatgatccaccaatctcacttctggatatttatccaaaaatcaggatctcaaagaggtatcagaactctcatgttcatcgcagcactgttcgcaacagccaaatgtggaaatgacctaaatgcccatccacagctgaatgggtaaagaaaatttatatacatagaatattattcagccataaagtcctgccatacatgacaacatgaatgaaccttgaggacactacgagtgaaataagccagccacagaagacaaatattacatgattctacttatatgagacacctgaaataggcagattcatagaatcaaagagtggtggctaccaggggctgtgaggagggggaatggggatttactaatcagccggcataaagttttggttaagcaagatgagtaagttctagaaatctcctgcacaacattgtgctgatagttaacgatattattttgtacacttaaaaatctattaagggtagatctcatgttaagtgtttttttccaccaaaaaaaaaagattttattttcattttttgaaagaggtgaggtaattggtcgtgtagatatggggatggaggaggggagactgtcgcaggcagaaaataatagccatttcccgggttctaagcgcggagtctgtttgatacatttgaggaacgttttagggagagagactataaacaaatacaaaaaatatgatgtcagaatatcctgtttgtatgtaaagcaggctaagtgggtagaaagcatggaagctatctgagcagatctagaggagtgaccaaagatgcattaatactgaactggcatgatatgggctttgtattccatgaagggttggagctgtgggggtctggaagtgatggccactttggaagtgccacaaacagtggaggctgggaataacagaggcctggactggagtcatatctcgggaccccacctgggccattccttttttttttctttcttggtttctttcttttttttttttcttttgaaacaaggtctgtcacccaggctggagtgatctgggttcactgcagcctcaacatgcctgactcaagtgatccttccaccttagcgtcctgagtagctgggactacaggtggcgctaccatgtccagctaactttatttttattttcgtaaaggtgagtttaactatgttgcccagactaatctcaaactcctaggctcaagcaatcctcccgccttggcttcccaagatgctaggattacaggcatgagccactgcacactgggctgttcctgagagctaatctgtatgacttggctcccgattggccatgggtgagaggaagggggccaaaggaaaggaagaagaaccaggtggtagctactggtcttgttctgttcccaagatatgtggttttacataatctcatgagagaagtaaggtaaccatcatttttattttaaaatacatgccaacctctgggctaagtatttttggtataatttattatttaattattgtagcctagaaggtctatactattataattctcattttctgtagaggaaatagacatggggaagttgagtaagtggccacagtcatagtgttgcctgtgatggagctgggagagcagcctgatcctggctgactgttcttcactgtgccacactgcctccctctggtgttgatactcatgcttttggagcaagcccactgtaatccagataggtgtcagttagcccattgtggtctcagtctgtatcagacattagaaggatttaatatttttcatgaagtaaagaacaataggcaaatgcattagttacgattttttttcactatggtggaaagtaataaggaagagaacgtacctggcttagagttaccagtgtacatagaaagttgccttggttccagctatctggataacttgttgagatgcacacgatgtgagttttacccagaaaagctttatcttttgatatgaacagaattctgactgaaggggagaatcacaggacgatagggaagggtgaggagatggtctgtgtccaggttgaggatagaggggaaccatagtagaggaggcccttgattgaggggtgcagcttaagagacctgagtacttgggagggtggttgtcagggcaccaacgacagggccgggcccttaagcaagagtaattatttcatatgagaagcaattaggagtcactacaaggtctttggaggacagggataggatcagaatgatgcttggaagagatgatttttgctgagttgactagagtggggcaaagccaggggtaccatgccagtgatcattatttaggcttcacagtatctatgtgaagccagcgtatagtcaccccactttgtgagtggaagagctgaaagtcagggtttggaaggacttacctggtgtgtgagcaggttggtacagacatgttgtgagtgatagtttctcagacactttcctgttactgtatttcttatttaatgttgcggggggtgcaaaacatttccattgtgggttttaagaaagagtacctgtgtggatgtgtgggtgtgtttaatgaaactgtcgatctgaactatttggcatatataccagtgatgtatcttataatgctaatttaagacattacctattcctacttactgatatttcttaagttgttgtaccacattaatagcctagctccacagtagcagagagattgaatactacttttttttttttttttttttttttttcagagatggagtctcgctctgttgccccggctggagtgcagtggcacaatctcggctcactgcaagctctgcttcccgggttcaagcaattctcctgcctcagcctcccgggtagccgggactacaggcgcacatcgccacgcccagctaatttttgtattttagtagagatggggtttcaccgttgttgcccaggctggtctggaactcctgagctgaggcaatccacccgcctcggcctcccaaagtactaggattacaggcgtgagccaccgtgcctagccgagagcttgaatacctgcttttatctgaggaaagtcacaagtagaccccctgaaaattcaaagtatgatctatacaataccagtttcttaggttaaactcccaaatgttttcttgcattatgctattacatgtttctctcttcctttgactttttaaatttatttttcagtacactgaacaagatttcatgaaatatgttttacgtgcaattttaaagttatccttaatacctgaatgtaacccaatttcattacaagtgttggtggtaatgatggtgtgtgcatgtttatgttctgcagtttttaattaaactttaaagtcaagggttctcaactctttgcctggataagtatcagggagtctgtgaatggctatggttgtttgtaatatttcgtctaaatgagctttttttttttcctggggaaaaattgtgtaggttttagcaaatctcacagaggtcagtgagctgccctttaaagataaaagctgctttttatagaggggcagttgaactagtagacatatatcttatttaacacttttccagcattgctgttaaagacattgattgtagaatagtttatgtatgacttcaaaatgtaatgataatcagtttttggatgccttttggttttggatatatgaagaaacaaaatgtatcagacaacctatatataatacaagagacagattggaaaatacatttttctgtaactgaagtaaatgtagagtaactaacgaattattaaaaatacaaaaagagccgggcgcagtggctcacacctgtaatcccagcactttgggaggctgaggcgggcggatcacaaggtcaagagatcgagaccatcctggccaacacggtgaaaccccgtcgctactaaaaatacaaaaattagctgggcatggtggcatgtgcctgtagtcccagctactcaggaggctgaggcaggagaataacttgaacccaggaggtggaggttgcagtgagccgagatcgtgccaccacactccagcctggtgacagagcaatattctgtctcaaaaataaataaacaaaataaaatacagaaagaactgtttggttggctggctagtgagacctctgaaagggaattggttctgattctcatgaagaccaaaatggaagaaactagtctacaccctgtgccacactgggaggcctgggctggctcgccactgcagctctgccagttagcatggagtctgaaagaaactggtccagttttgccctttattggaaactacagtgaccttttgtcctttaatcttcactattgaaatatattgtaagtttagtaactatagagaagcgtttcttgtttatgttaataagtggcatgtggaaaagggctctcctaagagagaatcataaagcctggaacttttaatttattaaggctctgagaagtcctgcggaaaaaataaatctatttaactttgtttaaattgtagtttagcaaacttattatatttgcaccaacttttctcttgtgtctctcccactaaacaaaacccacagaaccggggcgatttctaagctagttaattcttaattctaagcgagtcctcagttagttaattctctgatgtggatgtaattgtttggagggaccctttctgagttcaacttagattgtgtccaggaacacctgctatgatgaaattggtgtgctttgggaaaatgggtaggctagatgacattaggaaatgtgtggaaacacccactcagtcacttcgattcaggttgcagaaaatgatgggagttaaaagtatggaaatgagaagtttcgaagttaagcactcaaatttaatattaaatatataaagctagaggaatgctggtattggattggaagaaggcagactttacccatcatttttaagcttgctggaaaggaaggtcatttgttactgtctttgtaaagacacttcgaaaatgaaatattcgaaaagatagctgagggagaaggtggtgaagaatcagaagaaacgttacttggggaaagttcttcattaatattggttctgattttggtgtttcacaaaaataatgtgtcattttgatgaaagaaaaatattgccctgcagtagatttgattttattttatgagaggtaaagagggggctgagtatattctcttatacatgcttacatcccaaatagagagtaagaatttcgaataagaacagtatgagttttgaaagtaaatagtctctatgttgataagaattgtggcatgcctgggtactgagtatcttttcagagatcctagagactgtccagaaactgttccagttcattgggtcaaaaatccactatttacgaaaagctaaatacggatttgcacgattgaccataatggcttcaattttgaaagatagtagtatcagagagcacttccagttggtgggataatttaagaatcgcccgtgctcaaatggctaaaatattgtactttttgctacttcatcactccattttaaaaatagagagggggagaaaagaaggcagacctgttgagaaggtggaagaatgtcagttggagagcaaatcaaaataaccatgtgaagccactccttagttaactactgcctgaaggttaactgttccttagaagcctgtcagggagtggagagactggactgggggctgctgtccctgtgtgtgcatgtgcacctgtgtgtttgtgtgtgcatgtgtgtgtgtgtatgtgcatgttcatgtgcatgcatgatgaagggtgaagagaacttgtgagtaggaaagaaggtgtagagaacagaaagctaacataaaatcctgaaacttagagtcctaggaaaatttgactattttaaactaactgtactgcttatttaaagataggaaaattataccattcttcttctggtataagagagagataaaaatacagtttttctaaattggaaaatttgctgtaatcttgctgctaatgactgatttcttccaacagttgcaaggcagtttttgctctgataggttgataaaggaaacaaaatcaagaacatattggaaattctcagagaaaattacagtttaggtatatgttgggggtggatacttagacattttaattgaaataaaacagttttatactaatatgggatcactgtgggtgtacatttgtagtacatctgctcttgaagcatttaagtagggttaaatgtatgttaatgcttttgcaagaaaattttcgataatatccgtctaaggaaactagcttaggaaataggtttttgaaaacaatatagatattatatttgcatttagagagtgaattaggactctgtaatgctttaagaattttaaaacattagttgtattctctagtggtaatgaaagttaacaataattaacacacagcagatgattaaagcaagcttacacatctggagagtggccacagtctgctatatgcctctaaacaccattttaattgacctacttttgatattatgaaaggctaataatgatttattctacccagttgaaaatactttttctagcagataattggaaacatctcagttggcccctctgttgatttagttagtgtgtgtgacagatggttaatatcttacgctaaatatctgccagccttgagccattttgttgttgttgttgactcacagtcactatgatgacttaaatagtgtatgaatcttgagaattgatagatctgtcagattatagaggaggagggagtcttatcaatgaggtagaccatgggttctcattgtaatagtgtagaatgttggttaactgtggactccctggctctgtctcaaatctactgattcataatttttgggtgtggggcttgggaatgtgttttaaacaagctctccaagggaatgtagttcctacttcaaatgaacaatggctgagtatagtttatggctttctttcatggatgaggaaacaggcccagaggggaaaaggtgactagtttcataagaatcacaactttgacttctggcactagaaggatagggttctttcctgaatgccacatgaccttaactcaggctagttccatccctaagtacagaactggaagagttttaaattagccctaatttttacatacaccaataccacatatgactttagtataatatttggctcagcttggctgtgtgtgtgcttattttttgaaagatacctatcaccactgtacctacatgttcagaataataataataaaaagtttacaggggattatagagaactcaattttaatgtgaagtacttatgctctacttactatgttttaatggcaaccattttccccctagaagtttcttgagcgactctgaattgtagccagaatacgtctttcctcttcagacccttagctgtgattaatgtaaaaaggcacttgtcaaaagggtttgaaatggcaaccttgatattggagcatatggcagtagagataggtctgcatccacttactccattatgttatttaatgtacgaattcaacaatttgtcttttgctccctgcttaaaagatgatggccgtagaagctggttgttaaccatatcagcagggtggaatattacttcccttagagaaaaaccacaactttctttgaggatttagcatgcattagaaaaagcatgaaactgttcagagataaaatgctgggccttcagcagtcctctctttgcctccaagaggggttacttttatgtttaacacaaacatcccttttgtgtttattgtattaatggaatttttaaaatccatgagaaagagagagagattatggtttagtgtttgaaataatatagcttgatgaatcttttttattttaatgagaaactctttttcatagatatgctgcttcaaaaagtgaatcttttagaaattaaaatgcattaatttagttattctgtatggaaacaaaaacatggaaagttaaaatttgcataagtgaagaccttgatgatttcagattatagtgtggtggaggttaaggaataagagtccatagaatttgtaaaaacaaattcagtctaaccacttaatggcatgtgcaagtaatttgccaattaaatatctctagtgtctgaaagatcttcagagaaaagagtggaggttcttaatctttcttaattttatactttaagaaacataatagaaaattacttagtttttgatcacttttcattcaaaattttagcatatgagctcaagaaaggatggattttaaatatttgaggaaaattattgctttttgagaaattaaaaactatgatacttccaaatcacactgtgctcatttaaaaaatagtatttgtaaatatttggtgcccagataataattttcattataattaagactttatactttggagttttatgattttgatggtcacctactatgtttagaacattgtactagtcatgcttaactccagaaaaactgtctaagatagatattcccattttaaagattgagcgaattgagtcagagtaagtaatttgcccagggttactcattagtaagaggcagatctctgacagttctaggtgttttttgtttttttttttcagagaaagctttgttgagatataatttacccatttaaagtatataattcaatggtttttaatatattcacagatttgtacaattatcaccacattcaattgtagaacattttcatcaccccaacaagaaacctcgtaccacaccttagcaatcaccactcccttccatccagtccctccatcccctggcagttgttaatctactttttgtgtatatggatttgtctattctagacatttcatataaatggaatcataaaatgtgggctttcatgattggtttcttttacttagcataatgtttccaaggctcatccatgatgtagcacatatgttattcctttttattgataaataatatttcactgtgtagatatagataggtcacattttgtttattaatcagttaacaggcataagagctgttcccagtgcttggctattatgaataacgttgctgtgaacattcatgtatgtgagtttgtatgggcatatgttttcatttctcttgagtatatacctgagagtggaattgctgagtcatattataattctatgttgaactttttgaggaactgccagactgttttccaaagtggccacaccattttcttaaatatattcccaccagcagtgtttgagggttgcagttccttcacatcctcaccaacacttcttattatctctttttgattataaccattgtagcagggtgaagtggttatctcatcatggttttgattttcatctccctgatggctaatgatgtttaacatcttttcatgtgcctcttggcaattttatgctgtctctggagcaatgtctgttcagatcctttgcccatttttaaataggattatttgtccttttattgtattgtgagagttctgtgtgtatactagggttccttatcagatatgtgacttgcaaagtttttctcctagtctataggctattttatctttttcttttctttttttctctcttttttttaaacttttttattttaagttcaggggtacatgtgcaggttcattatataggtaaacttgtgtcataggggtttgtcgtacaaattatttcatcactcagatattaagcctagtacccattagttatttttcctgatcctctccctcctcccaccctttaccctctggtaggccccactgtctcttgttctcctctgtgtccgtgtgttctcaccatttagctcccacttaaagtcagagcgtacagtatttggttttctgttcctgcattagtttgctaatgataacggcctccagctccgtcgacgttcctgcaagggacatgatctcattcttttttatggctgcatagtactccatggtgtatatataccacattttttttatccactctatcgttgataggcatttaggttgattccacctctttgctattgtgaatagtgctgcagtgaatgtacacatgcatgtgtctttataatagaatgatgtatatgcctttggatatatacccagtaatgagattactgggttgaatggtatttctgtttttaggtctttgaggaattgccacactgtattccacagtggttaaactaatttacactcccaccaacagtacataagtgttcctttttctctgcaacctcaccagcatctgttattttttgactttttaataaccattctgagtggtgtgagatcgtatctcattgtgttttaacactttctttttttcttttttttttttcttttgagacagtctctctctgtcgcccaggctggaatggaatggcatgatctcggctcactgcaacctccgcctcaggggttcaagcaattcttcctgcctcagcctcctgagtagctgggattacaggcacgtgccaccatgcctggataatttttgtatttttagtagagatggggttttgccatgttgcccaggctggtatcaaactcctgacctcaggtgatccgcccatctcggcctcccaaagtgctgggattacaggcgtgagccaccgtgcctggccattttaatactttcttaatggtatccttggagtataaagttttaaattttgatgaagtataatttatttttttttctgttgcttgtagttttggtgtcaactaaaccatttcctaatccaacatcacaaaaattatgtctatatttttttctaaaattttcttgaaaatatgcctatattttcttctaaaactattcacggttttaagtcttgtagttaggtctttgatccattatgagttaatttttgtatacagggtgagataggagcccaacttcattattttgcatatggatattgtccctgcaccagttttttcttattgtctgttacctttgttggaaatcaattgactataaatgtgagggttaatttttttactctcaatttcattctgttgttctctgtgtctatcttataccagtactacatagtcttgattactctagctttgtagtaagcttgaaatccaaattcgtgccaggcgtggtggatcaagcctataatcccagcactttgggaggccgaggtgggtggatcacgaggtcaggagttcgagaccagcctgaccaacatggtgaaaccctgtctccactaaaaatacaaaaattagctgggtgtatcaaagcgcctgtaatcccaggtactcaggaggctgaggcaggagaattgcttgaacctgggaggcagaggttgcagtgagccaagatcatgccactgtactccagcctgggcaacagagcaagactccatctgttcttctttttcaagattgttttggctcttctgaattgcttgaattttcataatggattgttggatcagtttgccaatttttgcaaacaagccaaccaggattttgatagggattacattgaatctatagatcattttagggagtattgccattttaaaattaactttggagagttttgccatcttaacaatatcaagtcttttaatccgtgaacatgggatgtgtttctatttatttagattttctttagtttctttcaatgctgttttgtagtgtttagagaatcagttttgcacttattttgttaaatttatttctaagtattttattgtttttgaggctactgtaaattgagtttttttaaaattaattaattaattaattaatttttttgcaacggagtctcgccctgtcacccaggctggagtgcagtggcactccactcactgcaagctccgccttccgggttcacgccattctcctgcctcagcctcctgagtagctgggattacaggtgcccaccaccatgcctggctaatttttgtatttttagtagagatggggtttcaccctgttggccaggctggtctcgaactcctgacctgaaatgatccgcctgcctgggcctcccaaatgctgggattacaggcgtgggccactgcgcctgaccgagttgttttttaaatttcatttttggattgcttatttcaaatatatagcaatacagttgatatttgtatattgatttttctgtcttccaaccttgctagacttatttattagttctaataattttttagtgatttcttaggacttttctgtatataagatctgtgacccaacttttaaaggtctcaactcttttcactataaccataccctgtagcctgggaaacttactaacttgggagaaataggttgactttttgaggttatctttaggaagtaaacaactgccactttgtaattgtcttctcatgatataaacaaatgcggcagacttttaagatggaaacttttgtggagaaagcaaggttccacaagtaaaaggaaccttgagcttatttggtgaggtcttactttaaataatatcactattatttggtgatattatgggaactacaggccttccaaacatagcttgtttggcacagactgaaataacaacaattatactttactttaaaaaataagcattctaatttggctttacttttaggaggagtggctgaactaagaaaaatatgactttatatatccaaaatatatactagtgctacatgcacattttaatgctaattagttttgtttctttgcctatatgacctcaacatggggaaaagagtataagccttgtattttagaccagaagagacctaattctaattatttttacatttgagatagatctagcaggtggttcttacctgaaagtcttccacgactgagttacgagttattctgaaccaagtaagcaaccaaaaaagctaaaacatgttgggtttcttctttcctctccaggactgcaagttaggtttggaatggtcagggaatggtacgggtttggtgagagggcaactctaagtttgactcctggagtctttcatagtaaggctcatggaattgcccatgtgggagccagagtatagagtagaactgggcttgaaaatcgctttggattttcatttctgatttttcagctataaaatgagagctgggacttgttcctcttacctctgagagccttacaagacatagaggaatcttaaacaatcaaatgttaagtgagaaagctatttgtgcctcctaaaaggagaaaagaatattaacctgacgtggtattataatgtctcccagagtgagggagaaatgcaaggaacccatagtgattattgagtttatagatgtttctattcatgagcctgcaggaaaacgtagagaccaaacatttcagaaaatgaatgccctaggatgattcattagagcagaatgaaatattcagaaacttatgagtctataaaatatttttggagaaaatgtgtgagttttccagaggaacaagatttaatattttgttttaaaagactttattagttgtgagatgaatagaaatattggtaggtttcctttaatcttttgcatatcatttggcttctccaattagaatggcttggcaatcttatgatatttgagtacataatcctgctaggtaggtcaagagagtaaaaagtaaatttcgtagaaattatgccaagtggtaaacaacttcaggcctttttttccctgcagagtcccatggccaactgttctttccatagcaaacttttcttcaccataaacatagcatcatgccccgggggctttaaaataatgtttgctgctggcaggtgatgccaatgtctgtggctacctggagcaggatctatcatgtctcagtgatcccaggtggctttggtccaaagcactgtaactggacctttgattcacttcaaaagaaatgaacctttcttcatgccattgatcgccattgaaaagctccctcaaaggtccctcttagtaaatccttgacacctttcaggtcccagatcatggtttatctgctccagtaagcttttctctcttacttctctccttaaatctccatttccttaccatgaggccaccctgtggtttagtgctgatacagtgtactgtttgaatctgctgttgaattatttctcaagtattagacttggatgtagcctcataccttttactacccttcctcttcccacaggacctagtacagtgctcccaagctgtgctacttagaaggttgctagctagctagctaagccctgacattcctacaatagccagtatattggaacagccacaaagctaataatgggcctacatcctcagggtcatgtgtttgatacactccccaactccaggaggcaccagtcacatggaccatgaagtgaatgccatccactagagttgtgcagcatgggagccctgaatgacctaggtcacacatgatctgtgtttacacattcctgcattacactgcttggtctggagagtcttctctacctccttccttttaaatttttatccatttcaatgagaagttaaaaattaggagtgaatctaacccttccatactccctgataatgctttcagaatgaggtcctggacccttgcatcaggaaaacctggagtgctggctaaaatgcagttttttcagcccctcaacatgtttaaatcagtttaggaccgggcctggggattttgataaacgatgttgactgatgatttgtatgcagtgcactgaagtggtgagaaatgactgttgaatagtttctcagcaagggaaactgtagtgccccaaagggttaataccgctgtccttaacctgttgcattatctgttgtaaaccttttctggctcatttaaattcagcaactacttagtgagcagttgctctctgcctaccactgtgccagccatagtggtagaatcagatgcgaagaatggggtctttgctgtgaaggggctaataatcaattaggaaataaaagacgtgcaataaatatgcacaaacacattaatatgtgcatacatatgcatactatgtaatgatttatattacatcatatagagatcttttatatacatctagtatagtatactctagaagatttatagagagatcttttttcaaacaaatcattattggtagtacaggcctataggattgtcagattttagatctgagagatatcttagggataatgtatagctctatcctgcagaggagatttcagtacatcagccaggcatttcatagaggcacacacacagtctatggtgtagtccaaaaaactatagcgtttagagtttcggattcaaatgtgagctctagtaagaagtaaatggtagttactttaattatagataaataagattgttgtttatggtgagacacattttacatgcattcactaattttagaaaaacttaaacctactttcatgtatatttataattttagaccatataaatataaaaatggataataagtgccttagctttacataccagctatttagtaaaaaccttctgttactttctatgggaaacagagattgaaggagagatcaagaaggggaaaaatcttatttttgacaattatcctatgattattacgttaaaactttatttcactggaatgcttggcagaaaggaatttttaagttaactgaggataaaccagaaaaccattttttcttgcatattatttctctaaaattttattctagtataaaattttatttacagtgtgaattttttttcttttggtcacatctttatcatttgagcattattttcattagataatttattcatctagattagaaggttatgggagcctttattaaaactttattgggcctgcttcctacagagatacagacacttacacctggaaaggagtcacagattatctcggttaatatgttttgcactgaagaaagtcatgttttaagatattaagggacttacagccattagaacaatacttggcacatggtgagtgcccaagaaattttagctgctgttagtagaatttgaatccaagtcatttgaatttcagtttggtgatttcttctcagaaatcttctacttaattccttttattgacccctggtcagactcactgagaatcttttttgtttgtttgtttttcctttaaatcctaattctggattcacttcattttccttatatcttatctcttttttccctaaaagtaaagaagacagaataaattcagtacttgtactttaaaacttttattgtcctcatcagggccagtctgaggatttctgccatgttttataaaatttatgcccagcataatcctgattttttactgccttctctgtgcaaatacacacctaaccttatgctaatggtggcactactgtttcttcatgacaaggctttaaaaatttctggaaactttaaaaacgtggaataaaaactgtgggtataatgggggtgggagcaggaaatttgaggggaaaccatagacacattatgccaaaggttttggcacttttcagaggactaaataactttcttcttctttttttgttttaaatagaagcaaaagagaaaaaaaggtatcaagcacagtttgctcatagaaatgagcaggtttggtagatatatttaaagatgtgaaagccaggaaaaattattaatatgctaataatttgtatttcctccattctccaaacacatacttttatcaagaggaggaggctaaaaataaaaatagaagctttagaaaagtaaggtttttcatgtttttttcttgtttgtttgttttttctctgtcagtcctcttacagtttttctgtagaggctaaaaagagatcctaagccaggaccagcacattcagtggcccatcttaaatgggattatttgaacaatttgagaactcttgggtcaagccaaaagagtgcagtagaaaatcaaagacttgggctgctgctggcttttctcctcattttctttgtcttcacgtgcagctcgataaagtgttggactttttcaaacacagaaacagccttaggggtgttaaatatgtgtgtcaaattttttcctaatggatttctaaatcttccaaaaacttttaaataacttgttaaaggctatatgtaacgcttgtatcgtgtgtgtgtgtgtgtgtgtgtgtgtgtgtgtatgtgttttcctgccactaagattgaattctgtcctctgtacctagaaaataatcattatttcttgaaacaaaaacaaatgagatgataatagttttagctttctacttgggtttcctacagcctttaggttgtgtgtgtgtgagagacttcttgattttccccccctttattttatttggtgggattcttgaccttgatttcttaactgattccttgagggttcttttatttctgccatagtttgtaatctgtatgtctatttaaaattgaattactttttttaataagaaaaagcgatatccattcaataacagattttatcagaaagaacttcatttactttgttttaatcaacctgtcttttctcttttcagaggatgttaagcaagtttttggacagaccacaattcatcaacatattccatttaactgggattcagaatttgtgcaactacattttggaaaagaaagaaaaagacacctgacatatgcggaatttactcagtttttattggtgggtctagctcttaaaaagttaaaagggtatggccgggcacggtggctcacacctataatcctagcactttgggaggccgaggtgggcggatgacgaggtcaggagatcgagaccatcctggccaacatggtgaaaccccgtctctactaaaaatacaaaaaattagccaggcgtggtggccggcgcctgtggtcccagctacttgggaggctgaggcaggagaatggtgtgaacttgggaggtggagcttgcagtgagctgagatcgcaccactgcagtccggcctgggtgaaagagcgagactccgtctcaaaaaaaaaaaaaaaaaagttaaaagggtaaataagtaaacctggaatcaaattgtgtgtaaaagtcctgattggagtcttgaactgtgatttacttactacatactgtgatttacttactacatacttactacagtttagcctggcaaaactgtcccattgagaagtatttctttattaatatgttgaaatcatagaattaaatgggatttccacagatttatgtagaactcctccatgtttagaaggaatacacattgaggccccgggaaatcaagtgattttctcaaggtcacttagatcaggaggggcaaaattacaacttaaaattttggcttgtgactcgctgtgttactacttaccaatattttgttttcccctggaaatggacagatttgtcttcagcttcagaatcatttcatctgacaccttttatagataagacactagtctcaaacttggctgcatgttggaatcacctggaagctttaaaaactaatgttgcctcagtcccacctctagagattagatttaatgggggcaggggggaagcctgggtatttgagggctatttaaagcttcttgggtggccctcatggagaaccagtgtgctaagggcacttgcgcactttcttatgtgggttaaccgctgtagcagttgtctacatttctggggtgcactttccctaacccagtccctgctgcccttctctcgtgacccccttcccccacccatatgatcatatcattgggccactgatgatgcaaggagaagagtattcacaaaatatgattataacttagttttccttcagcagcattatttaaaaatactttaaatacaacattatcatgtagtcactagaggtcaatatctataggctatatagatgtttatgcatttgctttgtttctaacagttacattttatttatactttattaaatatgtttaaaaagactcatgtaaggggactcatttggtatgtttacattttgggtcttgaggaaaattttcaattctttgttactagaaatgtccttagtgggtatcctggtgcccctggctttttcgtgtgttccagaccttgccagagccctctggggagtggttggaatcctgttctgggtagaggtggagggtgcacgggttgtggtgctcacttggtaaagattttgtggtgtccattcttagcaactagcatttgtgataggttaacttcaataggtacttctctttttgaattttcatggtattattatgattcatataatttgtcctgctgtctagtttgcttttattttccaggcctttggaaacataaacaagatgccctaaacctgcctttgtattttttaaaaacaaagcgttaatgtctgtgaatccctgttttcagttctctgtaaacataaacctacttacgtaactcagatggagaatgtaatgtgagttgccggatttttgctgctgtttccacaggacattgttgtgctgtaggaggcggtattcattttgatgaggaataatgacaataatgttattgagacaaatgcctcaaattgactttatggaacacagcctaattaacttttagttttaatgggatgttagcagtagtaaggatgatcgtgtttcctcctctaagcaagtgtcaattatactgaattgagtagattttcaactgctcacagcagcctctgggccttcctccagatatggggaagccagagtccaggattaaataactcagggactatggttatgtttccaaacaatttgtaaggcattcacttaaatttgacttataatggtaaatggaaacatcccacagtgtcctatgtgggatgattttgcctctgtagccagaatagaagtactgaacttttactagattacaatggttatagtggtgaatgatctcagtcagggccttgcttttgtgtcctagtccagatccggacttataggaattaatggatggaccatgataggctttacctgaatgccagttttaatgtctaccattgggtttcttccttccttccatttcatgttttgtttgcttcatttgaactcttttctgaatgtaggtagagcttcagacctctacttcagatgctttgtttgcttcctttgggctctttctggatacaggtaacttcttaaagatattagtgaatttaatctgctgtgtttcaggctcttgctttgtcaggcaggtatccgcctttctgttcttgggcaggactcagaaataggcaccaactccctggctgatgccaaagctgtgaaggcagatgcttggttgcttgaaatgtgaacaagctgccactgtgcatgctgctacctgtcacatgatgaggaaggggagcagccgtagggacagccaaaaagtgcttgtgatttcagggaacttgtatggcatgtagagacagcactcctctattccactgagggtccctagaagatagctcaggttggttccggccagcacattacctgtgcttattatgtatgtatatacatgtgtgtgattggtggggcagtgcagttctctgcagttcctttttttttttttgtcacttaataaatgttttactatatctaagcaagtgtgagcttcttagaaaccaccatgtggctgtgaggatcttacttgggtcatgtgtttatctgtgtagagtctggacaggtccccacccactaaggtgttggcagtcctgggcattgcttacatggtgagttgctatgtccttttctgtgctttggttgtaaaagtcataaagtggtgaatcaatttgatattatttgagctaaacttgactgatttgtactttgcaagtggtaaatcaattcgatattatttgagctaaacttgactgatttgaactttgcatctagtaacattgaagcaagtggcagggatacaaagcctccttcctgtagtcttcttcctcattggaatggaaagatttcagcagggagtggggtcacatttctcttaccccattatttatactgttacatctgttgctgctattttttaatgcccagttaacttcatctccatataacttcatgaatgatggtatgtgtgaatgtgaatacagttgtatatgtgggtaggtatgtgtattttaaaatattctgtaaacctctccacgtatgtctactcccagctcctagagcaaagcctctaattttatagccgctagttttaaaatagattttaatattctttgtattttagaaaataatttggagaaatttttctattctaatctgatggaactgtaattgataaatagtattaatgggctgggcgtggtggctcacgcctgtaatcccagtactttgggaggccgaggcgggtggatcatgaggtcaggagttcgagaccatcctggccaacatggtgaaaccccatctctaccaaaaatacaaaaaaattagctggacatagtggcgtgcacctgtaatcccagctactcgggaggctgaggcaggagaatcgctgaacccaggaggcagaggttgcagtgagctgagatcaggccactgcattccagcctgagcaacagagcaagaccctgtctcaaaaaaataaataaataaatagtattaacctaaaactcggtattttttgtgtgtcatgatgattactcatgtcgggcaaaccatccaattcagcaaatatttgctgagcatgtcgggtttgtcaataggattttgcaaaggtttgaaaggtgcagagactataatcttgagacactcataatgtaaaaatctaggacttgtatctgggtatatccacctgacagtgcaaaaggagcaactacaagtaagtataaaatgtttgccctatgagtttgttgttttgtagcaaaaacccttaaaggtttgtggcataaaccctaatggcaggtattcacatcctttgccaaatttttttttcctttttcttttctttcttttttttgtttttgagacagggtctcactctgttacccaggctagagtgcagtggtgcattagcgctcgctacaactttgaatgccagggctcaagtgatccacccgccttggcctctcaaagtgctgggattacaggcatgagccaccgtgcccagcctgctttgccaatttttttattgggtgactgtcgtaggcacttgggggcacagaatgaaaggtttctaaaacttttctaccaaattattgtgtagtcagtactgagtcactttcaaaaaagttacaataactaatatctgtataatgtttataatttacaaagtgcttttaaatattatttctgataatagcatcctcccaataacctaaaaggtgattatcattatcacatattgtatgcaaaagaataaacctactctatggtaaaattttgcatttaccagtaattttccagggaaatggcccatagctttcattatgtttccaaagaagtatcccaaaagggtggtaaagagcagctgttctagagcttagcttctgcagtcagatgacaggtgtgtgacaaattcaagaatacgatgccgttcccactctgttgcactttctccagatctaaggctatagacagctattttctgttcctagaagttaccatgcatctgaatggcagtgcccagtcatgcattgctaaacatctagcattcctgacccctacccattaattgccagatgcgatcatcaacaagttcttaggggtgcattgtactgtcatttccaggtttttttgtttgatactgttttataatcttgggtatctattttacatgtaattactttaatttgaaaacagtctacacataggagtttccactggttccaatctcaggatagaaaagtctaggattactacaaaattcaatatttctgttaactagaacaacattgttattagctacctctcatatagcattttctagctaagaaagttcttgtattaatatttgtccttacagtcaccttaggttgttggtgttgtttccctatgaaagctgagtgaacagaagcctaaagaagttttctggatttgttcaagattagacaggtggatttgaagttgaaattaatttttctaaatctctggcagtttttaccccccaaattttagtgtaaaaattatctgagatgcgtatttagaaatgcagagtcccaggcctctccaccgacctcccctcccaagactcaaatttagtagttctgaatagggcctaagaagctgcctttccaataagcatcctaaattgcgatgctctggatggttcaggaaccacattttggcaaactttggtctggactaggcaaccctgaatgtgtaaaggtaaacggctctttatcctaagactaatgggaagtctgtcgaggcaaacctcataagatttgtgcttcagaaggatcactctactattgtgtggtaaatctaatggagaggaacgtgaccaaggagagggagaccggttggttgctttttaagccaagagtcaaacaactgtggtctcagttggatggtaacagtgatgggccagagtaaatggagtcaagagaacttacagggataggccagacaaagcttcatgatttaatgggaaggggacagtcatagatttgcagaactcaaggttgactcttgggttttagccttgggctagtgggaggatggtggtgtttcattgaaatagggagtacaagaagaagaggaggttttaaggaggggctacagagtagtgctttatatgtaagagctgttcacgtgtgttggtgtattggctctgctgcctcttttcaattctttggtgttgagatgatttactgtaggaccctacctacggcccctgtatagttgggttttttgaaggaattttgttctgcactttatgtcgccaggaaatttcttctgtttccaggggtcatccagctattgctctaaaagcatcatccagaaattgcaatgctctgaattgtggagaggcctgattttgaggttgtggattccattccactggctagctaagagacaggatagctgacctgagagggaatgaggctaaaaatcctatctaatggcttctcatcaaatagagtttaagaatgaggtcacctgacccaacagagagctctaatcacaagggcttgagtattttatcatagttttactctggtcctcattttgtcagaagaggatgatgaaacccaaagacatgaattgtagtaaatagagctaggaatagaacctggggatcaaagctgtgtctggcatcccagactggtcattcatattagtaaggatccttgtcctcagatcacgagtcccgtgataacctggttggatgccaaagcatacccatgctagtaatgcaactgaacaattttggttctttttaagaaagcagattgaccattattttggcttcttggtcagcacagtgtagaggtcagcctacttcttttctgtgtaacatgaacattttggttatttagatcctgagccctagagagtagaactctagaagtctgctgctcccgggtgacggtagttgccaatgtccctctacaagccagagattcactgctgctggtcagatgtggtcctggctttttctcaccatcagttacggtttgcgactctatttgtcatagcatcctggtgtaaggcaacaatttcaacacaagaggctataggtgttaaaaacaaaattgctactacccccgcccaaccaccaccaaacaaaacataccttcatccatggcaaccccaaattttctagctttagaattaataagcgatttcatgtgttcataaaaaataatcgcttgtagtagaactggctgaagccgtaattctttacagatgagtggacaattaacaaggtccttgcttaggtttaggtttgagtaatctgagccatttgcctctcccttttgtcccccaacttgtcttgtttgtattagtgaaagtatctagaccatgaatttttttttttttttttgagacagagtctcactctgtcacccaggctggagtgcaatggcgtgctcttggctcactacaacctccacctcccaggttcaagtgattctcctgcctcagcctctggagtaggtgggattacaggctgcccaaccccatgcccagctaattttttgtatttttagtagagatggggtttcaccatgttggtcagactggtcttgaactcctgacctcaagcaatccactcgcctcaccctcccaaagtgctgagattacaggcatgagccaccgtgcccagcccgaccatgaatttttagtggcccaagaacccagttgtattttcattttcactatgtgaatgccttttatgttgattctaagttgtatcaggtggggtctgtgatgtagctttggtattgtttcataaacagcatcatttggtgttctcaaatgaactagtgagtagagcacattagtgttgtttgccttcaactcttccactagatgagattctgttttgtgtccaaatggaagccattgctagtttggtgatgagtaactagagatgtgatcacttggacagtaagatgcaggacacgttccagccacagcacacactttctactctctgggcaaagaaaatcaggattcattgtgctgttgtgtttgtggtgttagcttgctgttttgttgagcagcctgttgtgcagggtttttacagtagcatcctggtaaaaatgaacactctatacagcatctccccagctgttacccactgtgaagtttaacgttaaattagaagagcaaggaaattgagatggaaaagctctgtatttggtttctgccaaggtgttgcagtgcatgctgagccacatgtgacactgcttccaaagacccttttaattaaaggcctcacccagtgaattggggatggaatttcaccctcaactctgacactgactgcatggccaaatggggggtggggggaggtacacatagaacaaaattaagaatggtaactacttatctctctacctattttattgctatgtttcatttttactttgttaaaaaatatgtggatcttcattttaattagaatgtttttcttcaaattagcatagattatgaaaataaagtggatatttatatgcaaaccagtatacaggtactgatatgtgatgtaatatagaaattgtttgggctaaatgtgatatggtattttttaggcaaatcgtctttctacatttttgtttcctgtttcgataaacaattagctgcattttgcccagaattcttctattaccatgtctaaaaaggaattattttgaatcatttccttattaactctttgcttttattaatattttagattttgttaaaatttcaaaacacaaaaatgcaaattaaccagggttcaaaaaatatatatatttattttttggcatttttggctttataatataaatcacctggctctcctgcttgttttgagggactgggttttttgggtttttgttgtcattgttgttgttgttcctgataaattgttctcaggctaaagcacaaacttgcatgtctgaatagagatggagagaatattttatattcaaaatatacctacctgaaaattggagattattaaggaaatgacaggcctggaactattagaagcacgaatgttagacctaaagtagtgtaacccctatatatgtttattctgtacaactagcaattttgaagagtttgattttttttttctacagcagtctgaatgggtgtgttgaagtagttggaaactgctgcaataaaagcctgttgcattaatcatcatgcaccagaatagagggaacagaaaatagttcactggcacatattaaagagaaattgggcctcctttcatgtacttgagtggaactgccttagagatagctgcagaactcctgctcttggaccttctggccttaggtgataggaagggccatttgtcttcagttggtaactgtcttcggcagcagcatttagtaagcacccattgcctggtactgttaagagctctctttagagagacacttcattttctcagctctctggatttgctacaaggtttcaggccctgtgtcttattttctttattcacttatttaggtatcagtttgatttttgttgtctgcctgctctttgtatgcactgtgggatgatctcacccatttctacaatcatctttttcttcatctggtttttggtaggtcccctctaaaaggaacaggcagtctgtgtaggctaacatcatggctccagaagccgactgcctggatgcatattcagtttcatccttgcccgtgtcacccttggctcattcttacctcatttttccatcttcagaacagaggtgatggtaggaccacctcggttgtggagaggattcaaagagatgaagcagggaaaacacaacagtccctgggacatagcatgcacttaataacttagtaaacgttctccttgtgatgttttctctaaaatcctgttatctgaatttcccagatctgtatttctacctgtaccttcagctttcttttgtgtgcctcttaactttttgtttataactgaaactcacttcattccaggtttttcatcatggtcaaccacctcatctctttccccttaagtattttcctttgtggtagagtatcttccccatcattcaaaatgtggatttttgagatatatcttacttcatttatatattcaaatcatcatcaaaattttcttaaagtctcttttcctacctgtccaaatctagttatgacccccttatttatgattttgcctgaggcagcataagttagtagttaagaatctcagttttaaaagctgacatcccttgctttggatcttaactcttccactttttagttgtgtgactttaggctagttacctgacctctctgaacttcaggtgcctctgtgtaaaatgaagataataatcattacttcacagaagtattgtgaggcttaagtgaaatgctgtctttgaagttcttggcatagcccctggtctgtagtgagtgttgaagcattcagcttttgttatcctccatcctggctgatgttcatttttccgttcctgtggctagttcagaatgattgagcagaaccactgtttcatattgcaagagactttagaggtttttaaacctttcacctggacaaaaatcaaagccactgttttttaaatgcctgtcattcatgacctctggtttttacaaccctgcacagtaggtggtgttgtgcctattctgtagaagaaaatctgaggctctaagatgcaaacaatcacctgagctctcccgggtggcagtgtcatgacttctgtttacgctctacccatgcctgttccagatttcttattgtcatcataatgtatggcttccataactccctctattaaagataaggttaaattcttgacatgtgttcctcagcctatggttgaacacgtatttctggtgtcagggaacctgctacttttcaaggtagcccattttactgctgaatagttctataggttaaagacttcttctgtgtactgtgctaaactctgacccctatagcatctctccattttttcaaaagaaatagaggggcagcctaatattttttttacttgatagtcttttaacttttaaatatgtgaatgtaatgattactgcccatattgttctcccctcctctgcacagatgactcgtttacttctgatccccttcattttagaaataaatactattttgtatatgctatatttcatgcatactaaaagctctctgtctctgttttatcccttctgagttgagatctaggagctgtcagtctcttgacaacccatagtatacattcagattttcattaaatagcttttgaggtgcaaaccaggagctttgattttaagtcattctgccatgagtagtgagcctagtcatttatttcaaagaccacacatttctttcatatttacggagtaacctatgtgttagctcccactggcctcctgatttaattttttcctcctttgtctcttggggctatgggaaagagagcaaaaagggagtgaggccaggagaaggccttttagatttggtttctctcctccttggtctctgctactattggtaaaacaatcctgatgctctgggtgtacagaagccctttgccttaatggaaaactttagggaattttattatttttccacaaaaataggcaacagtaaaatctagagcattaaatgcaaattgagtttttatctttccacagctgttaagatttcttagtgtcaaatttattttttaatcaaattcctgacagtagctttgtctgaggttccccatgcagttgagtgaagtattaggagcatgggtagatagagggctggggagtagaaatgctgaggcttgaattccagctttactgcttcctgtcagtgagactttagtttgctcaactgctatagtgaggttaataatagtacctaccttataggcttgcagtaagcattccatgaattaattcctgtaaaatgctttacagcagtgcctgctgcataatacatgcttgctaagtgctattgcatggttgtcatactggttgaggtcatggtttcatttcttcacccggaaggagaaacagtcacgacataaacagatgatcttcagaaggcaacccacgtcttcagaatgctgcttttaaagttggagagccacctaactgcgtgttttcactctgtcctgctatttagagaactacatagatctagcattttgtcttctgtggaacttataatgcccccaatctttaagagctgttggaaatgtattctcaggttgttcatcatcagacttaaaataactttcttactccaacttgaggggtccctgctcatagatgtttaatcatggaagcgtgggcacaggatgtgttgtaacactgtcctaatcacaggtatgtcccctgtcctgctatgtgagcaccagcccccaccttggcatccattcccaatctggaattctggacaggctggtcttagcattgtggcttcctgctttctgaggagatggggttgccagagaaagcggtgccatttttggtataattgtctgaggatctctaagatgttgagttataaactagggaaaatggtaaatcgctgaacataccttctactattgttgagagtagtcttggcttagctagctttagcaatgggtctggtaattcaaaggagactgttcatttactttcaattgaatacgcactgtggtcatttttcactacagggtgtttaacagttgatttcttcttccttaattggaagcactcatatagagaacctcccattgttcaatagctcacgatttgttcattcagttggttttacagaatacttttcactgatgagaatgcctgtcatttattgagcacctactatacatctaaagcattctgctgagctgcatgtataaatgtaagtagatgcttacaggacttcaaaaggttatactgtcttttccttggtaaggtaggtgtaaaggcaggaatgtgaataactgattatgatgtaagatcaaataagacaagttttataattgatattcagacagggggccaccggaagggacatcagttatttccagttataaggcctggttatatttgcctaagtggtaccatttgagctaagcttaaaggaagtggcaggatttcaggagctggagaaaggggcagcagtctacactaggtggaagtaacgatgtgggcaaaagcccaggtgtgtggcaggtctggcaggggtgggcatgggtgataggagatgaggctaagactagttcctctgggggcttgtatgccttgcttcagagacgggtctgtatgatgaagggtcattggagatttccatggagggggagggagtcaggtttttaattctgaaaagcaactttttatgtgtgcatggtagaccacagaggtccagactgcaagcccaagctccagactgacagtcagaaccactgactctcagtgataatttagatgaggtctgaggaaagtctgaaccagtagcatcaggaacaaaaaggaaaaggtgcatttgggcaaactttcaaaggcctaagggacagaatttggtaactggtttactctgggagaaaggaagcttgaacaattcagaatgacagctttctaggtgaggtggccaataaaactacatgcctaataattaagctgtgaacatagaagagagaccaggtttgagcactgggttgggggatctacaatatggggttagcgatgtgtcattttatggcctttacacgatacccacgtggatatattctctaaacagaaattctggtccagcagaaaggaatgagacttgaatatgggagttaagccttagcttttaagaaatccttgagggcttaagagagagagcactctgtctaggagagtagagtgagaagatgtgaggacagagggccaacagatgcttcccatttaaggagccagtggtggaggctccagaaagactgggatcccagaagagagtttcagctgaggcaggctggttcgaaactggcagatggctacaaatgaggagattcttttaaataggataagaactctgattcttactattaaatgtcttatctttaaaatattttaaatgtagacattttcaaactgcaaaagtagaagactataatgacccatcatgcaactgctatttggcttccgttattgcaaatactgtatttcttctttcatctccctgcctttctggggaaggaaaggaagatcgagtactttaaagcagtatcagactcatgtcatttcccttacactttagtttgcacaaattcataaggacaattattttttacataacttgaataaatacgatgtcattatctcactaaaattaaaaattaatttcttaatatcgtctaaaaaaactccattatattcaaataatttgaagtttttgagagccctgttggtgttcctttttttttttttttttttttttttgagacaaggtttcactctgtcacccaggctggagtgtggcggcatgatctcagctcactgcaacctcctcctccccaggctcaggtgatcctctcaccccagtctcccaagtagctgggactacaggcatgcacctccatgcctggcaaatttctttttttttttttttttgtagagatggggttttgccatgtggcccaggctggcctggaactactgggctcaagggatccatccacctcagcctcctcaagtgttgggattacaggcatgagctactgtgtctggctggtgttactttttaattgcatagaagttagctgtcactgcaagggccctgtttgggaaatgagcagagtgttgtgaggaagataataaaatgctctctgcaggaggaatgttccttccatatagtgcacagtgagttttgatgggaggctgttttcttttgtgtacacacttatcccctgggaatagcaacagagctctgtgattggactttctgtcttcagatcattttaattaaacatatgcaatgataccatgacaggtttacctcccctgatccacataccatgcaactacttagagcagtagtccttaatcaagacatatggctctatgcagagacatttttgattgttatgaccttagagggaaggggctacttgtatctagtgggaagagaataggggtacacacgacagccctcccgtaataaagacttaccctgtccaaaatgccaataatggcaaggctgagaaaccctgtgttggagaaatagcagagaagaaccaccactcttttctatctattgttacatcatgtgtttgggtaccaggttgcagttaagaatttttctcttttctttggagagaagttaaagtccctggcagtgtttttcctcagatcatctgcatcacctaagctggggttggccagatctttgaacctacaacacttcattccggttttcattttctttgtgttcatggactctagagagcacggaagtaattgggtttcattgggtagcagagtaaggtagagtgcactttctcaagacatgttcattggtctgagcaaagttctgtctcttggaaggagacagtagcttggtggtgctattaggcagatgagggcttgttagatcaagatgtaaactctctttcttcagtctgattttaaaatgaactgtcatttgtagtaattattaaatgagaagcataaattaagtattttactttctttatttgtaggaaatacaactggagcacgcaaagcaagcctttgtg

SEQ ID NO: 15812 - DNA, 38458 bp, Homo sapiens
aaggcctcaggtgattcagctcgaccagttcttctacaagttgcagagtcggcctacaggtttggtctgggttctgttgctggaggttagtcatggatgagagaaaaattttcacttttgttattcctattctcttttctctgattttccatcttgaaatgttaaaggacaaagtcttctctagtctttcccaatgccagttatcagtttctacctgtgaggtagggcaagagtaaagggaactcttttcccatacctgcatgtgatcagggacttacaagtggcattttcctctatctacagatcaggccttccaaagacaggttactaatgaggttgggctgtagcaatgtgccttaatttaaaatatctatgacatccttttattaggggatacttgaatgaaaaccctcaattgtttattaaagatataagaaaggtagtactgttttaaaatctgtatttaaaattcaaaacacatttcttttctcagtcttgtccttgactttaactaccttcttctttcttctgacctatcttactttcttctgagataatgatattgtttaattttagctgttggagccactgctgtgtatcctatcgatcttgtaaaaactcgaatgcagaaccaacgatcaactggctcttttgtgggagaactcatgtataaaaacagctttgactgttttaagaaagtgctacgctatgaaggcttctttggactgtatagaggttagtgccacatgctcaatacctgttaggtgaaataacactcaaaggtttggtttctcatcttagtgcctgacatgaattagcaagactgcgttaaaatggaaatacagcagattttcaattatccatgctaatgggagtaggctggaggcatctagggcttggctaatcaaaacagcccataatctgaaaattatttatagtgctctgttgtatgttttatttcttaaaataataaattatttttataagcatcttccgtgaatttttgaaaggctcacattgtttgcatccttgaagtactctattctccagctaacagggaaaggtattctgccaccaggacaaagcctactcaggattcatgattttcctggaatacaccacaaaaaagataacgaagggttcagtagagctctcttttgctgcttcatcctgaattaaagttgccccttttcttcatctgactctcaacccaatggagttgattcacacacccctctagccaaggtttccccccactgagacagcctgaaacaggtaatccttctttctccaccttttcctttaaccatctaaggttcattaagcaatggaagtagtagcagagagtatgtcatcactgatggaaaggatcccacagaccctgactgcttttccactggcattggccgaaggagacttctcaactgttctttcggggattgccttctacgagaaggaaacagtgtttctgcatcagttaaaatacagtatcacaaggcagttcaaactcagctgctttataatttggcagcggcaaagctggcagagttttccctcctctcccctactaatgctctctctagatgaagaaaacagtatttagtactctgctgaggtggacggtgaaactggcagacatggaaacctgtgcctctgggcctcttctgccatctgctgactctagtcttcaaattaattaccccagttaaaaaaaacaaaaaggataaacctttcttgaaacctctcaccttagaagccagaaagtctcaaactccagagaagttccattttgcaggtcctattgtgtaggtaggtagcccccatcaaaggccttttgatctttgctctgccctcttttccttatcccctgcctcttcttacaatttggaaggtctttgacctcaggtgattgatgatgaccctttcagggtcactgccttccatttgaaatgcttttcttccctgatggcaacaactttgcaaatgaaatggcttccaagtagtacaaggttaatgtcacagttcctattctgcagtgagtcaggcaaaattggccgccttacctgtccatatgggtggtttttggaagggaaatctcgagtctcaagtctgggcagacatctgagcattgcttcataaactactttttgggcttttcttggtattagattaaatgtcaaggatgcctttagaattgtaagaatgcttcccaacactgctcagtgtctttaatttgcttaagttgattttttattttgagtccttttttctcgatctttgaccatacctggcaggtctgatttttggttacgtctatatttcccttttgcaacctgtactgttggcaactagaagtgtgcctgagtactgagtgctgagctaatgtgggctatgcaaagaggcttccactcttgccgtttcagttcttttatctgtaagatgagagtgactgcttttaacttctcagaggagtagtaagtcaatatattaggtacagacagaggctcactgtaaacacccaagtggcagctcttcacccttttcctggtttagaaatggccatttatctttgggtgccccaaccttaagggcaagagacagagctgtctgtcaggatgatgagtagagtgtgaatataagattagttctaggagtcacctgtgttcatttcttcctgatatcttttctggtaaaccattttaaaacaaaaaatttactgtaaaatttttgtttagtcccattctgtaatttggatcatcttgagagcaaaatgatgactgacagttcaggttaaaataataatgatacataactttgccatgaaaatgacttgttcctattcttgattggtcagggatcagttctctttagtttcttgtacatcatcaataattaataattgtatataactgcatatttgtaagtgcttattgggtaagagagatcagatgaaaatgtaggtaactcatggttattgttgttaatttaaaaaattacaatataagtaaaaaagacctgacatatttctgagactcagtattatcacctttatgtacaaagtcacattatgaaatacctatatgtgattctttgtacatttctcataaaatgtaactttattttaaaattatattattccagaggaaaactgttacgtttaaattaggaaaatatagtattgctgctattaatgctttcacctagcaatatttgagaaggtatcagagtacatctttaattcatacatgtttttaaatattgagcatagtttttagtattacagaattttgctcaacatgtaatttttctctatcaaggcctatgtaattgctcatatttcctgaatgagataatttgggaatgttgcagttgtaagatctttctcctactttaaaattacctttgtgtatactttgaaaaaagttggcatctggcctcaaagaaggtgtttttgtagcatgcgatcttattatgaggttaataaatatctctttttcttataacaagaatatcagaagctgtttttgcatttaaaagcctttccctgtggcattagaatgaaggttattttaaaagaactcttgtagtgctccaccacaagttttgttctttgcctcccccgcagctggctgcatcagaatagttgtggaagttgcttggtagtcatgagagagtgcctagcagtgctcttcaatagaaatatacctcagagagtcatgagaggtgttgtgagttggttaattcctgctctccatgtattggtataactccgttttctttatttccaggagcctctctcctatttttgtgtaagttttagttgctggaaaagagctccttaaaaatcccatgagtctggctctgcaaaccttctctacagtgcaaactacttttttcctaacaagaaaatggcaaattttcctagtttgttgttgttgttgttgttgttatttctgaaaatccaacccccaggccaagcctgtctgtattaagggaaatcacacctgagataatccaggtcttcctgaagtcacttttaaaattctttctctgtttcctccccagtcttcagagtgatttaatgtgctcaggtatttgaaatccttaatgaattacctgacaacttgtttggtttgaatgactggcataaccaaatgaatcagtcattggcctgctatagatctggcgtattaaagaacaacaattgattgggtaatcatccataattaaatgctcttaatgttccaggaataaataatttctgcttttaaactttgttgcagtcttctctctcagatctttcaggtgatgagatgagcagccttagacactggaaaatgttttgggagaatcttggggaaaaagatgtattaagagaaatatggccgggtacggtggcttatgcctgtaatcccagcactttgggagaccgaggcgggtggatcacctgaggtcaggagttcaagaccagcctggccaacatggccaaactctgtctctactaaaaatacaaaaattggctgggcataatggcgggcctgtaatcgcagctacaggctgaggcaggagaatcgcttgaacccaggaggatgcagtgatctgagattgtgccgctgcattcctgcctgggagacaagagtgaaactctgtctcaatttagaaaaaaaaagagatagaaatcagggtctatcagaaatacttcttagacgaaaatttttgtttctattgatgggagaagccctaaagaaaatctcccagaaagagtaattagatcattttatgaattaaacttaatttaagcagtgcttaacctttgaggaaattggcaaaaaaaaaaccacattttttaatcagcccattgatccaagcttgcagagttgtaaatatttctatttcaagttgtctgtgtagtgcaaagcagtcatcttccatcctggaatgttctcaaggtgacatctagaggatgttgtggtgatatctcagggagttattgatacttttatattgcagagggaagttttggcaggcagctagtttaagccaggtcccttatcattgatggtactataaaagggagtatccagattctttagaatcacagtgagattcttcattcttgcataattcatggggataaaataaactttaaaattctggcaccaaaataaaatgattgaaatttccatgactgttttgcattacttaagaacacatgcatcttgaaacaaaccatagttaatctgtgaactgcactcatgtccatccatgtccaccaaaacttttaatgattgcaaaatggataggtttgagtctttattttcttggccaatttctgcacgttttcatttagagcattaagctataaaaatatcagaagacatgtatttggttataggaagccacataagaatgagcagaagatttcaacagatcatttgttgggttagccaatctccagaaatctacagtgagctaactttagtgagcacagggcattgtaatctgagactgaggcgacacacactggatctaaggtgggtgagagaattgttagagacttgagagtgctacagtaacaactgatgaccttagaaaattggaaaaatatgacaaaaagatagacgtgtaggtatcctagagaagaggttaatgaatgaattagttccacacctcaaaaatgataatttataaccagctactgttgctgagactaaaacaagggagatagattaaacctcagtaggagggaaatagtttagatagaagaaaagataaccaggatcctgaacgttctcatgtactatggtgaaaaactgcaggagtatctgatcgttttccccaattctctttacttctagaaagccccagaatagaggagttgaggaactgatttttttccagaccataatcataatcacttattttatgttttaacactttgtctcccaaaggcatcctgagccatagctaagataacagacagtgcttgaaattttgagtgtaaataatttaacctagataaactggcatttaaatcttcatttctgcatttgtccctggctatttccccagctccactgtacagccaccttggggtagcagcccaaagagcctgtcagaactgggttgtaatgaaggctttgaaaggcgatagtgtagttgggaaggtggaaatgcctcatgcctaggggcaatctgagtcaaaagcagacagacaaatgggaggaggaggagggaggaaagaatgcttgagcaagtgaagagagaagggcatggcaacaggagcaggaataaaaagctctaaggcagggcacacaaagtgctgatagctgcagaatgaaggttaatctgatgttgaaagcaaaggggtttctcggggaagatagggacaagtgttctggtttcaatagtgaggtcagaagggtaagaatttgacatcggaggggttgctaccaggtggaaactagataacacaacagtgtgctggctgtggcttcagctacaggaataggggtgtcttctggattaatttttccttccaaagtttactgctcgtctctgccctgaataccttctgccctctattagatgctctcagctgtctttctctggtttgggctggcccctgtctcagttctatgctgagatagaactggtaactactgccttagttaccaagtttcttccttggtagtagcccctccacctctgtggtcctgctagcgttgcccagcgtggtcctttggcaccctggccactctgggttacagtagccgctcagcgtggcttcaacccactcctgaccctgcgccttcttcccagtatattcctgctctcactggttcaccaggttataacctacagcttggctctgacattcagtgccttcgaggttttaaggagtctaatattcaccatctgtagagacgggggaagcatgatgtggatgcctgctacatgggcaccatccctttgttgtgtacaagggtcaggcagggcagggtgctgacccagcctgagctgaggcctagagaaaagtttcagaacagtctagttgggaagaaatgcctttccagggcagaggaggaacttggagcagtaagtctgttagagaaaactggtaccgcagagaattaaggagcacagagccctgatttgagagtactggcaggcctgaattcaactttgagtgctactacatagtcgctcagaagttagtgacttgaaacaagctgcttagcctgtctggattccagtttccatgaaggaggaggaggaagaataagtgatagtgatgatgaagatcaacaacaacaacaaaaatccatttctgtagtctttactgtctgtacttggtactggtctgaggattttgtgagtgttaactcatttcatcttcacgactaccccgtgaaaatggcatcatgattattcccattctacagatgtggaaactaagatacaaagagattaggtaacttgtccacaattacacagctaacaaatagcaaagtcagaattgaagctcagcagcctggctccagacctcgtgttcctaatcacttggctcttttgtcacctggtagaaattacattgtgaaaagttgcttgtcagcagaggttaaggatcatttaagtttttaactataatattttatttcagcttaataacatagttgaaatgtgttgttttgtctgtgccactactttaccttgcccaaagtatacagggcccctggacacttccagaccacatgtgctctcactgcttggggacagctgttctaagataggcataatgtcatgggcacagcatgatactccttagctaatggtggactgtgaacatgattcaggctgaattgcctcttgcaaacaaaagaaatcaaggctatgtattgaaaagataggtagaaagaagcattatgtcttttggaatacataacatatgaggtaaatagtgtctggttctttgtacacttattcatataattatcaaaataaaccaatagatagtaagtagcacccttgttttgccaagagggaacctagaattcaaagaattactacccaagatcactcagtgtgaaagatgcacagacctagcattctagcccaggtctgtccacctccaaagcccatgccctagattgttcattttgctgccagcccgttggaaatagcctaaaattagtttaaattaggccagcaatattgagtttctttcataatcccttccaaccctgaaattccagttatatttctaacaggttcttaagaatagcatgctagccctctagttgaacacagtgggcccaggaacctcttttggggatgtcctgtgaagcttgagttggagacccctgatctgggcttggtccccacaccttcagctccttggtttgcgcaagggactgaattcagaggggatagtgtgatttatatctccaacccatgaaatgtgaagacaaaatactacattaatactgtaccctgtaaatcttttctcgcattagcagccttctggtagagtcgagttgccaaggaagcattgccatatgtgctgatggagctgaactaaaaggagaagattggaaaactaaccacactaataaatttcttttgaggcagttggaaaatggactgctgttttgacaagttagaaacaacacacacatccattctctgtttcaaatggttaaagtgaatttccaggacccaacagaaacatcttatattagaaacctgatttttctgctgaattacccagatgtcagatatatatgcactttagacttaattgtggttgtgatgaagtgcctcacctagactctctgctttaggcattactgggctgtgctacctctcctccctctgaggtcaaggtacaaggagggagtttggaattcccacctctttgacttttcattgtttcacagatcatgaccttcttacaaagaccatttacccaagactcatgttttcaaggcccacatctgtagtgggcctcagattataatccagtcaccttcattttcctgtttaaccagacaaggtagtcactacaagaatggttcttatcaacaacttccgtgagtggcagcatctggcctaggtcttaggaatggatttgtgctttggttttattctaagttgaagttaatcatttaatataaggaagctcggggcctctaatatattaccttaaactcctagtttctctagcttcctcaggtctctgctcttgcaaactatccttcacctgcctctagaactttttactttttgaactttactttttaccctaaaagccaccccatgcatctacagaatttggtgcatgctccttagtgggcctgggagagaagttgtgcagcgtaccaggtaagagcacaggctggagtcggacagcctgggtggaaccccgttcccccatcaaacagctgagccaccatgggcagctcccttaaagtcggcctcagtttcttcttcagttgctgtggataaaacaaaagccactgtttaagtaaggtattgtgtggattaaatgtgttcattcacataaaacacacagtactgtagtatgtggatatagcgagtgctccccaaatattggctgttgtcattatcactactattaataatattgttatttattatctggtcttctgtgatccaagcacagcctccagtgccctgactccatgccatagccttaagatgttggtgcctttgcacaccaactgtttcctctgcctgggtcaccttgccctccattctgctcattgtctcatctttccggggaacctctgctcacccttgaagtcccagggcaaatatctcctcttctttgatgttttttcccctcctgcaggcagaagaactggttctctccactgggttctcatagtcctgtgatgcccctggggtctggtatgcagcacctgctgttgttaggtggtttgtcccccatctggcaggtggagacaactagcgttccctttccctctaaactctgagcttcttagcggggaggcaccagtctcactgtgttcatcccagttcctctcagtaccaggcagacagagaaggcatttggtaaatgtttgctgaacaaatagctacttgttgccttctttgtagtcttaaatacggggttttcccttctgttttttgccgttcacaatgcattactaaatttatggtgagaaggataaatttcagtagtttgaaaggctggctgaagtgattgtatctaacacagtagtcattaggctctgtggcctgtttttttattagtcatttaaaaagactgtcacaggatagttatggagacaagagttcatcatttaaatcacagtgctttcaacccatccacaattttggtctacaatttaatgatgagaaaaatacatctagcaagtaaatgtttaactaagcattttgttacttgatgtgaatacagggagaaagatgaaaatttcaattgtgaagaggtagtttaaacaggcgtatgcccacatattactagtagaaattaatgttgtacttttattaggtaataaccaagccttctcctattatagatatcttactgaaagatcagtgagtgagtgtcatgagtatagtttaggagagaatgcttgctttggataagaatgcttgctttgcccaaatggttgcatattcccgttttttctcatatgctgcctcagctcatttaaattctaaagagcacagccccactcaagctagcaagagcttaggggggcttttgataaacattcacacaagagagaaagaaggtagaaatctcagatccaagagcaggagctgcactggaggctggcctcagtgggacccaaaggtgatggggacaggcgctcccacctgtgtgcctttcatgggctatgtgcattctctttttaatctctattccttttgctccacattctcatctgtccaccaatgcacttcctctgcttattcatggtttctgcttccttgtgatattagcacacacgtgacttccaattggctgctttccttgctccacccatgacatcttttcatcttgttgcttctgtgctaacttgtcccctcttctctaaagactgtcagtcatcctcctggagaaggcatcctaattggccagctctatttttggtagcaggctcaggttgctgaactcttgatttgcgtgtcttttaggtgttttacattgtccagtcagctgtggccctggggatgaagcaggcttagatgttatagttgcttagtgaagggctgcaaactcaggacaggtgagatggctcacacctgcaatcccaacattttggaaagcctaggcaggaggattgcttgaggccaggaatctgagactggtctgggcaacatagtgagggcttatctctttgttaaaaataaaaaatgagaaaaaacaaaaagaagcgttgcaaactcaaatgctgataggatctaggcaggttatataagtgaacaaatgcagctgggtgtgtgagatgcaggtacacatttgcacattaacacagagttgagttgtatataaagatacagattttttgagtaagatggctaaagcttgtatcccagtctcaccacttaacagctaggtaacttggaagaaattactttatctctctatgccttggtttcctctctgtagagtggttatgaagactaaatgagttaatacattttgtaaaatggtacctggcacgtaataaacgtgatgcacttttaaagaaaattttcattaacatcaccatccttatccttgtttaattccacaatgaaggacttcctcccatttttccatgaaaacatgaagctgtattcatctttttagttttccccctttataaggctatgagcaaagaaaaaattttatcaattgtgacgatatcagtaaagcaataaaaatagaaactggaggccgggcgctgtggctcacgcctgtaatcccgacactttggaaggccaaggcaggcggatcatgaggtcaggagatggagaccatgctggctaacatggtgaaaccccatctctactaaaaatacaaaaaattagccgggcgtggtggcaggcgcctatagtcccagctactcgggaggctgaggcaggagaatggcatgaacccaagaggcggagctggcagtgagccgagatcgcgccactgcactgtagcctgggcgacagagtgagactccgtcaaaaaaaaaaatacaaactggcgcttgtcctcattgaggtacgggcctcaaagcagggtgggcaccaccttgcatggtttctgtctgaaggatggagcctcatgcaatagagcagatggctgggatgtcagaaagaggcccggggtcagtcagagttcggtcagaactgagcccatgaactgactgttaggtcagtgtgttcattgatctttttttttttttgaggcagagtctcgctccattgccgggctggagtgcagtggtgcaatctcggctcactgcaacctccacctcctgggttcaagcaattctcctgtcttggcctcccaactagctgggactacaggtgcctgccaccacacccagctaatttttgtatttttagtagagacagggtttcaccttgttggtcaggctggtctcgaactcctgacctcagatgatccaccctcctcagcctcccaaagtgttgggattacaggcataagccaccgtgcctggcctcattgatctttcttacaaggaggtcagattatgtttgaaactttttgttactcaataaaacacacttataggttggatacatatggcattcaagctagtgacctctcaggctgctcctttaggaagagagtgtgggcagggctggtccctcagaagaggctgtgagtggactttcttacatagataaattagaaaattgtacttccaatgaagaatattaccatgaacctctctcagtatgacacagggtgcaacatgctcctaccttcagggttagcttggtgtgtgtttccaagaaaaaacaactgtgatttaatttttttttctttaagaagaacaaatgaaaatgatgacattttttagttcagatacgtagctccactaaatgttctaactgccttccccaaaattggtccttgttttagaaaatcaagtggtccactgatttagaaggcagaagggaaggagcagactttgggggaataatgagatttcctatatcactaatactgttgatttacccaatgtgcaaacgatccagaatgtgagatggaatgtacttgggactgatgcggctgttagaagttagtacttaaacattccatttcaaatattctcattaagggtaatagcagaaaattgcagcagagattaagcagtttttaagtggtaatcccctctgtagaactgttgatttgtttagttaatgctaatttatttaatatacttctactttttgttgatttttaggtctgttgccacagttattgggagttgccccagagaaggccataaaacttacagtaagtcttttgagttggtgcttcttattaagggattttgtacatactcaagaatctagcaggtattcttataggaaacagcaggtttgttttctcagaggtgctagctaatttgaaagcaggggaactcaccacacacattttttcattattctccatttagcagtggacatccaaaaatgtgataataaacttgaggacttttggtggttgctgccatcattgttgtcatcacagcagtagcagctaaattcccttcagtatctaccatattaggcacatgacgtatattacgttttactggtttaatctcaagcaaagcatgatccacagtttacggataaggaaactgaggcctatcgggcttaagtagcatacctgtgttcacacaaatcatgagtgggagaactagaatttaaaatcacacttgtctgactccagagcatgtctttctattacacctgctgtttttataggattcatggttagggtgtgttctataaagccaaatgtgcagggatctgggttctagttgaagttgatcctttatcagattatttgcccagtgcttggctcacatttgacagatggttgatattcagtttaagcgtttgtggaatatacaaatatttgcatcactaaggccacaaagccccagaaagtaaaactctagctttaggttgggctgcgtagctttggagcctgaaattcttcttttaccattttgttatgtgaccttgagatagctaatcttctctggcctatgtctgccaaaaagatatgactgtttcttaaaatttcttgtactacataccattttgagaatattatattaattaattaatgtaatttatgttctttgagaatccttgaggaatttttagatattgaatttcttctaagctgaaaaagtctgctcagccaaatttatctccatgatgagtactgttttagattaattcttgttagaagacttgaaagtgatttttaatcaagccttataaaacagttttaagttgtaagatgtatgtttttattttgtcactattgtcagtgtgtctcccttcttaagctattctaattgcagaacatatttttggctttcatttatcttttaacttttctcctgaaacatcagtgatgcatatatatttttcattttttaaaactattatactattaagagtacttctcaaactattttaagatctgttaaattgtgcaatttatgattactccaatagactgatagaaaaaaatagcatatattgacagatgcatatttataagtgtttaatgactttctttatatttttcatcagcttctataaatatttttcttcaaggtgaacgattttgtgagggataaatttatgcacaaagatggttcggtcccacttgcagcagaaattcttgctggaggctgcgtaagtaccttttgaagctctcttcattgaaaagacttgtttcacatatatatcactaccatggtcaacaggtgtggactaaggcttctgtttaaccacagatcctgcacaagggcagagtctactagggcacctcggcttttcctagacaggcgaaccattccagaggtggaagggtaaatgtttctgaccttactgcctgttaagtcatgcctgttaaattcgtcattgcttatggtttgttctgcaatggaagtcatttgtggcagaagtgtttggcctttgaaaaatctttgctaaccttttctaaagttaatttttagtacattctttcctcatggcaccctctgctgggtcaggcactaaaacttgtagtctgaagtcagcaaccgtagctctctgcttggctttgccttgcaagtggcagaactgttcaagcttccactgcttttgggagaacaatgctgggaaataactggctgagtgtgcgctgcattgtcaaaaatgcttggaatgattgtttccttatatggatgaacaacttgcatcttgttctgaagctcagcaaaacattgtgtctcgttttatctcgtactggtttgttcatgcgaatgtaaatactttaagtaaattaaactcttatacaaagactagtgttatttaaagataagattggttaaataacaggctttgatcactcaggcgatacaatattggttttttttatccgaacctatttcttataaaaaagatgaagtcacttttttaaattggcttactctgggcaggaagtagtattcctaaagtaatttttttcttgaagatccttgaatgtagacgttgggcaatgtttgtgtggaaagggcttattgtcctatctaatggtgaatgatggtttcttaaatgtagcaggacctaagaagtcctagctcctggtattctttagagatggatggaatttggctactgcctgactctctgtttgatcactgacctgttggagatgggcaggcaggatccccttgttctgtaactttaggagcgttcaggatggaaaaaaaggagcctttaatgtcctaaatataaagggcacacaataataatcaaagagaattttagaagttgctcttccccataactactctccatttaaaacaactctgtagtttccatttgagtaagtaggttttctaatttttgagtaggtatatccataggctgtgcctagcctagtccttcaggttgttgcagggcccaggatatagcagggttttttggtaggtcaggtggggttgttgtttttttaagttacattttaaactttctgaaaagatatgattatagatttctgtaagaattaaaatgtaaaattaattatgtgatactactcaagatgttggcaatcatcatggcatggtgcccagaggtttattttctttttaatgaaagcattttgcctgcacatacctctgggtgccaaggagattggttgtggcacgtattttctaggtgccatctgtaggtggtcttgtttttgcatatgcggccgcccatttcaaacacaaagcacattggcatcagaagtggtgcctagttatgtaaagagatgtagcccttttcaaacctgatctaaacacaggcttaaaattggagccacttaggctttacagctacttaaaatatctgtgaaatgaggtttgccatccttcatctcaaagaggtagacagtggtccttagcttttcaagtcttctcccttgcctttttcccccccaatcattactttaagaagtaagagtttattttcagttaagcaatcctgtaggtagcagacaacccaggtccctttagatctctgagtagatgaatggatggttccattttctgtgtgtgtgtttgtgtgtgtgcacacgtgctttttttttttttttttttttttttttttttcagacagagtttcgctctgtcaccaggctggagtgcagtggcgggatcttggctcactgcagcctccacctcccgggttcaagcgattctcctgcctcagcctcccgagtagctgggactacaggcacacaccaccatgtccagctaacttttttgcatttttagtagagactaggtttcaccatgttggccaggatggtctcaatctcctgacctcgtgatccgcctgccttggcctcccaaaatgctgggattacaggcatggggccaccccgcccagccatgcattttttaagtaatagcagcatctttctttgcaggctttggcaaagtcttctctataattggagtcagtcacacaccttagagggttgttgtgagttccacagcctcatctgtcctattgggaatacaaagggttttgtaaggttgtgtcacatgagcggttcctcatcttagttcatccaagcattgctaggtgttgacttttaagtccctggggagctcaccttgcttcatgattactgagaattagtacacatggctgacttttgcacttgtaaccaaagctgctcatttctttgaacaaggcttattctgttttatgatctgttttctgcaaaaatgaggaaagtatgtagggagatctttgtctcataacttcataatgtttagctaaacagcctgttttattgtatatatttttttagaatgaaagtgttagtaaatttggaggggaaaaaatgattgtcactaaaaaggaataaagtttatcccatttcttatttattatttttgatataataaagcctgtaactgaagagatgaaaaaataatcttctgtttcactgacatatgtaaaagggctaactttcacgtctaactttatttttaaactcattttttgcatttgagattagttttagtttagagcactgttaaaaattgacttcagttttctgagcatttttatagattcacactttaacagtagtgatatattcagcatgttttaagacaaaactcgatgctgagactggggtttacaaactctaaatctgaaagaatcctttgtggtttgtgttttctccctaacttgggtttctgcattctaaattagggttgtagttgtgggagttctgatggagacttggaccttcagtcttccctgcatgaggtatatatatatatgtataccttctgtttttttccatcttttcccttcttggatcaaaaacttggcacctttagagggatgtgattgaaaatctgtgttagtgaccgtgtgtgtcagaagacagaggttctgttaccactagccacttccagttaggttcccaatgattctgaaaattgatgtattacctctgaatatattgtttttattgcttttttgctgttactttaagaaaaaaataaaaaataatgtatgtaatgcaatatgatctgtaggctgcagtgcttcattcaacaaagtaagtgtatgacttttatatatctagtgtaatatgcatctaggttgaaatcttgaggagcctgggatctttagcttttgatcctttgatctttaaaaaaaagtcaccagataagaaatacaagtggtgcaatgactagtttcaaggaagaaatataaatatgatgattaatttatttggcctgaaaataaatctaatattactaagaaagaaagtcatgaaagtatgaacatctgtcttataaagccatatttagtaaaaactgtttatataacaagagaaagtaatagtattgtgtagtaatttttggaaagacaaattaacatgttttttaaactatggtcctttgataatgggtccagggtattttttcattgtgatgcacacatgtgtgtgcgtgagtgtgcatgttgtaaatataattggtgtttatagaagtttatattcattttgactgcattttgagttggaaaaacagtttatatgcttgtgtcactggttctaaaagggactggtgagactaacactgttgggaaaacatggaatgaagagtaatcttaattacactcccctataaataagtaggaccctaatgcagtttcctgcctgattcctaccataatggtgattcccatatgcatgatgtgtttatgccagtttgtccagccacgtatcaaatactgtttttaaggcaaggttttattactcatctcatacattacattcagttgcagttaatttatattttgaaaaattttgaaaaacacaacaatacagacacaggtgtgcctaccacttagattggtgacaaacttgacagtgcagttggaggcccttaatgtacctgtccaaattgcttttcattcccttacctctgtctcccaagagaaaactctgtcctgacagtggtgtttttcattctaagcatgtctctctactttttattacctgtgaatatcctaagcagtataaatgtttgtttttgaatgcctcatcctaacccagtgctctaggaacacctcatatgattcccagattgatgcctttgcattttttcccattagtgcaactcatgtgctttgcttatcagaaaataatagtaaatgggagtattacattcaaagtgttggaatgcggcagatactgcgtatgtctgttacagatgtgtgggtttctagatggacttatggttggaacagtgtattcatttaaccaagtttttggttacttggggtttctccctagacaacagtcatttcttcagtcttatgatttaaacttatacatgatacttagtttaaaaatgttaaccctccccactgccagcatacgctccctatctacctatcagcctgccttcccatcatccctcccttcttcttctgctgccatggttcttaccaccttcaaacattctgtataacttacttatttttcatgatttttgtttattttctgtctccttcatggtagagtacaagttctgcaaaagcagggatcttcttattcattgatgtatcctgaggactgcaggcattgcatggtaacctgtagactctttgtaaatattggttaaatgaaagaattttaaagctaaaatcactcaaaagtgatcttgtcaatcttcacagccaatcaacgacaaatctgataatggactcatttatatcttttctttaatgttagtcaaaccccttcccatcattaacaataaaacttatcacctgtctctccaagccatacttaatgataattcccaaatcaccaagaatagaaagcatatagatggagatcattttacaaagtgaaagtgttccttttaaaaccttgccattctaatttttgagaattgccaacagggatgctgctgcttcttttgtgtgtgtgtgtgtgtgtgtgtgtgtgtgtgtgtaaagttaatccttttgaaaatcatagccatttgtagtaaaaataatcacatctaacaagaggcagtccagtttcctgtaaagaacatgggcttttagtcggtttggggtcccaaggccttcacctgccagatgtgaatcaaggattagacaacttagttgacttctctgagttgcagctttcttgtctataaaatttagatagcaactttctctttcagttatctattgctgtgtaacaaacccctccaaaacttagtggtttaaaacaataatctgttctttttcattaatgctgcctcctttccgtggtttctgtctctttcccatggtttcagctggagtggtgaggcagctagaaggtccaaaatgtcctcacacaaatggcaatcagcttggagctcagctggagccatggctgggggaacaggttctccacatggcatatctgcgtgagcttcctcacactatagtgtcagacttaagaaggtgagttctgagagcagaataagaagctgagaaaaatctcaggcccagtttttgaggttatgcaacattaatttagccacagtgtgtttgttaaaacaggttataggccagccggattcagtgccagggaaaataatctacctctgaatgggagatgtggcattgatgttgcagccatctttaatgcaccacagttaccttgcctgattgtgggaaaaattaaatgagataatatgtatgaaagaattaaatcatgacttaagtactagtcttcctcctcttctggtgtctactttttaacttctaatatatatatatatggagagagagagaggatgttgtgaaaatgaatgttttagtttggctttttgggtgaaggggaatggaataggtgtattggagtttggatatggctgttgaggacctcagctacctcaggtgctcctgaaatctctggtcttctttgtgaacctgcttatttgccatttctctactgattgatttcctctgctgggtaacatagcatctttattctaaaaatgactttaatttcatcctgtgtccacagtgcatgccaatcccagttccaaggctttcctcctaacaggaatgatctcagtgtttctccatcattgaggaggagaagtgttctgattatctattgctgcataacaaataatctgaaaatttagtggcttcaaatagatacttattattattctctcttgtggttctatggattgacggggctcagcctgggagggttgtacttgggatccttatatggttatgggctagtggcagctggggccagactcatctgaagggtcaaccgggatagatatccaaggtggctcactcttgtaactgaacagctggggctgtgctccagagcacctgcttgacttctctgtgtagcttggtcttttcaaacattgacaatttgattctgagagggagcctcccaagagcaggcatcttaagagtcctgggcagaaacaagacttcttatgacctgaccttgaaggtcactgccagtgcattctgatggtcagacaagccagttaggctggcccagactcaacaggagagaaattagaccctacatcgtaataggaataatagcaaaggatgttttaactgccactggaggattcagtaagctgtgttgtgggctgggaacatcttcattgcccttcaccttgtgaaggtttcatagcccatctcatgccttctctgagggtctgttgctgatcctagaacccattcattctctagattgcttctggtagcagggggcagaaactcaccaaagttggagttaatcaaatgaaggtttactttaagggtacccattaaatgaaactgaaggctcttgagaattgaggcagcattaggaactggctactctctccattttctctacttggcctttgtctctctcacagtgactttgcatccctctgcacatcttttgactattctaatccataacttcttctcttcctgaagaattggtgttgactttctcaagaattcccttcatgttcttgccagccacctagcctttctctacagtaggagacagcctcttttcatcccttgccccagccccagctaattagcttaagttgttcagttttgttttgttttccatttaattattgagagaggaaatctgattggcaaacctcatctttgtgcgccaggccatacatatggcagccttgagtcatggcgccacccagatattaatgactttgcttaacatttccatttgtttcaactacctgtaagtgtcttcaaacctttcttgtactgttttgtttttagctctgaattctgtaagtttgccctgaatagtattgtgtatactttggtcataaaatatactcaaagtcaccattccttatgattgaacttgaaatcccttaagatttcatactcactcatatcaaaccaggaagaaaatttcctcatataatgaatacatatactctgacaatcagagctgatgagacagattgcctgaagtggatttaagtcttacttcgcgatctttttcttcccaggatttcctgtggatacgtagcctcatagtgtggttttcttaaggtagaatttttatttcactatgcaagtctctgcacatatcttacttataaatataagatgatgtgaggcttaatcattaggttgagtttttatgaagtcactcttgtgtgacatgtgaattaatcaagatacattatgcattatagtgatgctatagcaataatgttaatttttttaatgcttgtatctttacagtcttttgtagttcagtgaaaatctagtgattatattgttttcaaatgttattattgttattgtttggaatattccctgggagaactttttgcctactccgccaaaatgtaagaccatattaaagattttcttgatttgtacttgcactttatctctgccttccatctcctcttgacttggagggttggagactgtgtctggtattatatgacctgctgtctttgtcaaccatggtcactgctttgccacttgaggagatcttccttcataactttgtgctgacaactaattgcatctcacagaccttgagtaaatggctgaactgagacatctataaatatggatgacagggcctgtgttgcactgttacagctgtgtgtctagcattgtgtctgacatatggaagaaacttaaaaaaaaatctgttgaatgaataaatgcttgactacaaggtgtgggtcatagatttggaaaggaagggtagtgactctgtataccatgttactattcatttagagactgatggccagcaaagaggaattaactccaaaaattagtgggagagtaggggtgcaggaattgagggaatagctgtaaccatggctaggtgtctgcatatccaggatatttcacaagaaagtattccatgatcacccagtaatagaaccaacctttataaggctcctatttattttatttgacttcatttctaagaatgacaaataaataatccccaaatatattcagaatcttaagaacaggatgaagataaacaacttggagcatttggtatagcttatttattatggcttgtattttaagtagaaaagactttattgaatgactaacatgaaattatgtcagagtcatgaaggaatcatagaaaagaggagctttaaaaaaggaggagccaattaatagccaaaaaaaaaaaaaaaaatgctaacctcatggcactatctaaattggcagatttctgaaaagccaagaggcagctccatcggttttctcaaaaagtcctccaggcaatgggactaaggcattggtcttgaatagagttccactgcttgcctactccaatgagaggctctttctccagatgatttcaacttggactgagggcaaaattaaaagaaatatctgatggtactaagggctcatgggtgctatagattgaatgtttattttccccacaattgctatgtttaaacctaactcccagtgtggtggtattagaagagtgggacctttgggggtgattaggtcatgagggtggagcctacagtttgagattagtgcccttataaaagggatcccagggaggtccccactccttcctccatgtgaggacacagtgagaagacagcatctgtgagccaggaagcagtgctcaccagattccaactgtgccggcactgtgatctcagatttcgagcctccagaactctgagaaatgaatttatgttgtttataagccacgtagtctatgatactttgttacagaagcccgaacagactaagacagttaaggatagcctccctggctaagggctgccttcagtggctcagaaatgtcatcttattagaggaaagtccaactttcatgctagacactgggccagccagatacttcctttctgtttttctccctttaccttctctgggaaagtctcagagttgtttgactcaacacagttcaaatattgggccatctttctggatttctagtaaatagggaggagtttgttacgataggaaaatctgaagaaagactgggccatagctttcatacagttaaggtactttagacattgaaggtctgtaaatcattaaactattctggtagtagtagtcaaaatacacatgtataacaggcagaccccaaatgttaacatatttgacaggcctgtaagttaattgctttttaatgtcagtcaaatggattccactttggtttcttggccaggcttctatgggcccattaaaaccccatgaagctgaaaacatgaaacttaatatttgtaaaacatgtaaacagaatagcctttttctgccttaccgtgtggttaagaaattaggactaggatatttcagtttggtatctttctcagaatccaattagagtaagaatttattttattatcttttcaatattgttaataatctagtaacacatttttcacttaagagttttattttcataccaaatcaaaagaaaaaaaaattctatattgctttatgtttagagatgtgcatttggtcagacagtctaacttagtgtattcgtttggtcaggctgccataacaaaatgcctcataccacagagcgggaggcttaaacaacagagactggaagtccgaggttaaggtgttggcagttttggtttcttctgaggcctctcttcttttcttgcagatggccgccttctcactgtgtcctcacgtggtcacccctcagtccatgtgtcgtctgtgtcttaatctctaattataagggcaccagtcatattggattagggcccatccatttgacttcatttcttcttaattacctcttaaaaggccgtaagtccaaatccggtcacattctgaggtcctgagagttaggacttcagtatacaaattttggagagacgcaattcagccctaatgctagggtttaagaaaaggtctttctttcagtttgtgaggactcaggtttctgattgcaggagggtgatgatgtatcttgtgaaggcagtgagcccaacacacttcccttcagagctcgacagggtgagtggccttccgacctcatgccacctcatctttgccagcttctttgtgaggttgctgaatgccgtcttcagcacttgtgaacagttttgaacagcacttgactgcaatttggcaatgtgttttaatttattccatccactgctatttgctgaatatctcttttttacctgtgagctctgcatacaataatagttggttacatacaaattattttcatgtctctatttaacattgagttagtaagaaagtaaatggaaaatatgttgaaccttagattcctttacaagtctttattttctaatttattcaaatgtcaaacactgtcatcacttgtgtattcgtcttaatgaaacataaatcactagacatttattactatatatcttgtttgtagttacaattgtgtttgtgtccagataatcaaaataatgtatttgggtttaagtaaaagtctattctataactttatattaatctatttttgacacgtgtaagcacgcattttagaatgtcagtgtgcaattagatattcttagcacatgtcatttgtgaaaagcactttaaatctaagtacattcaattgagcataattaaaatatcaagatacatattcttcatatacattttgcctcttaattttttaagtagctataagtatctaccatgtgaattcaaattaaaggagggtgattaaattacagttatatttattgcttttagtttaaaatatagttgaaattgcgctatattaaaaaatatactgccatgttttctgtggacagcagactgatgatgggtttaatttgttttaatgcaagactattaatagtctctgaatattctcaagactgttgactagaatgattgggggttgggaggcgtaagaaggcttgtatttttatctaatgagttcttttgacttgactcctgaagtctcaagaaaatgttcaggaatactacctcatttaataaagaagcattggagaaagccttgttttgttgatacaaatgaaaggaaatggatcatggggaaatatgaactggagctcctgaacccttatcctttagataatgtatttaggctactgatatttcctatcattgtgaaaatgagcagacagccttggtgagtcagttttaaggcacatgtaactgttaaacctacttgtccacaactgttggacctaaagtatattatgattttagtgaaggccattgttcttggagtacttagagaaaatggggctgtacgttagaactctggattgtgttgcctttctaaaatatttgatttcttaaaattctgtttgtttgtttgtttgtttgtttgttttccaagatagaggcttgttctgtcgcccaggctggagtgcagtggtgtaatcttggctcactgtaacctccgcctcctgggttcaagcaattctgcctcagcctcccaagtggccaagactacaggcacgcaccaccatgcccagataatttttgtatttttagtagagagaggattttgccgtgtcagccaggctggtctccatttcctgacctcaagtgatccacttgcctcagcctcccaaagtgctgggattacaggtgtgagccacggcacccagcccttaaaaatctgtttttaaaaaataaatagctatatcacttccctgtgccaaaccagaagtgtcaacaatgaagtcattatgtaacatggcaagagggattcgggtggcaaaaccgtaaggaggagaagaagaaatcaagcttatagaagcatgtagacactgagtgaaagacgcagtgataggaaccacagtttggtttttttgcagactagcccatttcagagaaggcggtattagaagaaaaaacctataattttactgtgagccgtgaggaccatttcacatgaaaaaaaaacagagcatttggaaataatgatgcttcgtatcagtagaatgctgtgcgtttgagaagcttggcgcttggacttcatgctgacatggttgtagtcacagtcctattgccctttctggttgctctcagcactcctggatgcaaaggtgaatttatgaagatcatggacttccgatacaaattacagcagccaaaactgtcatatggagatgtgaacttaagattgtattggtagataggtgaagcacccattgctcctatcttgaaatgactatgctatatttagacaaaacctacatcagtataattattttgcaagcccatttgaagaaaattaaaactgtcactagttatatatttttgagcctaaaatatttctcacggctgggcatggtgtatcatgcctgtaatcccagcactttggtaggccgaggcaggtggatcacttgaggtcaggaatttgaaaccagcctggccaacatggtgaaacactgtctctactaaaaatacaaaaatttgggaggctgaggcgggcaggtcatgaggttaggagattgagaccatcgtggctaacacagtgaaaccccgtctctactaaaaacacaaaaaattagccaggcgcggtgacgggtgcctgtattcccagctacttgggaggctgaggcaggagaatgctgtgaacctgggaggcagagcttgcagtgagctaagatcatgccactgcactccagcctgggcgacagacggagattctgtctcaaaaaattggctgggcatggtggcgagcgcctgtagtcccaagtacttgggaggctgaggcacgagaatctcttgaacctgggaggcgaaggttacagtgagctgagtttgcactactgcactccagcctgggcgacagaacaagactctgtctccaaaataaataaataaataaaatatttctcaaggattcagatttggggattttactgccaagtagcctggctttctcattattgattaacctacaaagaaaaatttgatatatctgatgaaaatcagttatattgtacctacaaaaacatctcttccatattacttgatgtattttaatgtcactgaatccattggtttatctttatctcttagaagctcttaaagtcacaggaattctagtccatatgatcagattaaccaaaaattcaggcagctactccgttcaaacaggaaagaaaaaactgaaaatgaattgttgtattgaatctgctttttcacaagagacaactaggcgtaatggttctgagcgtgggttagaaattgggcaagtcgcgttcacattcttttactaccttgaagagaagtctctgcctccatctcatctctagaaagatgggaataatatagcttgtgtcagcatgattgggggattgaaggagatgatgtctgtgaagagtttagcacagtgcctcctacatcagaagtgcttgacacgtgtctggctcttgcttctccaggaaggagaggaggggagaagagagagtttgcagggccgtagttattcaagtagttacagctatctcttctttctggtcacactgctgggtaatttgttcttgaaaagtgtctcaagatgactgctcccacttagtagctggaaaatcacatccttccagaaagggatctagagggcagacatgggtgaagtgtacattgttagagggctgactggaaataatcagtgcagagatcactgtgggcagagccacagccttcaggtcctataaagggcagaacgataggaataatctactgcataggaaaaccaaagaaaagaaggaggacgaaaaacactctggggaggaaaaaataattggggttcactactgggatatctttccctctgctagaagatccttcatacataatgaatcacagtttggaaatggagcctttgaaaaaaaatccttacacaactggtaagagagaagtctcataccagccactgaatttttgcagaaatttgggcctccctccgcaagtgtactttcagactcaaattcctccagcatccaggacctcttgattaactatgtactctcaataaagagaaaaagatgagacctctgggaagcaagaattggtagaagctgggcctggtacagtggctcacacctgtcaccccagcactttgggaggccaaggtgggtggatcacttgaggccaggagtttgagaccagcctgggcaacatggcgaagcctatctctactaaaattacaaaaaaactagccaggtatggtggcgtacacctgtaatcccagctacagcaggaggctgaggcacgagaatcacttgaacccaggaggcggaggttacattgagccaagattgtgccactgcactccagcctgggtgacagagagagactctgtcttaaaaaaaaaaaaaagaaaaagatgctgaaatgtatcaaaaccagcctactcgtcatcctcttttaaaagaaaaagatgagtaaaccatcgcattactcattaggatgttaccagatatgtgagttggtcagagggactcctagctacaagtagaaggagtccactctaccattgactgtgtgcaaagtagcacattttatctacctttttaagatactcggccggatgcagtggctcacgcctgtaatcccagcactctggggggctgaggcaggcagatcacctgaggtcaggagttcaagaccatcctggccaacttagtgaaaccctgtctctgctaaaaatacaaaaattagccagatgtcgtggcacgcacctgtagtcccagctacttgggagactgaggcctgagaatcgcttgaacctgggagatggagtttgcagtgagccaagatcatgtcactacactccagcctgggtaagagagtgagactctgtcttaaaaaaaaaaaaaaaaaaaagacactcagtgactctgtgactctacgtatttggatctttccatttatctagtcttgtgctaaactttaaaaatttctgacactttataaaatgtgtgtaaatgtgtactgatataagatcctctacacgattttttattcagaatattcctgtcttcagacatcttcaggaaaccctgttggggttttgtttaggaggattgctttgaatttagattaacttaggaaaaagttataatatttgactgttataatcatttttaggaaaatttgcattttaaatttatagcccaagtgacgtatttgcaacattgaatctaatgatacttatttctctttcattcaaatgtttatgtgcctttaaaacaatacattttttcttcattttgatcctatatatttcatgttaagttattctttattaatgccacttgtaaaagaataaaaatatgtaagatttcttttggtgtaccagttctattgttctcctctaataaagatatataatgtttttgaatgtcgggtccccttttgaaaaatgctacaaaaagtttgtttacactggtgctagtattcaatactaatagagtgggcaataaaatgttcctcagttcctgataatagcctgggtgagagtacacatggcactgaacttagtaatttatcttctacagtcgtgggtgcacacagtgactcttaatagagaacccgctgtggtgctgcctgcagctctgggtcccctgcagccaggtgcaggtatgcagcccagtgcagatgtgcagccctaagccctgtttaaacacatggccacctgctgtaccttctaacctgttttgagttgaggaacagaatgtgtgagcctatgaactcacctctgtggtcatcagctgcttcatcttctcttctgtgttacagatcacagtaacttaatcataacttcctatggagagccagaatattattttactattgattctgaaggggtcttttgttgctgatgtggtttatgcatcagaactttagttgttcttgtgccaaattcgattctgtttgatttttttaaatctccaaagcataaatagtaaggacaactatgatttgtcagtttctgctctgtaacaaatttatcccccaactctgtatgtcactaaagcaaatgcaaactcttcatgttctacctttcactcctccattcagaacttgtactgttatgcgtaagcacagcataattatccctagtagttttatcttttcactctcttccccctagatattttctccttaattaccctaaatgaattgtcattgtctcttgattgctctcataaactactgtcattttctcactttcccttcccctgcaagtagactacacagctctctcattccccagcattctcgttccaatcctaggtcaccccatgtgctggactttgcctccctgtgtcagtagacattgttggtcctttcgccttctcacttctggaagccctgttcttaactcttgtgcctggattgctgtaccaccggtgtatagcagaggtttttcatcacttcatggtctctcgccactttccatttttcttcttcatcctcccaccttatctaaacccctgccttcagttatatatgtggagtgatgccctcatctgtgtctctcatccctcttaactcacccttccactgccttctgaatgtgtcattattcgtctttccaacactttgttcctattacacagcaaaaacttggatcctttctttgagcttacccactctttttgccctatattcagcagccaaatcctgttggtctctgttgcatccattacccagccacctctattcagtatagatatgactgttctaattctggccttttatcactcacctagtcggctaacaacctaattgtgatccctgcctcaggctctgcctcccggatgagccctctcccctctgctccctaggcatcttcccaaggcatagataatgctcagacctctacagctcctaagctgtgtttaccagctctcctgctgctacatagtcgcacagaccatctccagaatgcagcctgttctaggcagcatcctggaccttccatgagttggctccagcaatcttattttcagccaccttctttcataccccttctccatgccatctagagcaaaaggctgccatgataagaactgtaagtgtgccgctggcatccagccacttgagcttggaatccaaggttcaccttcctagctgcatgactccaagcatgttaaatagcctcctttactttttgtagcctcagtttcttcactgaaaccaggattttatttatttatttatttttattgagacggagtcttgctttgtcactcaggctggagtgcagtggcacaatcttggctcactgcaacctccgctgcccgggatcaagtgattctcctgcctcagcctcctgagtagctgggattacaggcacctgccaccatgtccggctaatttttttgtatttttagtagagatggggtttagccatgttggccagcctggtctcaaactcctgacctcaggtgatccacctgccttgacctcccaaagtgctgggattacaggcatgagtcactgcacccgacctattatttatcttattacttaccttataatattatgaagaccaaaaaacaatttttttttttttgagacagaatctccctctgtcgctcaggctggagtgcagtggcacgatcctggctcactgaaatctccgcctcccgagttcaagtgattcttctgcctcagcctcctgagtagctgggattacaggtgtgcgtcaccatgcccagctaattttgtgtatttagtagagatggagtttcaccatattagccaggcttatcctgaactcctgacctcaggtgatccacctgccttggtctcccaaagtgctgggattacaggtgtgagccaccacacctggcccaagaattcttatagaactcttaccacaatccctggtacttagtaagctagaggagcctcaataaatgctagaggatgatgatgttgatctcatcataattatcatccttattaaaatttcgcttggcagaagtgatgctgggtatattacccatataagtgtgatatgcccttgtcactgttcctttgtgcctttctctgcctggactaccaaaatcctaatcacactgtagtccccagctaacatgttaccttctcactggcttaatcacctcccagccaggagagctcttgccctcctttgaactgtcatatcagtttgtctggaccttggatcttatcatataattatctgttctcatgtcccattttctgtatttatgaggcatatagttactgaactccattgaaaatcctttcctctgcttgctggctatatagccctgggtacgttgctatattagtttgctagtgctaccaaaacaaaataccacaaactaggtggcttaaacaacagaaaatttatattctcacatttctagaatctgaaagttcaagatcaaggtgttggcagggttggtttcttctgaggtctctctctttggcttgtagatagccgctttttccctgtgtcttctcttttgtgtcctacatgtctgtgtctcagttttctcttcttgtaacaaaccagttggatgggattacgtcccaccctaaagacctctttttaacttaatttctcttttaaaggccctgtttccaactatagtcacattctgaaatatttgagagttaggacttcaactatgacttttggtagaacacagttcagcccataacagttgctttaatctttctgtgcttcaatttcctcttatgtaaaatctgcaaaaagtacctcttgagtggactgaaaatatgtaatatatgcaaagcaacaccttaataccccataatagatgtttaatgaatattcatgacttctacccttactacttcaagcttcttgagaatgagaataaagcatcttgtgtccttgcagttctaggacaaactttgaattgcttataaatatttggtgaatgaaaaatcaaatagcagaagtgagtctataataattgtatgcatttctctttctctcttagatggatccagatactagatgataactaagatttcaataacaaagagtataccaggaaacatgtagaaaagtcagtgttaccgctgtaaatataatatgccacactgagccagttcagtatggaatattttcccatgtcctacttgccacagactccagtaagtcatagggaaatgatttgtgacaaaattgcacacacacaaaaaaaacagtatcttcacacagccagagctttcaagtgatgagggacgcaaagacattgtgcacaataggtgttcctgtccattgtctgccgattcagctatctttgatctctgcaaaagaggaaccatgggtatggtactgtgaatgcataatagaccaggaattggaagagcggcacgcagtgtgctgctcagtgatcaagtcgtggagagacccagacaccatgcatctgatgataagcatcttctcttggtgccttggagtctctcatttccttccagttcgactccaaagggcctgtttcatcttcagcacctttacaatgtgccactttgagtctgtaggttctttctttcagaggccaccacagataatgggtacatcattatgttttcttgatatcactacattctttcttccccgtgcatctgcctcctgcagctctctgaagtggatttgactcctcatcatccctagtgataactaactctgctttaaaagaattgttatctgttggttggcttggagtcagggagttgagtgtaagttcttgttttattgtatataatgctagcaacttttaccagtgttagtaaagataagagataataagacaattccgtacctaagaattgtaccctttcataacagcaccacttggatatgtagaaagagtttgttgtgagatcagatgtaaaacaaataaaagttattcgtgaaatgatatggaagactgggattagaaactgtggcattcaagaagccagttaagctgattctcagaattgacagagattctagagatggtgtagtgcagatggtgtagtgcagggattctcagcctcactgcacatggtaatctcataggaaaattttagcaaggacagatgcagaaattcttattaaactgtcaggactgaagtccagaggtcactatattttaaaaaggtctgcaagtgattgtaacatgcatctatggaggaaaacatcagcgtaggagaaaaagggaaagaaaccaactggagtaaaggctctgtcttgagcactgtgctggctcctgtacattctccatctctttttatcttcatagtaagtgagatggtttgacaaatagggagaccgaagctctgccttcatgtgggacactcaactgcctccttccctgctgttggcagtgcttggatgaatatgcattgtatgcctcttctctcttccaagaagactggtttctctgattactttgcattttaccctggatagagatggtcttaccctcttttgagcttcaaaaaatcaggcttcaggctaattccaacctggtgaatctttctcagcaattctacccccataaaacaatctttacattttaaatttctattcatttttctaactattcataagattttcgtatgaagagttctggttcagaaacacagagaaaatccttaccgtgcctctcacatggttacttggttaggtgtgtttcaactcatcattctgccaaccgtaaatagctgagtccatatcacatgggaaatgtaggtgcaaattcacaaaacactcacgggctgtaaacaaccagggagttgttcttctcatggacctgcaggttgcagcagcagcatctgagcaaaacagagctgttctgagcagtagggcggggagcagcacgtctttgtgtggaccagaatgcaccagcctgtgggtgtatcatctcacactctacttcctagactaaggccctttcttgggcctttcagtgaatccaacccaggttggtattttgtgttgtcccccaacccaaacaaaaaattcatttgcacttaaggaagaacaagagtgacttgattaaggtatcaagttggtaaaaatggaaaaacaatttgatttagagagttaatgaacgaacatctttctttgattcttttcattaacattacacatattaggtaaactgtgtataggtgtttatttttctttatggaagtcacacatgatctatatagaaaaaatttcaaatacatcaaaaaaaaaaaaggaaaagaaagatacttgtaatcccaccacttcagaagcaccactttggtgtatttcttccacatggtggtaggggatggcagggggaaatgtgtaccagtattttaaacatatgagcatttttacttaaaagtatatattgaacatttttcactgttgactgcatagtatctccatgcatgaacatactcaagttcatttaacccatcccttaccattagatatttatgttgtttctaatttttctttccagcttttataaataatacttcaaaggccatccttgtagctagttctaattagtacagtatagtttggatgatataaaaatttcatatatgtgtgacaaggaataacaagttgaagtacagtaagaaagaatgtaattgcttgtgataaatataggcttagcttcaaaatagctagcttaaaatttcccttatagtgtactttaaagatttcactgatgatcttggaggtgaggcatctagccattgctggaatgaaataacacacgatgttcaaagtttggttggtaattgacttagtgcatatttttgctactttcatataccacttatctcatatgaaaagagcaattctgtacacaagtaatacataaacaaaaattttaagaatatgtaactccataaaatgagatttgatgattgacttgagtttctaagagaaaaaaataataactttcatctaagtttacgtgttcgctggcagtttttgaatcgttgccagaatcatgaaattcatcattcaagagcctttgtcctcctagtccccgttctgttctgtgtctcctcatttggatacgttctgtgtctcctcatttggatacgttctgtgtctcctcatttggatacgaatgcttttcattttattactgcctttgtgcccttggctttgagtcctgtggtggcagttgtttgtgcttcaaggagcatttgtaatttcagtgtgaggacttggggaggtcaacagaaatctctggtctttgccctccttcagcctccacattaaggacatagggcttcttcctaggcagtaactgtattttgattcatacttgtaatccctaaccgttttgattgatgggacaagggctgaaactacattctcttgaggatagaatatttttatccttgagaataatcattcatctcttcctgacccaccttaccatttctttgctttgatcctaaatcttttttgttctttttaggctggaggctcccaggtgattttcacaaatcctttagaaatcgtcaagatccgtttgcaagtggcaggagaaatcaccactggtcctcgagtcagtgctctgtctgtcgtgcgggacctggggttttttgggatctacaaggt

SEQ ID NO: 15813 - DNA, 43248 bp, Homo sapiens
ctccctgcccacctcctgcagcctcctgcgccccgccgagctggcggatggagctgcgcagcgggagcgtgggcagccaggcggtggcgcggaggatggatggggacagccgagatggcggcggcggcaaggacgccaccgggtcggaggactacgagaacctgccgactagcgcctccgtgtccacccacatgacagcaggagcgatggccgggatcctggagcactcggtcatgtacccggtggactcggtgaaggtgaggcgcggggagacttcggggacgcaacgagcggagaaggagcgcgcgcgcgcatttgcatcccgcgcgccggcagcctcggggcagcgtcccgaaaccgagctctccccaggaccgcggctggccggggtcgccccaggagcagctgcgcgcagcctgggcgccgcgccttccgccgaccccgcgagggtgcccggtcctcgccccgcaccgcccgctgctccagccgcgtgcccggccccggctgctggcggcgctgaggcgggggaggcggagtggcgagcaccgctggcttcggcggcgactgggctcccgggggacgcgatcgctgaagctctgcacagtcttaccacgctggccgttcgggctggctggggccgcccacacgtgcgcggtttccgagggagctccccgcaggggaagccctcaccacgctggagctgagaaacgtgtggccctggcccggccgcgcgccctcgggacttggtgtgtggctgctgctccccgggttatttcgggaacttggggccggcaagtcttctctcgactagtggcagctctttaccggttcgacagcggcccgtgggatcccctttctgagggttcctgcacttcttcccccgactttgggtcgccgagccgccgggaggcaatgacgtttgccttctccttttgcttgcggggaggtgggtgggcttgtgccttacagcccttgctgtggattgtgtgagaggcactcagtttcctttaaaccctgtctgtcacttgccccggtagttttaactgcatttctgtaaagaggcagcgttactaggtgcgttttgcctggtagactgagacctgccctctgtcagcctgcccagaacaccccagggccaggatagagtagtgcaggaagtaatgccagtattgactgttacacgttgcacttttataggcataactcgcctaattcatgcaacagccctgggggttaacagatgaagaaactgaggcgcagagaggcgaaccgattaccttgcccaggctcctacaccacctcctatcctctggctgcagctgcagtgtgctttggaggattcggaggcctctctaggtggcaattattttgcaaggcaggtcccacagaggcacccccagcagctttatcttgttgctgatgctggtcctgcatgagcaggtatgaaggccagaaagtataactcagagggttttcccggctccggggagctcgcttggagccagcagtcagtgtctggacaggcagaagtccagtgaggaaagacatgggcttccaaggtgctgctggacctaagcctgagccatcacccatatgtccctccagtgtcccagtggggagttagaggaatggttctcatctccaggaaagacactggactgataccaggtggcatttgtatgggaaagaatccctcaaatgtaataaaattctccatgattgaagctgttgtctcaactgccctgggcagagtctggggaaagttaggagcagggaggtgttatctgagcaggccctagtcctactggtgtcttgagatgaatgttctattcgggaaccccacagtgagttcactttagagcatcattttagcttatttttaggattagaaataattagttgtgccttctgagcaccctttgacactctcaagaggcgtttctcacacgtttaaattgtgtgatctgtgtttagtttctccctgccccatacatgttgatatgttttggttcagatgtcacctgtatacttagtattactttccatagcagttttcacctgtggacaggttaacatggtgtgaatggtagaaggagccggtctggttttcctagacaagtctgtaaaacaaggcgtgggttagctaatcagtgaagtcttctaggttctgggattataactgacccttaggggcccttccatgctgaagtgtgcagggttggttttgaggctgccactgagtgccaaggtctgccaacatcagcacagttgtctgccaagcatgaggagtcaggggtgcatcctccatcatggaaaggcttgggggagaccacacctgtgttcctcttaagtattttggatgatggcgaagaccgggagtaactgagtcaagaaacccgggttgggcttcaagccctgctctcacttgcttcatgcctcgggcactgttctgtgccttagttttgtcactataaagtggggacagtggacctgctcagtccctctccacatttttaacccatgcctcgtttctctgaacacacaacacccatcgtcctcttttatgttacttgaaatatcaaaagaattattacagctgaaaacaaatctatgtaaatcggatcttgaaagagagaaagctttctccagttttgaaaggcgccatttttaactttgatcttgtaatgacaaataagaatgttgaatcggctggcttttttctatcctaggtaatgtggactgtggagctctgtgctggtcactttcaaccctgaacctgatgctacttattttgcagttctaagtgcaaagtcggcctggtggatgcttcccattataatattaaatttgcttcttcgtgaggtcacacctcacatccccagtgtcactttaataactagtgttttttacatggtgggccatgacccattagtggactctgcatttaaaaataaataaataaataaaagaagttattagtgagagtgtaaaaatacgggtgtgcctggcatgcagtgggagaaatgttgaaattctgtttgggttgtgtgtgtgtctctgagtgcattttacagacgtgtacaatgtacttctggctgggagttgtggtcaaacaaatatgaaaaccactgaacctgagaaaatatctctggagccccagcaggcaacactgagattatgaaatgggtatttggaagacctttggcaactttcctgctgcttcctgtgtcttcttctttcccttggtcctcccatggtgggatgtgagcactcattcatccataaagggccagtctactgggacctttggctgcccctgcgatgacagtgagcagcaaagtgatacccagggagggagtatagggtctctgcagggctctcaccaaatggtggcaatgacttactcctgtctaggcggggtctggtggcaggttttccatgagcctctttctggtgttccagagtggcaaggggcacttggggtggatacaagaacccctggtctgatcaggagagctcaagacttgaggagcatgccaggtgggtggaggaggaaattccaaccagattaggcacaccactcggagaccatgccgagtcccgcctggggaaagcaggggcagaaggaaacaggaaagatttgaagccgggggacttccgctgaccctttcacaacccttcttttgctttgctgttgggggaaaccctgcctgtgactctcctaggatgagccctccttcccaggttggtgcaccacggagcgttccctctaggagcctcctggctgaccttatggtgtgcacagccagcctgcccagctcagcagagcattacctcaacttctgacttctcctcttctgagttttctcctggctgcaggcagactggtaggaagggtgctggggggcagtgcaggcagctgccagagtcccctcccacccacttcattgctttccaaacaaagtgcagttcggtccatgccattcagcttcagaagggcgtgaaatcccaaattgctctagttcctgggacaaaactataatgatttttctctctcccttcttgtctcctctccctcacatccccctgctcccttcttttctctcctttgatgagaggtgattttcttaaaaggcgaatttggaacgaggaatcaaaaaaggggtatttgtgagctgcagtcctgttccttgtttcatgaacccccaggcagccatggcctgtacccctcaggcctaccctgaggagtgtgagaacctcatccacttttctctgccctaaattggggaggggcaggctggagcgtggtttggaggcgcgtgcccaagagtactgtgaacagcaaagggggcctcagctttttagtagggagaggtatttggggttgaatgggaggatttaatcagctgctttgcttaaactatacaggggtgtgcacctggggtgggggatgtgcgtgtcacctggaagggaggaatgtgcttcccaaaccttttcctggcttccacttgggcacgtttcagctgcatgtggccatctcattagagatgagttttgtcctgtcttgcagcagtgaccagtcttggggaatcagttccactttctctgttttttagtcttgggcttctgactctctctgacttcaggggtttccttcttctgactcatcggatgaactcacctgctggtgtggaagccttcagcatctttcttgaaccccagagctttttggctcttttcctgtctccactagtacggaaccttttcttgtcaaagaatttgtgtttttgtttttgtttttaatccgaaataccggctgtcatgtcccatccatgctggccacagacatacccctgtgatcatggtgttggctggaccatgccaggatgcatggctttgccactcccatgcccaccttgaatgttgtgtctgatgtttgtcataggaggggtatatccaatctctttctcttttttttctccctctctctctctttttttttgtttttttgagacagggtctcggtctgtcacccaggttggagagtagtggtgtgattgcagctcactgcagccttgacctcccagggcttgagtgatcctcccagctcagactcctgagtagctgggactacaggcacatgccaccatgcctggctaatttttttgtatttttttgtagagatgggggcctcaatttgttgcccagactggtcttgaactcctgggctcaagcgatcctcccaccttggccttccaaagtgctgggattacaggcatgaaccaccatgcccagcctctttctttttgttgaactggaaaccttccctaaagttccctcaaccttccctcaagttcctactgagatggatttcccacccttagagaactatcttggggttcaaattccagtctttgacttactggttgggcaggacacttagcttcttcatgtccttacttgtcaaatggggatcctgattttcttcctgctttctctttcctgacccagctttccattgcttctttcccacttctctcatttttccagtgggccttgtggaagttccttgttaacaagctcccttacatcttcccctctttaccgaatgtttctttcacttccccctcctgatggaaatccagctcctcttgctaagggttgggagcatggacccttgagtccaaatccctggaccgggtcccatttcccagttaggtgtgaccttgggcaagtttcttaacctttctgtgctatttccctatctgtaaaaagaagaagagatggtaccgatctcccagggtggttgtgaggagggttaagccctcgctgcacttcacatgcctggtacacgcacagaacagttgatactctctgatgtctgctctcatctttatcttcatcatcatcagcatgattgccatcactttctctcattccctgaggactctggcatctgatgcacagacttcacctccacagatcccgtcctcaccctgaggatggcccctcttcgtccccacccgactcaagtccaaatcactccattccttacacctctgagtcaatggccttcacctccatggtcccttgacctaactcagaatcttcctgagatcttaaatccagattattatagcctggaccccaagattgactgctgcagctgctggggcctttagtttctctgcctttggttcttccaaccctggcttgccccacctgggtcctggacagcccatctgtcccttgggcagcgaagcccttcaggggacattcacactgcctccaatgcgcatgctccctggcctcagctccacatgtctgggcagctgcttgcatccttcacgagggtcctgttgccccttagctccccaccctattgttgtcagcctcagcctggcatcttgcttccatgtcatagggaaaccaggacctcaatcaaacccatcttcctgtcactgtccttccaaactctcttgccttctacccccactataagggaacaggtgtcttcattcctttaaggtatatcaatgtggcagagaagggagatgtatacaaaccaccttgacaccaggatttgaatactggctgcacacctgggcacattacctaacctctctaagctcaggttccttctctgcaaagtggggatatgaatactgtattagtctgttttcaagctgctgataaagacatacctgagactgcgtaatttatacagaaagaggtttaatggacccacagttccacgtggctgggaaggcctcacaatcatggcagaaggcaaaaggcacatcttacatggtaacagacaagaaagaggacagaacccagtgaaaggggttttccccatataaaatcatcagatctcgtgagacttattcactaccatgagaacagtgtgggggaaactgcccccatgattcaattacctcccactgggtccctcccataacacgtgggaattatgggagccactattcaagatgagatttgagtggggacgcagccaaaccatatcaaataccaagagctattttatagggttgttgtaagaattaaatgaggcaacatatgtaaagttcttgccacagtgcgtggtgcgtacgttgtcaataaatggtgatggtgatgtcatttttgtcccctcactcttgagtgactcggttccaggatctttaggcttcctgctccattgagtttttctcaaaagtgtttctacagatccaagcccatcctgtcttaaataaaccccagacttctcaccttgacctcacatgcacccccaatgtttcttcccataaacaaactgttgcccctttttttcctccttaaaacaacacatgttctgaaagaactattgacactggtctctacttcctcactgccacccctgcttcctggcttttgcactgcccagccgcagcctcacagagacttctggctacccatcatcttcctggcccaccctgctgcctctgttcctgccaggggcacctccgagagggggttggccctgcgatcctcagttttcctctttgggcatggcttctcctcaggaatgtgcccttccacctcattttccccagcacacatgcctcagtttcctcctgggacctgatggctcccagatcactatcttgggcccagactttctggagctgaatctccagttgcctcggagcctcctcagactcagtgtggccagaatggtggtcctggcttcccctcgggcctgcccttctgcctccttctgcaccctgggatggtcatcagcttttctcccactgctgccctgtatgcagggaaggcctgcctgtggctgtatctgtagtacttcttgaatgtgtttccttctctccctccccacagctacttactgccttggttcagggacctggatgtctcctcttccttgagatcccagactgcccaagttaaaagtgagtttaggccgagctcagtggctcacgcctgtaatcccaataccttgagaggccgaggtgggaggatcacttgaggccaggagttggagaccagcctgggcaacatagcgagaccccataggtacaaaaaataaaaacattagcttggtatagtggtatgcgccagtggtctcagcttcttgggaggctgaggtgggggaattgcttgagcctgggaggtcgaggctgtagtgagctatgattggaccaccgcactccagcctgggcaacagagcaagaccctgtctcaaaaaaaaaaaaaaaaaaatgagattactctcccctgcctcacatttccctattgcccattgctgctttgtttttctccccagcagttgttacttcgtaacacacaccatcgtttatttatattgtttacatattttacttatatttatagtattatttgtattgtttatggtctctcttccctcatcagaatgtaggccccaagtgggcagggatgtatgctcttctgttcaccactgtattcccattgccagaaacacagtaggtgctcagtaagtatttgatggaggagcttctgcagttcattctgcacgtcagccatggctggtcctgctcttcagcctccaagcccagcagcttcctggtgggctgcagttttctcatcggaaatagagaagagtagcagtgccgattctgcctcccttgcaggtcgttttagtgcatctagttggaaaatacaggcaggtttgcagggaacacagttttcaaagtgtaaagctcagtgcaggtgctaggtcatggtgttttttgtcacactgggatcctgcgggagaggtaagtttagctgattggagtggaagatccagcccattcttcgtggtgcctgccgcagagcctgcaagcctgcagaaagacagggagtagccacgtctttctgtagttcacacctgtgtgtctccccacctgataatccctcagcacttctgtttgccttgcatgtaaagcccgacctttgcatggcaggcacacagactgaaactctttcctcctccagcctttcttggactcatccacagaatgacaaagaagtattctgtgaatattggttgaatgaaggaaggcacggctttttaaaaaagatgaaaaaaaaaaaagttatgaaaagctttaaaacttgctattggctgggcgtggtggctcacacctataatcccagcactttgggaggccgaggcgggcagatcacctgaggtcaggagtttgagaccagcctggccaacatggcaaaaccccgtctctactaaaaatacaaaaattagctgggcgtggtggtgggtgcctgtaatcccagctacttgggaggctgaggaaggagaatcacttgaacctgggaggcggaggttgcagtgagccgagatcgcgccattgcactccagcccggacaacagagcgagacttcatctcaaaaaaaaaaaaaaaaaaaaaaaaaaccagaaaaaaaaacttgccattaaacaaattccagttttgatttttgttttgcattggttttgaatccatgcatgttatggccacaaagaagactttcttggctccgttgtttgtcgtgtgtgtgtgtgtgtgtgtgtgtttgtgtgtgtgtgtagaacccagcaagcagcagctataccccgatgaggcaatgtcttcatttggccactcatgtcattccacgtttcctgagtgccctcttggctaggcactgtgctagacactgggctacaaaaataagaatgcctggtccccgttctcaaagtaagcgtgcttcctataattagaccctgagctaaggcgacagaaccagctccctttcaagacaagagtcgcctgtcttgacggactttcagatgggctggaagaacaaggtctggcgtgtatggactctgaactgctcaagctgctgccgtcttgcaggtctagagcctacagggtagcgtcattctagtttctttgctgggcactctggaatttgttctttctcctgcgagagacagtggtcctcagttgtgttccctccccaccatcctcaccctccctcccacggtggttagtcattctggaggctcaagttggctcacagaaggtgctcttgaaaacatcccccaccctcctcgtaaccccagacagtcaggaagggccgttgtcgggtactaagaggtgttatggtttcacattcatgctttctctctgaagagaaaacaaaacatgttgaaatagggagaaatcccagcagcagcttgcttgaagcaagggttgcataacaggtctaggaaacgtctggccgtgtgggtcaagttgagggactgcagccttgtgtcactgagggaacttcttccgggtccaccgagcctctggatccattagatccatccagagagccacttggaaggctctgggaccttgagttctggctggccacgtggtctgtgatggctgtcactggtgaaagagagaccctggctgatatttagccaacagtgtttattccctggcatgaccagaaagggtgcatttgagacactgctgtgggtgggggacccggaggagtgtttgtgtgtcagacttatgctggtgttgaggccctagaaaggtcaccaaactggggcggggtgtgggccccgtgaatttaagtcctggtcctgccattaaccagcttggaaaccttgggctaatcatttctctgggctagttttctccttgtgaatctagactagtgtcatctactttacctttttgacagggctgttgggaagcttaggtgagatagatttgtgaatggctcttgcaaaccttaacatgcaaagctaatgacagattgtatcagaggcaatgtgcttgattattagagctgtttaggttaacagcacaacctctgcagccagactgcctggagtggcacctggtcaagttcctgaaacctctctttgccttatttttctcatctataaaatggggctaataactttacccatttcagtgttgctgtgagaattaattgagatgatacacctagaatgttaaggcacatggcaaatgccccattaatatcagctcctcttgttatttctaaaagtattacttcaatgcctgggtatgtttatatattgctggtgcaattgttaattttatattatttttgtattgttagcttttatttggtcatttgatcctcttagctctcctttgaaggtgagaaaaggcaggtgttgtttctcatttcatatttgagaaaactgaacttcagaaaaattacatgccctagaactcgggcctttttctgctccagagctgaaagcgagagaagagaggaagggaattaggctggagcaagccagtaggatgttggatgcagactcagatgttaatggcagcagagcccttgagctggattctagaatatgagaaagggctgagattgatgatggggcccagctgcattgttgggatggaggaaccagagttgagtcgagggagtaactccaggaaatcatggcacccagaaagtgtggcacagaatgcagggctctaacgtatagttaggagttctttgggcaagtactccagcaagcaaggaagaaggatgatgacatatggttattgccacaggatatttttggctgcgtctggcttctctctctgaaacaaattgcagttgctgtgacaccttctcatttcagcagtgagtcgaagttgcactcaatatagtgttttgaattcggactagtcgtgaagattcctttccagatcatagtatatgtatataagtcacttactgggaagagcactacatcatagttccgtggtccactaaggctgcagttttcttatctgaaataaggaggggtaacggtgcccatcctgcctcccctggcaggtccgcttacgcatgtagtgagaaaatacaggcaggcttgcagggaacaccgctttaaaagtataaagctctctgtgcaggtgctaggtcatggtatttattatcacactgggatcctgtgggaggggtaaggttagctcattggaatggaaaatccaggctctcattccagcactaggactcagtgcagctgcctggccttgggcacttaacctctctccttacagtgtctcccatctgttgagccaagacagggtggctgtctgctgccgcccatttggctggctaatgaggaagagccagtgctgctcacagcatgctcatttcgtggtaatgtagacaggggatagtagtggctgcgtgtagcagaaaccagcagggtaggaccggatgagcccaccttcagggaggtgtacccagggctgttagtttgaggacgtctgtgggattttatatccttactcttattttccaagaaagtctgtccctttgagcaccaggcagatgagtctggggacgctgtgaggaggggtcccccaggagcaggaaggtgactaatgatcccggaagaatgactgtgtgtgtttgcagacgcctgggctcttccccagtttggcctttcccgtcactgttttcctcacttgcttaagaggagaaggaggtaacgcacacaagtgcctttgtctcagggtccccacggtgcccatcttgagggttttgcgggcgccttgcattgcctaaggcctggctttagaagcagaacatggagagagaggtttgcagcctgcaggaagctggccagccagacctgccgggcagcgggacccgcgggcagtgcctctgactcacggcacgtccttgatacgcagtgctcccctccccactttctctgccctcctgtggatcacgggtgtcctagggctgttgggagcctggattaaagttgctgagtggccggctgatgatcagatccagggagtcagaccagaggtggggacatcttttcaaaggcaagaagatgctgccagtgcgtgtatatacatatgagggtggaaggggtaaacccagggtgtgtctttaactgaagaatcaagaaagctgctttccttagtcacccgcctctgtggttcgtttgctaaacgttggcttgcgttagcctgattcacagtaatgtggctcccaaggaagattcacatggtatttgtgaaaatgtagcttcatcccctgcccttcattgaatgactgaattacagtcagcaccacataacgatgtttcggtcaactatggactccatatgtgatgagacagtgatcccatagattatagtggagctgaaaaattcctattacctaggggcatcacaacgcattgcatttcgcccgtgtttgggatgatgctggtgtaaacctactatgctgccagtcatgtaaaagtatagcacacacaattagtaggtaatgcttgcaaataataatgaaagactctgctactggtttatgtatttactatgctatactttttgtcattactttagagtgtactcctacttttttttttttttttttgagatggagtttcactcttgtcctgtaggctggagcgaagtggcgcgatctcggcttactgcaacctccacctcctgggttcaagcgattctcctgcctcagcttcccagagtagctgagattacaggcatgcaccgccacgcacggctaattttgtatttttggtagagacagggtttcaccatgttggccaggctggtcaccaactcctgacctcaggtgacccgccctcctcagcctcccagagtgttgggattacaggtgtgagccaccgcccctggccttttttttttttttttttttaagttaattgtaaaagagcctcaggcaggtccttcaggagggattccagaagaaggcattgcgatcacaggaggtgccagctgcattgggacaagatgtggaggtggaagacagtgatattgatgatcctgaccctctgtaagcctaggctaatgtgtatgtttaagaaaaaagtttaaaaagtaaaaaaataaaaaatgttaaaaggaaaagcttatagaataaggatatagagaaaaaatattttttgtagagctgtacaatgtgttttgtgttttaagccaagtgttattacaagagtcaaaaagtcaaaaaattgaaatttataaaacaaaaacattacagtaagctaaatgtaactaattaattttatttatttttttttttagagacagggtcttgccttgtcgcctaggctggagtgcagtgttgagatcatagtttactgcagcctcgaactcctgggtacaaggaatcctccctcctcagcctcctgagtagctgggattacaggtgcgcaccaccacacagctaatttttaaattggtgtagtgaaggagtttcgcaatgttggccaggtggtctcaagctcttggcctcaagcagtcctcctgcctcgacctcccaaagtgctaggattacaggtatgagtcaccacgcccaaccttgaaatttaatttattatggaagaaagcaaaagtttaaaaaataaatttagtgtagcctaagtgtacagtgtttttaaagtctacggtagtgcacaggaatgtcccaggccttcacatttactcaccaccactcacttaaactcacccagagcaacttccagttctgcaggctccattcatggtaaatgccctacacaggtgtaccattaaaaaaaatcttttggctggttgtgatggctcatgcctgtaatcccatctcctggcttcatgccattctccttccccagcttcccgagttgctgggactacaggcgcctgccaccacgcccagctaaattttgtatttttagtagagatggggtttcgctgtgttagccagtatggtctcgatctcctgaccttgttttgatctgcttgcctcggcctcccaagatgctgggattacaggcgtgagccactgcgcccagcaaaaaacgatgtggtattttcactgtactttttttttgttattgagacggagtttcacttttgttgcccaggctggaatgcagtggcagaatctcggctcaccgcaacctctgcctaccgggttcaagcaattctcctgcctcagcctcccgagtagatgggattacaggtgtgtgccaccacgcccggctaattttgtatttttagtagcgatggggtttcaccatgttggccaggctggtctcgaactcccaacctcaagtgatccacctgccctagcctcccaaagtgctgggattacagttgtgagtcaccgcgcccagccttcactgtacttttggtatatttagattcatttagataacaaataccatggtattccagttgcctgcagtattcagtacagtagcatgctgtacaggtttgtagcctaggagcaacacactatagcgtacagcctaggtgtgcggtagctatcccctctcaatttgtgtaagtacactctgtgatgttcacagaaggatgaagtcacctaacaatgcatatctcagaacatatccccgtcatttgcgatgcgtgactgtaattaaggaatggggcctatggggtatgactgtgggtgctgggcactaaggagacggaggcttgacacaacccaggcattccccatgggagcccctctgtggcaggaaggacagatctccaatgaatcattcctttcaggagtgatgagctcagtcttcagggatcctgcacctcacggggaggagttgggaaaggccccccgaggaaggaatatctcagtatctctatctagacctgaaggagatgtggatgttacaactaaactgtatgattctctgtgtccctgagaacatcacagcctatttccaaggtgcctggccatccccagggtgcctgcatgccactgacactctaatctggggttctgctctgagctgagaaagtgtctgtggtttggggtcatcaggtggcagctcttctcctctctgttctgaaatcttaattccctgtttgactgcctggtggctttcagagaagcccagcctcctcccaggtgggaactttcactgtcgaactaaggacccgaggagggtggaaacaggaggaagggaggctaagcggtcacatcagaggcatttctgctcatcgttggctcataataggtggcagtaggggctggtggagcagtggccaggtaagttgctaaaaataaaacatgctcatgtgacgtgtgcaggtttagggtttgcctgagtgagctttcctggtccaggtcacaacttgtagggcaaagagagacttgaggatggtgtaggcgacaactgtgccttccaaaggtcagagatggacctgggatcttgtagtaccagggcctgctctggaggctcagattcgtgtgtcacttcttgtctcttttgaaaggtaactggagagctggacactttcctgtcctctctctttccttgtagccttcctctctcagagatggcctgctatcaaatgccaggggcacagtcagctgggcttggtaaagggcctgagatgagagcttggggactttcccactggagtccatgatagtccagggtgtagacagaagctcttggatctcacagctttggaaaccgagtcctgtttctccaacaggccagtgcggtgacgggcacagacctgctgtcctctctatttgtgtgtccactgattccctggcacagggggtctttgttacaaaatctctttgctgggtgctttgaaggagcacgtgtgtgggcctttttcagggtggttagacaatgccaagctgtcactcagaagaaatggtcaggatagaagcatagaaaatgccctgtggaaatgtagatgagtgttctggctcacacctgtaatcccagctactcaggaggctgaggcagggggattgctggcggacagcagttcgagaccagccttggcaacggagcaagaccctaactctaaaaataaaaataaaaaaataggccgggcgcggtggctcatgcctgtaattccagcactttgtgaggccaagacgggtggatcacgaggtcagaagtttgagaccagcctggccaacatggtgaaaccccgtctcaactaaaaatacaaaaattagctgggtgtggtagcagatgcctataatctcagctacttgagaggctgaggcgggagaatcacttgaacccgggaggcagaggttgcattgagctgagatcatgccattgcactccaggccgggcaacaagagcaagactctgtctcaagaaaaaaaaaaaaattggttttgtgtggtggtgcacacctgtagtcccagctactcaggaggctgaggtgggaagattgcttgagcccaggagtttgaggttgcagtgagccgtgatcatgctactgcactctagcctgggtgacagagcaagatcctgtctctaaaaatattaaaatgaataaataaaagaacagaaaatgacctgtgtggggagaagggttatctgtgaaaggagttagaaacctcaagtgtacataagtaagactggagatctctctgttaatgaaattgtgcttaaaaatttttttttcttgaaccttggcttctcaggcaataactgaattttaaggtgtgtgtgtatatatatatataggtatatatatatataggtgtatatatatatatatatatatagtgtatatatatatatatatatatatatagtgtatatatatatagtgtatgtgtgtgtgtgtgtgtgtatatatatatatatttgggccaggaagggtgaagtgttaaattgccttacttagaaaattaaggtagatttgtatttagcccttagagcttcaaaaatatcagctcagaaatgacttttaattgtgcaggtgataaaatcacaagaaaaaaattcatctacaagttggaatgactcttagctacttatttgtttttaaatttttttttcaaattttggaaggaagtagagaaggagttagaactgtaatttgctattatgggggttggggtgcagtgcgtattagtacaatgttaggtggtggcaggttccgtttatccttggaattagcactgctccccccacaggcttctgggagttgggagcaggctggttggtgacgctttgcctggccttggataagaactcttgttttcaaattcccttgaggtctcttccaagaatcttttgcattttttctgataaatcaatcataaggaagtttctgaaattctctttcagaccctacaacccacaagttactgcaaagctgggcttctaccagaagtgagtgatttgaaattgaaaacagatttcggatctcacctgagtagctcgagtgtaagggagggactgggagagccacagagaacatttgtcaatccagaaccaaccattcatggtgttgcttgactggagggcagggaaggaaaggactagaagcaaggcgaaagcagatctttctgtagatacacacatataagtcttggatttgcattttagggtgaattgtaattagcttgagatgaccaggggcccaccaatcaagcaactctgggaaaaacacttgtctacatcttaagtttctttgtctataaaatgtcaagattgaactaacactacatgattctctcgggaactcaccagttctaaaatttccactccttcttttcacagggcagtgtaactttaactccctgtttcaactttgggtgtaaaatacaggctcacaagcacttttgctttgcagcggaagctaggaagaccctgctgtggaattttgcagaggggctgagcagtggtgggaaggaccagcggcccatgtaccatgttgggcccctgcattccaaggtgtctgcctagaaataaatgatagtttatttaacatacttgtaacttccaacgacaacacttcaagactgcaaatcatccatccgggcaattacagaaatgctgaacggccacagccccgccctggaatcaagggaagaagtgtggcagatgcttctggaaggctctgtttacagctctctgactccttcctgccagaacctttcacaagttcactaccaggaagctgagtcatccaggggtcagccggcatggccaaggtcaccccgcactgccagcagcacagatggggttagcccatcattccagaggagcatccgtgggaatgatggggttggggagctggggagcctccctgcagcatctccctgccatggtgttttgcatttcctgtagatttcgcagtgagaaacggtctcctcttatattcacttcatttcttctctctttctttctttcttttttttgagatggagtctgtctctgtcaccaggctggactgcagtggcgcgatctcggttcactgcaacctctgcctcccgggttcaagcgattctcctgcttcagcctcctgagtagctgggactacaggcatgtgccaccacgcccagctaattttttgtattctcagtagagatgggatttcaccatgttggtcaggatggtctcaatctcctgaccttgtgatccacccgccttggcctcccaaagtgctgggattacaggcgtgagccaccacgtccgggctttttttttttttttttttagacttgttgcccccccaggatggagtgcagtggcgcaatgtcggctcactgtaacctccacctcctgggttcaagcgatgctactgcctcagcctcccaagtagctgggattacaggcatacaccaccacacccggctgattttatagttttagtagacactgggtttctccatgttggtcaggctggtctcaaattcccgacctcaggtgatctgctcacctcagcctcctaaagtgctgggattacaggcatgagtcactgcgcctggccaaaggcaagagatgaggaccatatagatggaaacacagcattaagggtaaaacactctctctctgctctgtctggtgttcagggcccagcatgggctgtatgtcctacacttcgtttcaggctcatcttcaggtgacaccagccttctcggagcctctgtccacatcccacctgtcactacctctgccctaacttcaccttcagtggtcactgccaggacccctccccaaatctaaatgaggtccccctgcatttgccctcattgcaccttctacttttgcttcatggcatttagagtttggaattttttatcgataggatttttagtactctctctctcctctactagactataaactccttgaaggcaaagacgacacctgctccctcagttccagcagcccctaacactgcgctgacatttaggtagtagcagcgttttcttgcagaacgatcctgtagttttaccagctgagacttctgtggtctggggagtcactcatctctggtccctgcctcctcctctcacttttggaaacccttctggccagacggctttggtttaaattgtatgccggagctcttggttccagggagagggttttagcgtaaaaatctcactcatgatggaaggttcctgctattaccttttgcatccaatacaacttaaattgactcctccaaaagcttcggaagtaatttgtacctattgtctagcataaattcagcaagtgggtcccggaggctgaaagtcgagtcttgcggttgtttcctctggtgtttctccctgagacccttagaacggcaagcctggtgcatctggtgtcctgtcatctttctctgtgattgtcatcagtgtgaaaggtgaaaggtgtgtggagaaagaacatcccttcgagctgtggcttagagctgtgacttggcaccacgtggttagtcactatcaagttagaagcctttgtgggaaatctggctttggtaggatctgggaaatttggacccctcatttgccccctggcatctctaaattccagagcccagctttgatggggcttacatccccagctgttaacctgtggggtgggccccagactgtggccaggtgcattgcgctaggggagacagatccacagcaggcagaatttgaggaggacttaaaatacctgctttgggaggccaaggcgggcagatcccctgaggtcgggagtttgagaccagcctgaccaacatggagaaaccctgtctctactaaaaatacaaaattagttgggtgcggtggcacatgcctgtaatcccagctacttgggaggctgaggcaggagaatcgcttgaacccgggaggcggaggttgtggtgagccgagatcaagccactgcactccagcctgggcaacaagagcgaaattccgtttcaaaaaaaaaaaaaaaaaaaacacaaaaaaacaaaaacccgctttgttacctgcctgtgggtggaattgagttcatctctgaatccgtggtagtcatttattgagcacgtgttttagtgagcatggcatggcgctggctccgagatcacagtgctgccgccctccttcacgtttctctgacctttcatgggagtcacatgcagacgcatcacttggtataattatacgtggaggaatgagcaagaggaggctggcgacgggactgctttaaaaatcccttcttctgtggataataggctaatagcggggtgtgctttagaaggtgtggcctccgccaagggcgtgggaactgcatttgtagaagctgggaggaccacacctggcttgggagacggcatgggtttctgaggtgcctggctccctggcctgtccagtgtggacagcttacgcgcagctaggtgaaatgattgtgcagttgctgagggattgggtggcagagctggacagaatttaggtcttctaacttggaacagggctgtgtccatcttacctaggtgtacagtttggggagcactgctgtttggtctagtgagacacacttggtgtaaatatctgtgccctgtagtacccagattccaagggaccagagagcatgcccgcacccacgggctggcgggagcccaggtcctccagggctgctgtggagcatgggcttcttggtgcccagtcctatagctgaacttgggcggcctctggctgttgcccccagggctggtctccctatagttcagaggcgagccagctctcagcagcagggagggccttttccatagtatgaacttggccacaccagaccagtcagcagtgtcgggaatcttggccctcaaggtccctgcctagccctggcctggacttcagcactggtcaaaggtccccagagctgcccttggctctgagcaggtgagtgaacttcccagagcacttttgtctgggcctctgtgccagtgtaaactgataatagtgatttccctgccccacctctctgccagctatctaagttttctttgttacataatcaggattaatttaagcagcctaggccatccatttagaaatggttagtgaagaaaggtgaatggggaggggtcagagtcccttagggggccaccaggtgcgagtccccttgctctttggggccttggtttcccttctgtgagttggggcagctgaagggaagggctgctcaggtggtcctgccacatcccagtgttgtgtctagtgagtacaggtgagagtgctcccaaccagggcagatcctgctgctaggcagtgagtcaggaaggaattggtaaaaatgacgtcattgctaagaatgacgtcttttttgctgtttatccaaaggaaaaaaaaaaaagcagaaataaaagcagcaggcagctgtccaccagaccccatgcaaagggcttttccttgaatcctcacagagactttaggcagtaggtgccattaggagccccacttacagataagaaaacgggggcagagaactgaagtgagtcgcccaaggacacacattgaggaggaagcaacagagctaggatttagatacagaggggtctccaagcctgtccttccagctttgaggtcctgggcctatatattccatcagaaactgaaaggtgtgttggggggtacctagggtcaggatggggttttatttctgtcccttccttgtgatgctgcagggactgtgacctggagttcccaacaccagtgccctgtggctggtagcctcctcctgggactccaggatctattgtttgatttagccattttcttctgtagtccgatgggagggattcaattcaaacctgcaatactgttctttgggccatacaggccatttatcagcaagtagagaaaaacacccacaccttctagcaagattaagctagttctgtggttcttaatgataatttaagccattttgattaacctaggtggtggttttctccctaccaggtagggaatatactggagcctttctaaaaatagttccggtgaagataaacatttattgagtacctactgtactccactaggtgaatacaaggatttctcgttcatctcaggaagcatggttaggggattttacagacgagggaactgaagttcagggaagttaagttacttatccaagttcatatagctgaaaaatagaataggatttcgaccttgtggtaggtggaaaccggggttgtctttgtgctctcaggcatgtggctggcgtggggtagaagctctctatataatggttgagtgactggatgagcttcaaagctggtccctctggcttttcctgctaccccaggccacgtgcccagaaggaacgctgtcttacctgggaggtctttattgactgtttgacgcccttcccatcctatcccaaccccttccccatggcacctagtttccccaaccagaacgtacgttacttatgggcagagacggtctttgagcattgggtgggtggttgaacgcagtttctttgagattctgtgattgggattttcagcaaaatatggtagcaagttggtcagaggggcgagtctggcagtgggggagcccgggcaagtctaactgtttgctcactggcagaacaaagttggggaggttggaggggtaggggaactgaaagcaaaagaaagctcacagggagccccatcgtgcaaaaccgatgatggcagagctgccgggctgcagcgtggagcggggcgggagccttgtgtggagtctgtgaacatactctaggtgcctggatactcctcttatctccccacacatgggttgatgtgcatgtacggtgctttgatgtggactcttgtgttaaatttgttcttctgcgcagctttgtgacgcttcagtgagtgtgtctatatacaaaaggaaaacagttttggctgggtgcagtggctcacgcctgtaatcccagcactttgggaggccgaggtgggtggatcacctgaggtcaggagtttgagaccagcctggacaacatggtgaaacccagtctctaccaaaaaacacaaaaattagccatgtgtggtagcatgcgcctgtaatcccagctactcaggaggctgaggcaggagatggcttgaacccgggggctggaagttgcagtgagccaagttcacgccattgcactccagtctgggcaacagagtgagactccgtctcaaaaaagaaaaaaacaaaaaacaaaaaaaaaaccaacaattttgaggatgaggcatttcttccttacttatgagtgggatgtttatgggccggtgacattgacaaggctggcagagtcaaggggaggccctgggtagtctagcttactagcagtgaattcagttctctcttgaaagcaccgtgactgttggaatatttcagccttagcctttgaatactgacggagtgccaggctttcgtctgtcaagatgcccctctgtgacctcagctggttaatgtctcaagcgcttctttaggagacagaatgggttggtattgaaccaaccactattgcccagtcttgtgatgaccagggttgtggaacagataagttgtgtgacctccacgggtcagggctgttgactttgcctgtaagttacactcttgcagctgggcatagacacagtcctcaggggttttgtggacattaacaagtaaggatttaggtgactctgacatagggtcttccccaaggtcaggcacagaggaggtggcatccatgggacttagcatgttgtagaaacagagcatattgggacaaaagggaagttgaagatcacctgggatcctttagcgtccatccctttgtgagagataggatagcctagttgttaacagcatgactctggccgaccgcctggcttctttctagtcttccttctgtactttgtgaccttgaggcaagtcatttggtctctgtgcctcagtttcccaatttgtggaatggggataactggttgctaatattgctgtttttattgttataattattttgtaaatagaagggttgaaggttcagggaagcaagttgattgacctgaggccatacaatgtatcagtgccagatgcaggatgagaaagaactgtgactcaggccctgtccctcttaccagggcagggcaggacagggaagctgggcaggagagactggcagctcagttccctctccagtccagggtagtcccttccctttctgtctcgcagtgaggtcaccagttgcactcatgaaatcttagtcctgttatctggcatctttggaatttgccccacctgtagggcagagataacttaatcctttttggtgggccacatatgggatattctgggtgtgttctgggtacactgggcatgggccaggcacagacccttccatccattggaggcttttctagagaaggggtggagaccagattgggttcctagggtcgggggatgtgggaatggcaccctctgaactacaggcaaggctgggagctgctgccagtgggcggagagggaaatctaactggtatgtgatgttagtggtggcctggcaagcagctgtagctttggagagagcgaccagcctgtccaggggcctggtagggaaggcttctgttgcacggcctgttgctttctctcagatactggagagcccatctgtcttgcttactgcatggcttttcatagctcccatcatattgctgttgggtgcgattcatagccatggaagacacctgatcataaagtaaattccacacactccagcaaggtattcagggccttgcatggtctagccccaccctacctttcttccagcaaacaataattgatcatctaaggtggcagcttctctcctaagtctgaggctgcttctctaccctcacctgactgctgtcttctctgcacaccagaccttccggccacaggtcctcattccccagatgcaccagcatgttcacatcctcctgcagcgggaattgttttcttcctctccatgccaaatttgtctttttctttcccagtcaaagtaacatatgtacatagtcacaaaatgaaatagtgtagaagagattgtagtgacagctctaattcttacagcttgacatactcttcctttttctaggtggctgttcaaatggcttccttccagccaccttctccaggttggatgtgatctggactctggatctctaccctatagcacatcctgctgtgacctattccaaggagaaggggggtttggtgctggggcttctctcctaggaggctgaggaacttggttattgctatcttagcagaattgttattttctaccaaatgtgcaatgaaaactcttcactgagtcttttgcccctagcaatagcagtgcttcctgaagccccagtagaccctgaaggtttcaggactgtgtctggagagcatcagtgacaggtggcaggaatcctctgtggtccacttcagaggcggcagatgaccaggaggtcagactgtggctggtcttttcagaaggacaaacgtgacccttctgaaaactgggaccattcggggacattggtggaaagacagaggagcctttatggtttgttctcacacatatgaatccactttctcccccctccaacatcagggtgacctgaacgctgaaggaagtctaggccttcctgtaggtgaggcagggaaagccacgtagacctgatttagttgaagtgttttccaccaggtctcaactcttcattttgtcttggtatagcttttctggctgactttctagcaagctggttgggctctttgcttgttccaaaatggtagttttcaccagagacttttcagatgagcaggaagcttttttcagaatgtatgttcttctaactctgcttgagtcccccgccatgtattctgataggcatttgttttcccaccccatcccccacttttttgaagtgggggcaatgactacttttaggggaatcatttttctgttgctggtttcaaaacattaagagcaccaattttttttttttttttgcaacagagtctttctcaggctgaagtgcggtgacatgatcatagctcactgcagcctcagtctcctgggctcaagtgatcctctcaccttagcctcccaagtagctaagaccactggcacccaccatgcctggctaatttttttaaaaaattactttctgaagagatggggtcttgctatgttgtccagactgggcttgaattcctggcagcaagtgatccacctgccttggccttccaaagtgctgggattacaggtgtgagccactgcacccagctcaaattttccttttcattaaaaacatacatatatgtatatgtatgtatatacatatgtatatatgcatgtgtatatatatgtgtgtatatgtatatatgtgtgtatatatgtgtgtgtgtgtatgtatatgtattatatgtatattctctttgtgtatttatttttgccagtttgggagatgttagaaaaagacacgatttggaaacttcaacttagggataaagttagttatactctgagagctgcagttaaaggattatttgtgctgctctgctcttgcctgcgacgtgtgggaatgatgctgagtgatgtcctcctgcttattttgcgtgatttttttttgagacagattctcgctctgtcacccaggctggagtgcaatggtgcgatcttggctcactgcaacctccacctcctgagttcgagcgactctcctgcctcagcctcctgagtagctgggattacaggcgtgtgccactacacctggctaatttttatatttttagtagagatgggattttgccatgttggccaggctggtctcgaacccctgacctcaggtaatctgcccgcctcggcctcccaaagtgctgggattacaggtgtgagccgccacacttggccaattttgcatgatttttacatggcttttcaaagggccagggtgggactatccaaagccctgttaagagtccctcttctgccaaggagcctaggaagggagcaggtttgagtgaggaaggctggtggttttggacggggaacgggtggttttggacgggtagtgccaacggtttttgtgtgcgtggtgctccttgatgtggtctgggtttctgcatttgtagtgtgtgccttctaaggatgctggaaggtgagacagggctttccaaggcctagatggggtttgtggctttacttaggaagacagtcctttccataaagcgtggtgccaaatgcttttcctcctgggcctcctgctgtgatttgtggcgtggagtttcagtgagggagggctctgcaggaaccagctccttggtctgatcctttctggacaattgtggatgggagttggcttcttggtgtcttgagagtgtcctcagcagaccccagtgaagcaggagcatagagctctggatgggctcatggtggacatgggagagctgctggccagggggctgcagggtgaggcttggaaaacagggagggggctgggcttggccccgcattttactgtggtttatttagtgaatgtcagtgctagctggggacagttgacagacaagagaaaacactggtttgattttgaattctgaagcagacattgggcagcagaggctaacatttggcatttatcctaaactttcgaggtgcccgagccttatttcctttctctgggagaaagtctggaacagagacggtgcggagcagcctctagggctcagccctgggcccccctggagttgtgctgctcatggtatcacagtgcttgtttgtttcctgtttgtatccccattgcacctggctcaaggtaggtgtaaggcaaatgctttagaatgagccagtgagtagatttcacatgatcgtctcctcagtcctagaaatgccacgtgaacttcgaacatggaaagttttttatttttgagagattggagaggtgggagttacaggctgtctccaggtcaggcagggagtcagtggctgagtttctgatgctacagatggctggcttgggtggcatgacctctgcaggacccctagaagggcctgaggcccactaccaggctcagcttgcccccttctcttttcttttttggtcctaggcctggatcagaggctccttacccacaggatcttggacaagtcattttccttcttgggcctcagtttcccatctgaaaaggcaggggctgggctggatgtggtctccctagggccattgttgcttctgttacatgatcccgccagctcacctgggacagaacgtgcattttccactctccctcctccccgcagtgagagaacgggccagtgagacaggcctttcctgttttgtcatcttaggggagaattggtgtcaggggctgacccttcactttgttctagctttgctaggagtttgtggagacagtggatgcagatacagacagagttcatatcactgggagtttcactgtcctggagcagatctggagctggaggggacttgctcaggtcacactgggagtggcagtgtcaggccagagacccttgtctcttgattccccgggcaggacacgtttctccatcctgcaggcaggtgcagaggaggaatgcttattcataggcagcacgtgagggctcctctcagctgcttatttggcaccctctttcccctccaggggccagccacacaaccacctgcctccggcctgctccccacacagttgccagaggggtctttctgactctctctgacacctggatgttcttggcacttgctgcttcaagggcataggttcccattggctacggctgtgttttcacacgtgtgtttggtcaggtgtctctggttattaaatgagacaaggcttgcattgctaaagacagaggtttaggaagtgccttggaaaaccaagtgaaacaggtttctttccggaaggatttcccagaggctttagtatggtaatgtgcttatgcatttccaagaggggagaactaaaatgcaaacgtggaaactgattttaccgaacaggaggagactagaagctaggtcttgggcaggaactgaaacctggacaggaaaagaaatttgtgaaattctctgtctccggttgtgtgtgtgtgtgtgcgtgtgtgtgcgcgcgcgcgtgtgtgtgtttatttttaatctctgccctgtctctgcatcctgattcattcatttcctttttcctcctctccaccctcacttccttttcttgtatttttaaaaattgtagtaaaatatacataacaaaatttctcatcttacccatttttaagcatacagtccagcggcattaagtacattcatactattacacaaccatcagtgtcatgcatccacagaactctcctcatcttgcaaaactcaaactcctgtacccataaaacaagaactctccgtcctgttccctcctcaccccagcccctggctacccccattccactttttgtctacaaatttgactactctaggcacctcatatcagtggaatcatacagtatttgtctttttgtgactggctcctttcacttagcatgctgttgtcaagaactatctatgttgtagcctgtgtcagaattttctttccttttttaaggctgaataatattccactgtatggatatattacatcgtgtttatcccttcatctggtgatggacacttgagttgcttccactcactcccagatgttttttcccctctctgatcctcaaggaatagaaaatgcccagccttcatttttacattttacaggtagtggagctttaaaaaagagagtactttgggaggcacagataggagcatcacttgagcccaagagtttgagaccagcctgagcaacatagtaagacccagtctctacaaaaatcagctgggtgtggtggtgcgcacctgtagtctgagctactcaggaggctgaggtgggaggattgcttgagcccaggaggctcaggctgcagtgagctatgatcgtgccactgcactctagcctaggtgataggtgagaccctgtcttaaaaaaataaaaataaaaaataaaaaagagactaaattgattattgtctctctggctgtggccacttctgcctgccttcctagccgcctgccttctgcctctcttgcctctcctgaggctgctgcagggttgatccctccttgcctcttccttacactccttcgaggcaccctggtggttcgtttcctcctcctgttatcatacactttccttgtttttccccattgttttttctcctctgtatcctggtgccaacctcagtgggtgctccctgcaggcaggtggaagaaatgatggtgctgcaggatgaatgaggctctggccccaaacttggctgctgtgactgcagtggtcccagcgggggcctgaccaggcccatctctgcgcttctgggccacttgcctctgtctggggcttgtgtcattaactaagacctgcccttgagtaaaccaccctgaggacagagaagtccactgaggtgcggtgactgaggcagaactcaatcttttagaggtttattctatcagggttgaggatgcaccggggaaaagaaacacaagttatagtaggatctgtgttctgtgctttttccaaagagggctctggtaacgtcagtatttaaaggggaaagagcaagcaggagggagagaagaaaaataaaagaaggaagggtaggcattaggcaagtggtaccattcttgtgaggctctgattagcacttagtgaatctgcattttacatgtgaaaagaagggagttggggaaagtgaatcatggtcttgcactcagtaaatctacgttttacataagataaagtaagcttatgaaattagagctgtctgtttgggaacaaaaagaaggtcagtttttgcatgactcacttcccaagcttaactttctttttctttgacatagtgagtttagggccctgaggttttatttttctttcacagcacaaagatacccagttgacctttttttttcataacagaatgatgcattttggttcagtagtgtttcctccaactgctctacccctaatttaaaaaggggagggggtgagaaatcagtcccaaatgtccctgtaagttttggtgtgatgccagcctccaactggctgacatgagcagttttgtaaaggagagaccctcttgatggcttcacgtatatcatggggtgggatggggacagtcattattgacagccagcctgtgccaagtgtttcccagcagctctctgggcgattattccagccaaggatggccatgccctaaggttaaggaacctgcttgaggtcccagagctggaattgagattgacaacctcaggctgggtggctgtacagcctgggcactctctgtgccccctgccctcactcagccactccctccataggtcaccaggggtaattccctactgcccaggcagagggctggggctggaaggggtctagatggtcacttagtggttccccaagctgagtcctgatcaaaatcatctggggaattttaaaaagaaaaagaagacttgaatcagtgtgtgctagggtggtgtctatggatgggtattttcaaacatttcccgggtaactctgatcttcagcccctgctctgatcctccctttcattttccagtccaggacactggggaccggagagatgagatgccgtgaccaaggtcactgggttgtagccagagccagcatcaggtccaaagtgcgatctcagtagccagttctccatgctctgtgtttgttcagactgccagccctgctcaatggggctctggaacttaaggaaggcctttgaccataggctgggcttgcaaaaccttggtaggaccctgcccttggctggaaacctcagggctccagccagggctcatccccaagaagatacactgccattctccaaagtgtgggggcctctcccctgaagggcgctgcctggagccacctcttgttcacaggcccatgttaggccccctgggacaggttgccttggctccatatgtggttctgcagatcacacccaggcttgagaaatgcggtgacacgtgaactttgcattgatgtgaaaaggtccaaattaaaggtgatggcaagcacagctaagtccaagaaagtgtggctcctatttaggggtggtgggctaagagacaagacacagtaccctttcaccccggtgggtattctaagttgggttagtttgttcatcaattcattcattcaacaaatatttattgggttcccaataaatcatcttactggtccttggagatctgctgtgaacaagacaaacacaaccccacctctgtggcctgcacaaccctggaaggtcacacactagaaccctatcacttggcctctccatgaatcaccgtcatgtagcccctcgacaggggactcttgtgttattactgacaatattgatggttttagacacatattatcccatttaattttcccaaccattctctcaagtggggaaactcaaacttagaaagtttaatgaccttgcccagggtcacaccatgagtgatggcatctgaattcagccccagttctctctgattccaaagctggggttcttgacagccacattgtaccacctggtacccttgctttttgtcaggggcaagtataagaagaaggcaggtgacacgtgaagctttatttgctctaaaacttgagcgatttcatatgtcctaaaggaggagttttgcctcttccttcccagcatgaacacttggcatggtgtgtacatcttcattcgtttggtctggccaacagccactcgggagctgaatgaggtgttgtgaccatgacctgggtattctcttggttcagataccttcttggttggcacattcactttctcgtccttcccttggtctttcttgcttataatatatcccttttttaatttttaattttttttaagacagggttttgttctgtcacccaggctggagtgcagtggcacaaacatagctcactgcagcctcaaactcctgggctcaagggattctcccacctcagcctcccaaatagccaaggctacagaggtgtgccgccatgcctggctaatttcttatttttttgttgaaatgaggtctcagtatattgcccaggttggtctcaaactcctggcctcaagcaatcctcctgtcttggcctcccaaagcgccaggattacaggtgtgagccatcacacctagcctaatgtatcatcttattaaatcagatcaaatcctttttgaaaagacttaaaattgaaatcactttaaaaaacgaaaggatgcagggctaccctccctgggaccctggggcccaggtgtcttggcagctgccttgggctgggccagaagatgtttttgccagtctgtggtaggaaaaagggtgcagagtagcgagtttttaataaagctaaactggccgggtgcagtggctcacgcctgtaatcccagcactttgggaagccgaagcaagtggatctcgaggtcacgagtttgagaccagcctggccaacatagtgaaacccaatctctactaaaaatataaaaaattagctgggcgtggtggagggcgcctgtaatcccagctactcaggaggctgaggcaggagaatcgcttgaacgtggcaggcggaggttgcagcgagccgagattgtgccactgcactccagcctgggcaacagtgtgagactccgtgtcaaagaaaaaaataaaaataaagctaaatctaatttaaagtaccattttataatcagaggtagtcttccttacttttttttaagcattaaaaatgccctttcttttacaaaatcatgtttgtggtggagggcagtggtgattgttgcttatattgttattgtttttgcgtcctttctgggcaaaataaaaagtttgccttggtgtgtccatttcctttgtggttttaatagctggtgaaatctgaactatgaaaatgaccactaattcaggtgattggttttcaccgttcctccaagccctggggtacctggggctctctgtcccggtgagtgagagggagccccagagagtcctttgcccatcttcaatcagagaagccctccttttttatatgtaggattagattttttttatgattttgtttggagataaaaggatacccctgccaaaagttgaaaagcttctcctctaggatgtgtgttgggggggagtgggggagggagggagtcggggagggaggaagggaagggtgggaggaaggaaaggagggaggcaggaaagaaggaagggaggaagaaggaaggagggaatgtagtgactttggtgggactgagccatggtggatcttctacttggcgagtatttcttgcctatatactagtcagagttctccagagaaacaggtaataggatgtgtaaagtctacttgggtttgtaagaccagcctttggttgaagaccttccttgggtcctagcagacagaaaccaggagagacagagacatctatatccggctacatagagaggttatctgtctaactctctgcctgttctctatctatatctgtctgtctgtctgtctgtctacctacctacctgtctctgtctgtctgtctgtctacctacctacctatctaatctacctacctacctacctatctgtctgatctacctacctacgtacctacctacttagaaattgagagatttactttgaggattgacccacatgattgtggggactagccaagtccaaaatctgcaggctggagatttagggagagctgatgttacagtttgagtctgaaggcagtctggaggcagaatttcttccttgagagagacccagtttttttctcacgaggccttcagctgattaaatgaggtgtatgtacccacagtatacaggttaatctactttattcagagtctactgatttaaatgttaaactcatttagaaaatcccttcatacatacatctaaactagtgttagatcaaatatctgggtactgtggctcatccaggctgacccataaaattaaccatcacacctgtgcaagcgcttttccctcctggatggtgtcctagggatgacagaggaggggaaagccaggtctctgcttcaaggagacaaaattatgcatacgaagaaattaagaatgctgctgtgtctgtggagtagccattcttttattcctttactttcttaacaaacttgcttttacttaaaaaaaaaaaaagaaattaagaacaagaccatttatatttaagtgccaacttatgaaatgtaaaaagggatttagaggtgacaaggcaagtgagggctggaggatttggagagatttcatggtgtagggactgaataggagcttccagaacatggaggtttcagataagtgaggacacagaagtcttcacaaccagagtgggcaccacaggacaattctacatctatctaggactctgagtttttgaagggtttccatatgcattgtttggtttgctgcttgcaacaaccctgttgttttaactgaaggtcttagggcctagggattccccagaggccacacaacttgccagtggcaggggaaggtcttactcttccacagccttctctgtctttctccctttatggagcataatgaaatgtacgtgcacacattcatgtagatttcattatgtccatgtagaattcattttgatttcaaatatgtttccttcccagagaaatcctgtgaaactatgacattgtttttctctctctccttctccaggtcttattttccttctttaccatcctgattaactctatttttgtttgttttctcttcttgcccgctcccagacacgaatgcagagtttgagtccagatcccaaagcccagtacacaagtatctacggagccctcaagaaaatcatgcggaccgaaggcttctggaggcccttgcgaggcgtcaacgtcatgatcatgggtgcagggccggcccatgccatgtattttgcctgctatgaaaacatgaaaaggactttaaatgacgttttccaccaccaaggaaacagccacctagccaacggtattttgaaagcgtttgtctggagttagaaagttctcttcttcaacacgtccctccccagggtgttcctccctgtgacccagccgcctcgacttcggcccgcttgctcacgaataaagaactcagagttgtgtgtgcaatgcacacccagacacacgcacgcacacacacgcgcgcgcacacacatgcttttttctgttcccctccgctttctgaagcctggggagaaatcagtgacagaggtgttttggttttattgttatgtgggttttcttttgtatttttttttgtttgttttgtttttaaacattcaaaagcaattaatgatcagacataggagaaaccctgaatagaaacaaaacttttgaatgctggattcaaaaaaaaaaaaaagttatctggacagcttctttgagactatttaaaaactggtacaacaggtctctacaacgccaagatctaactaagctttaaaaggtcaagaagttttatggctgacaaaggactcgcgcaacgcagaaggcctttcccaccttaagcttccggggatctgggaattttacccccattctcttctgtttgtctgagtctcatctctctgcaagcaagggctgaaatcattttgtttggttgttttgagggagagaggcggggtgggggggtgcaaatctgccagcagctcttacgtaaggcatgttttattggggagggctgagcttttattttctcctctccagtggggttggcttttattgtttcttgtttgggtttggaatggaaatatggatagcagcataaagtacttttattttgacaaaattcatttttttcaacaatggagacatagatttgacccacaataacttctccccctctctttttactctgctcaaaaagcatctctcctcccattacccaaccttggtcataagtgtgcctggctggtttgcagatatttgttctgctttgtaaaaattggccattagtgcatttattgagatgatctctaaagagctatgccctgacctacccctgattctatgacattggggcccttcttttgctgaaactgccttacgtaatggttttactccttgaaagagatttgacggaatccattttatgccaagtgctgccctgcactgtttctgcaatatgtggtgtatgctgtggtgatcttgctgggaatgattataagtgtgtgtgtggtgggggagtgggtattacatgcattgctgaagagtcatcctggtgttcctcattcctcccaccttcccgtggtcattttaattacggggcagtgtcaccgcaaagggaggaaactcaaagccgaaagcaaaattccaggcctgattctggcttttgaggttcctggttcttgaagccaggcctgacccgactctcagatggggtcagtcccgtcgctttgcagactgaccctggaaatctacaaaatgcagattttcctgatttcctcttctcttgcccagttttttttttttttttttttttttttttttaaagcctggattgtaaccagattttcttttttcccccttctcagctgtagatatgatatctcctttcagggccccagcttaagggcaaagtgagttaatgtgtagacaaaggcgagggacaagagagagttaacatctagacagtggaaaaagccatggtgtgtggtttctgggaaccaccaacacttgcaggtttagctttttcccagggttgactacaagaaagaaaaccatgtttttgcaagattaaaatgtggttgagtgtgcctaaattaaccatccccatttttatcatatttccaccatcacttcagggttttaagagtcagtgctcacctgggcggagctggtagtacattttgcttcttagaaagctaagtcctgggttccgtctgattttaggttccaggaacttcctgagaacacccgatcgcagagggtaattttctggagtttgttttgcagggatagctgggagtatggccaccctgctccacgatgcggtaatgaatccagcagaaggtaatgtttcatggtcccagggaggggcagtaggggatgtgcaaaggggcacaaaaaatggttgtgggagagtggagaggactgaaggtgggcagagcggctcctagtctccagtcagagcagacaggagaattgaattttttactacgttatcaaaggcctcaagaaaggacgtgaacataagagtttttggtattcctgtgctcggagctactcaaagtgtgttctacagaccagcagcatcagacatcttgaggggtgttggaaatgctaattctgaggctgggtgcagtggctcatgcctgtaatcccagcattttttgggaggccgaggtgggcagatcacttgaggtcaggagttcgagaccagcctggccaacatggagagacccccatctctactaaaaatacaaaaattagcctagtgtggtgtgtgcacctgtaatcccagctactggggtggccgaggtgggagaatcgcttgaacccagcaggcagaggttgcagtgcaccgagagtacgccactgtactccagcctgggccacagagccagactccatctcaaaaggaaaaaaaaaaaaaaaaaagggaaatgctaattctggccggcatggtggtttaaaactgtaatcccagcactttgggaggccaaggcaggcagatctcttgaacccaggagttcaagaccagcgtgggcagcataatgagaccccgtctctatgaaaaatacaaaaattagccaggtgtggtggtgcatgcctgtagtcccagctgttcggaaggctgaggtggaagaattgcttgagtttgggaggttgaggctgcagtgagtcgtgattgcaccactgcactcagccagggcgacagagcaagactgcctcaaaacagaaaagaaaacaaaggctaattctcaggctttacaccgaacctactggatcagaatccctggagctagggaccagaatctgtttattggtgattctgttgcatgcttttgcactattctaaaacctatgtgtgcatacacacacacacacacacacacacactcactctcttagcccttgttaacccttatcgatcctagacaaatgtatggggaacccatcagaggctattctttagggctagtgttcaatttgactgtttttaatatgaaagattatggatcacatttcaaacagatgtgaacgtggagagaataatacgatgtaccgcagtgtgtccatcactgttcttcagaaattcacattgggtcattttgttttagccatctctttccacattatcttctttttgttcttttaaatttcgggggtaatatgaagcaagcctcagctgggcagaccagagtctgttccctttttatatatcccggcgtcttagccgggtactcgtgtctgaatagtgagtaccttttgggcctggcactgggcaggccttcagctgggtcattctctacctggcgatggctttaggtgagttgtggagctcttttcacctttttgcctcatctgaaaatagttcctggccagaagggagaattggtgagaaaagtttcaacattttaagtctcatgctataagtttgcctgtcttttgtctttcaaggtgaagctattaaatttgttctcagctaccctccatgtcctagcagatagaggacttggtctgaccttcagggttgtgatggggcaggttgggaggtgggcggggagtctctgtggtctgggtgctgaggttgacccgatgggcaggtgaagaaaatcaccttctccattccccttgatttctttatcgtgtgccgcacgaggcatgctgaagggacacacacctttccccctttttatttacaaagtagagagctgagaaagacagctcatgttctgttttgttttgtacacattatctttctcaagagatgtgatgtccttaagtaaactgacctgccttcatggcttgtcctgtaatgaatgcgttcaagacagtgttttggggacaggaaagaggcattcttaggtaagcggtggtggggggtggggtggggtggagaggaaacccttctaggaagtagttcaatgaaaaacctaaaaatgcccaaataaacattcgcttacatattatatatcttgggcttctttttatgacagttcattcagggacccagtcagtaaacaggtagttaacttcgtgtaaccaagcaagggttttgtttatcttttttaaagtagaaaaaagtgaggctcaaactctctctttctccttgtcataactattggtttacagtctttatttgtttaaaagtaaagcacattgtatgtatttatttggcaatacatgaggccattaaaaccctgagcctaaggtaccacagttagtctcatttgcctcttgtcctgtgaactccacttagaatgtcattgaacttgggcagacataattctagtgtctgttccaaacgcactgtgtcacagaagctagaattaccattagaggcacaaacccctgagaatacacaagggggcacgcttccagtagatgtgttggggaaggaggagggcagaggggacaggggacaggattcagctttgtggtgggtcctgagggttcctaccaggggtagccaggatctgggaaacagatcagcgactctagtctgaagtggctgcctggttcgggggctgccttcagcaagattcaggcaggagagacggaaatagccaccttccaggcgtgagtcctggagataaaaatggattttaacctaggactgccgggagctggccctccgcggctgctcagactagggctgtgtgtgctggctctcgcctgtttccggtgtctaactggcttgtttctctttatggcttggcttcattccgacctggggtggggccacatccaacccactgcccactggctgtccgtctggcctgccccgcggttccaaccacagtggtgaagcagcgcttgcagatgtacaactcgcagcaccggtcagcaatcagctgcatccggacggtgtggaggaccgaggggttgggggccttctaccggagctacaccacgcagctgaccatgaacatccccttccagtccatccacttcatcacctatgagttcctgcaggagcaggtcaacccccaccggacctacaacccgcagtcccacatcatctcaggcgggctggccggggccctcgccgcggccgccacgacccccctggacgtctgtaagacccttctgaacactcaggagaacgtggccctctcgctggccaacatcagcggccggctgtcgggtatggccaatgccttccggacggtgtaccagctcaacggcctggccggctacttcaaaggcatccaggcgcgtgtcatctaccagatgccctccaccgccatttcttggtctgtctatgagttcttcaagtactttctcaccaagcgccagctggaaaatcgagctccatactaaaggaagggatcatagaatcttttcttaaagtcattctctgcctgcatccagccccttgccctctcctcacacgtagatcattttttttttgcagggtgctgcctatgggccctctgctccccaatgccttagagagaggaggggacggcacggccgctcaccggaaggctgtgtgcggggacatccgaggtggtggtggacaggaaggacttgggaaggggagcgagaaattgctttttctcttcctccctgggcagaatgtagcttttctgcttcactgtggcagcctcctccctggatccttagatcccagaggagggaagaaaatttgcagtgactgaaaacagt

SEQ ID NO: 15814 - DNA, 42508 bp, Homo sapiens
ctccctgcccacctcctgcagcctcctgcgccccgccgagctggcggatggagctgcgcagcgggagcgtgggcagccaggcggtggcgcggaggatggatggggacagccgagatggcggcggcggcaaggacgccaccgggtcggaggactacgagaacctgccgactagcgcctccgtgtccacccacatgacagcaggagcgatggccgggatcctggagcactcggtcatgtacccggtggactcggtgaaggtgaggcgcggggagacttcggggacgcaacgagcggagaaggagcgcgcgcgcgcatttgcatcccgcgcgccggcagcctcggggcagcgtcccgaaaccgagctctccccaggaccgcggctggccggggtcgccccaggagcagctgcgcgcagcctgggcgccgcgccttccgccgaccccgcgagggtgcccggtcctcgccccgcaccgcccgctgctccagccgcgtgcccggccccggctgctggcggcgctgaggcgggggaggcggagtggcgagcaccgctggcttcggcggcgactgggctcccgggggacgcgatcgctgaagctctgcacagtcttaccacgctggccgttcgggctggctggggccgcccacacgtgcgcggtttccgagggagctccccgcaggggaagccctcaccacgctggagctgagaaacgtgtggccctggcccggccgcgcgccctcgggacttggtgtgtggctgctgctccccgggttatttcgggaacttggggccggcaagtcttctctcgactagtggcagctctttaccggttcgacagcggcccgtgggatcccctttctgagggttcctgcacttcttcccccgactttgggtcgccgagccgccgggaggcaatgacgtttgccttctccttttgcttgcggggaggtgggtgggcttgtgccttacagcccttgctgtggattgtgtgagaggcactcagtttcctttaaaccctgtctgtcacttgccccggtagttttaactgcatttctgtaaagaggcagcgttactaggtgcgttttgcctggtagactgagacctgccctctgtcagcctgcccagaacaccccagggccaggatagagtagtgcaggaagtaatgccagtattgactgttacacgttgcacttttataggcataactcgcctaattcatgcaacagccctgggggttaacagatgaagaaactgaggcgcagagaggcgaaccgattaccttgcccaggctcctacaccacctcctatcctctggctgcagctgcagtgtgctttggaggattcggaggcctctctaggtggcaattattttgcaaggcaggtcccacagaggcacccccagcagctttatcttgttgctgatgctggtcctgcatgagcaggtatgaaggccagaaagtataactcagagggttttcccggctccggggagctcgcttggagccagcagtcagtgtctggacaggcagaagtccagtgaggaaagacatgggcttccaaggtgctgctggacctaagcctgagccatcacccatatgtccctccagtgtcccagtggggagttagaggaatggttctcatctccaggaaagacactggactgataccaggtggcatttgtatgggaaagaatccctcaaatgtaataaaattctccatgattgaagctgttgtctcaactgccctgggcagagtctggggaaagttaggagcagggaggtgttatctgagcaggccctagtcctactggtgtcttgagatgaatgttctattcgggaaccccacagtgagttcactttagagcatcattttagcttatttttaggattagaaataattagttgtgccttctgagcaccctttgacactctcaagaggcgtttctcacacgtttaaattgtgtgatctgtgtttagtttctccctgccccatacatgttgatatgttttggttcagatgtcacctgtatacttagtattactttccatagcagttttcacctgtggacaggttaacatggtgtgaatggtagaaggagccggtctggttttcctagacaagtctgtaaaacaaggcgtgggttagctaatcagtgaagtcttctaggttctgggattataactgacccttaggggcccttccatgctgaagtgtgcagggttggttttgaggctgccactgagtgccaaggtctgccaacatcagcacagttgtctgccaagcatgaggagtcaggggtgcatcctccatcatggaaaggcttgggggagaccacacctgtgttcctcttaagtattttggatgatggcgaagaccgggagtaactgagtcaagaaacccgggttgggcttcaagccctgctctcacttgcttcatgcctcgggcactgttctgtgccttagttttgtcactataaagtggggacagtggacctgctcagtccctctccacatttttaacccatgcctcgtttctctgaacacacaacacccatcgtcctcttttatgttacttgaaatatcaaaagaattattacagctgaaaacaaatctatgtaaatcggatcttgaaagagagaaagctttctccagttttgaaaggcgccatttttaactttgatcttgtaatgacaaataagaatgttgaatcggctggcttttttctatcctaggtaatgtggactgtggagctctgtgctggtcactttcaaccctgaacctgatgctacttattttgcagttctaagtgcaaagtcggcctggtggatgcttcccattataatattaaatttgcttcttcgtgaggtcacacctcacatccccagtgtcactttaataactagtgttttttacatggtgggccatgacccattagtggactctgcatttaaaaataaataaataaataaaagaagttattagtgagagtgtaaaaatacgggtgtgcctggcatgcagtgggagaaatgttgaaattctgtttgggttgtgtgtgtgtctctgagtgcattttacagacgtgtacaatgtacttctggctgggagttgtggtcaaacaaatatgaaaaccactgaacctgagaaaatatctctggagccccagcaggcaacactgagattatgaaatgggtatttggaagacctttggcaactttcctgctgcttcctgtgtcttcttctttcccttggtcctcccatggtgggatgtgagcactcattcatccataaagggccagtctactgggacctttggctgcccctgcgatgacagtgagcagcaaagtgatacccagggagggagtatagggtctctgcagggctctcaccaaatggtggcaatgacttactcctgtctaggcggggtctggtggcaggttttccatgagcctctttctggtgttccagagtggcaaggggcacttggggtggatacaagaacccctggtctgatcaggagagctcaagacttgaggagcatgccaggtgggtggaggaggaaattccaaccagattaggcacaccactcggagaccatgccgagtcccgcctggggaaagcaggggcagaaggaaacaggaaagatttgaagccgggggacttccgctgaccctttcacaacccttcttttgctttgctgttgggggaaaccctgcctgtgactctcctaggatgagccctccttcccaggttggtgcaccacggagcgttccctctaggagcctcctggctgaccttatggtgtgcacagccagcctgcccagctcagcagagcattacctcaacttctgacttctcctcttctgagttttctcctggctgcaggcagactggtaggaagggtgctggggggcagtgcaggcagctgccagagtcccctcccacccacttcattgctttccaaacaaagtgcagttcggtccatgccattcagcttcagaagggcgtgaaatcccaaattgctctagttcctgggacaaaactataatgatttttctctctcccttcttgtctcctctccctcacatccccctgctcccttcttttctctcctttgatgagaggtgattttcttaaaaggcgaatttggaacgaggaatcaaaaaaggggtatttgtgagctgcagtcctgttccttgtttcatgaacccccaggcagccatggcctgtacccctcaggcctaccctgaggagtgtgagaacctcatccacttttctctgccctaaattggggaggggcaggctggagcgtggtttggaggcgcgtgcccaagagtactgtgaacagcaaagggggcctcagctttttagtagggagaggtatttggggttgaatgggaggatttaatcagctgctttgcttaaactatacaggggtgtgcacctggggtgggggatgtgcgtgtcacctggaagggaggaatgtgcttcccaaaccttttcctggcttccacttgggcacgtttcagctgcatgtggccatctcattagagatgagttttgtcctgtcttgcagcagtgaccagtcttggggaatcagttccactttctctgttttttagtcttgggcttctgactctctctgacttcaggggtttccttcttctgactcatcggatgaactcacctgctggtgtggaagccttcagcatctttcttgaaccccagagctttttggctcttttcctgtctccactagtacggaaccttttcttgtcaaagaatttgtgtttttgtttttgtttttaatccgaaataccggctgtcatgtcccatccatgctggccacagacatacccctgtgatcatggtgttggctggaccatgccaggatgcatggctttgccactcccatgcccaccttgaatgttgtgtctgatgtttgtcataggaggggtatatccaatctctttctcttttttttctccctctctctctctttttttttgtttttttgagacagggtctcggtctgtcacccaggttggagagtagtggtgtgattgcagctcactgcagccttgacctcccagggcttgagtgatcctcccagctcagactcctgagtagctgggactacaggcacatgccaccatgcctggctaatttttttgtatttttttgtagagatgggggcctcaatttgttgcccagactggtcttgaactcctgggctcaagcgatcctcccaccttggccttccaaagtgctgggattacaggcatgaaccaccatgcccagcctctttctttttgttgaactggaaaccttccctaaagttccctcaaccttccctcaagttcctactgagatggatttcccacccttagagaactatcttggggttcaaattccagtctttgacttactggttgggcaggacacttagcttcttcatgtccttacttgtcaaatggggatcctgattttcttcctgctttctctttcctgacccagctttccattgcttctttcccacttctctcatttttccagtgggccttgtggaagttccttgttaacaagctcccttacatcttcccctctttaccgaatgtttctttcacttccccctcctgatggaaatccagctcctcttgctaagggttgggagcatggacccttgagtccaaatccctggaccgggtcccatttcccagttaggtgtgaccttgggcaagtttcttaacctttctgtgctatttccctatctgtaaaaagaagaagagatggtaccgatctcccagggtggttgtgaggagggttaagccctcgctgcacttcacatgcctggtacacgcacagaacagttgatactctctgatgtctgctctcatctttatcttcatcatcatcagcatgattgccatcactttctctcattccctgaggactctggcatctgatgcacagacttcacctccacagatcccgtcctcaccctgaggatggcccctcttcgtccccacccgactcaagtccaaatcactccattccttacacctctgagtcaatggccttcacctccatggtcccttgacctaactcagaatcttcctgagatcttaaatccagattattatagcctggaccccaagattgactgctgcagctgctggggcctttagtttctctgcctttggttcttccaaccctggcttgccccacctgggtcctggacagcccatctgtcccttgggcagcgaagcccttcaggggacattcacactgcctccaatgcgcatgctccctggcctcagctccacatgtctgggcagctgcttgcatccttcacgagggtcctgttgccccttagctccccaccctattgttgtcagcctcagcctggcatcttgcttccatgtcatagggaaaccaggacctcaatcaaacccatcttcctgtcactgtccttccaaactctcttgccttctacccccactataagggaacaggtgtcttcattcctttaaggtatatcaatgtggcagagaagggagatgtatacaaaccaccttgacaccaggatttgaatactggctgcacacctgggcacattacctaacctctctaagctcaggttccttctctgcaaagtggggatatgaatactgtattagtctgttttcaagctgctgataaagacatacctgagactgcgtaatttatacagaaagaggtttaatggacccacagttccacgtggctgggaaggcctcacaatcatggcagaaggcaaaaggcacatcttacatggtaacagacaagaaagaggacagaacccagtgaaaggggttttccccatataaaatcatcagatctcgtgagacttattcactaccatgagaacagtgtgggggaaactgcccccatgattcaattacctcccactgggtccctcccataacacgtgggaattatgggagccactattcaagatgagatttgagtggggacgcagccaaaccatatcaaataccaagagctattttatagggttgttgtaagaattaaatgaggcaacatatgtaaagttcttgccacagtgcgtggtgcgtacgttgtcaataaatggtgatggtgatgtcatttttgtcccctcactcttgagtgactcggttccaggatctttaggcttcctgctccattgagtttttctcaaaagtgtttctacagatccaagcccatcctgtcttaaataaaccccagacttctcaccttgacctcacatgcacccccaatgtttcttcccataaacaaactgttgcccctttttttcctccttaaaacaacacatgttctgaaagaactattgacactggtctctacttcctcactgccacccctgcttcctggcttttgcactgcccagccgcagcctcacagagacttctggctacccatcatcttcctggcccaccctgctgcctctgttcctgccaggggcacctccgagagggggttggccctgcgatcctcagttttcctctttgggcatggcttctcctcaggaatgtgcccttccacctcattttccccagcacacatgcctcagtttcctcctgggacctgatggctcccagatcactatcttgggcccagactttctggagctgaatctccagttgcctcggagcctcctcagactcagtgtggccagaatggtggtcctggcttcccctcgggcctgcccttctgcctccttctgcaccctgggatggtcatcagcttttctcccactgctgccctgtatgcagggaaggcctgcctgtggctgtatctgtagtacttcttgaatgtgtttccttctctccctccccacagctacttactgccttggttcagggacctggatgtctcctcttccttgagatcccagactgcccaagttaaaagtgagtttaggccgagctcagtggctcacgcctgtaatcccaataccttgagaggccgaggtgggaggatcacttgaggccaggagttggagaccagcctgggcaacatagcgagaccccataggtacaaaaaataaaaacattagcttggtatagtggtatgcgccagtggtctcagcttcttgggaggctgaggtgggggaattgcttgagcctgggaggtcgaggctgtagtgagctatgattggaccaccgcactccagcctgggcaacagagcaagaccctgtctcaaaaaaaaaaaaaaaaaaatgagattactctcccctgcctcacatttccctattgcccattgctgctttgtttttctccccagcagttgttacttcgtaacacacaccatcgtttatttatattgtttacatattttacttatatttatagtattatttgtattgtttatggtctctcttccctcatcagaatgtaggccccaagtgggcagggatgtatgctcttctgttcaccactgtattcccattgccagaaacacagtaggtgctcagtaagtatttgatggaggagcttctgcagttcattctgcacgtcagccatggctggtcctgctcttcagcctccaagcccagcagcttcctggtgggctgcagttttctcatcggaaatagagaagagtagcagtgccgattctgcctcccttgcaggtcgttttagtgcatctagttggaaaatacaggcaggtttgcagggaacacagttttcaaagtgtaaagctcagtgcaggtgctaggtcatggtgttttttgtcacactgggatcctgcgggagaggtaagtttagctgattggagtggaagatccagcccattcttcgtggtgcctgccgcagagcctgcaagcctgcagaaagacagggagtagccacgtctttctgtagttcacacctgtgtgtctccccacctgataatccctcagcacttctgtttgccttgcatgtaaagcccgacctttgcatggcaggcacacagactgaaactctttcctcctccagcctttcttggactcatccacagaatgacaaagaagtattctgtgaatattggttgaatgaaggaaggcacggctttttaaaaaagatgaaaaaaaaaaaagttatgaaaagctttaaaacttgctattggctgggcgtggtggctcacacctataatcccagcactttgggaggccgaggcgggcagatcacctgaggtcaggagtttgagaccagcctggccaacatggcaaaaccccgtctctactaaaaatacaaaaattagctgggcgtggtggtgggtgcctgtaatcccagctacttgggaggctgaggaaggagaatcacttgaacctgggaggcggaggttgcagtgagccgagatcgcgccattgcactccagcccggacaacagagcgagacttcatctcaaaaaaaaaaaaaaaaaaaaaaaaaaccagaaaaaaaaacttgccattaaacaaattccagttttgatttttgttttgcattggttttgaatccatgcatgttatggccacaaagaagactttcttggctccgttgtttgtcgtgtgtgtgtgtgtgtgtgtgtgtttgtgtgtgtgtgtagaacccagcaagcagcagctataccccgatgaggcaatgtcttcatttggccactcatgtcattccacgtttcctgagtgccctcttggctaggcactgtgctagacactgggctacaaaaataagaatgcctggtccccgttctcaaagtaagcgtgcttcctataattagaccctgagctaaggcgacagaaccagctccctttcaagacaagagtcgcctgtcttgacggactttcagatgggctggaagaacaaggtctggcgtgtatggactctgaactgctcaagctgctgccgtcttgcaggtctagagcctacagggtagcgtcattctagtttctttgctgggcactctggaatttgttctttctcctgcgagagacagtggtcctcagttgtgttccctccccaccatcctcaccctccctcccacggtggttagtcattctggaggctcaagttggctcacagaaggtgctcttgaaaacatcccccaccctcctcgtaaccccagacagtcaggaagggccgttgtcgggtactaagaggtgttatggtttcacattcatgctttctctctgaagagaaaacaaaacatgttgaaatagggagaaatcccagcagcagcttgcttgaagcaagggttgcataacaggtctaggaaacgtctggccgtgtgggtcaagttgagggactgcagccttgtgtcactgagggaacttcttccgggtccaccgagcctctggatccattagatccatccagagagccacttggaaggctctgggaccttgagttctggctggccacgtggtctgtgatggctgtcactggtgaaagagagaccctggctgatatttagccaacagtgtttattccctggcatgaccagaaagggtgcatttgagacactgctgtgggtgggggacccggaggagtgtttgtgtgtcagacttatgctggtgttgaggccctagaaaggtcaccaaactggggcggggtgtgggccccgtgaatttaagtcctggtcctgccattaaccagcttggaaaccttgggctaatcatttctctgggctagttttctccttgtgaatctagactagtgtcatctactttacctttttgacagggctgttgggaagcttaggtgagatagatttgtgaatggctcttgcaaaccttaacatgcaaagctaatgacagattgtatcagaggcaatgtgcttgattattagagctgtttaggttaacagcacaacctctgcagccagactgcctggagtggcacctggtcaagttcctgaaacctctctttgccttatttttctcatctataaaatggggctaataactttacccatttcagtgttgctgtgagaattaattgagatgatacacctagaatgttaaggcacatggcaaatgccccattaatatcagctcctcttgttatttctaaaagtattacttcaatgcctgggtatgtttatatattgctggtgcaattgttaattttatattatttttgtattgttagcttttatttggtcatttgatcctcttagctctcctttgaaggtgagaaaaggcaggtgttgtttctcatttcatatttgagaaaactgaacttcagaaaaattacatgccctagaactcgggcctttttctgctccagagctgaaagcgagagaagagaggaagggaattaggctggagcaagccagtaggatgttggatgcagactcagatgttaatggcagcagagcccttgagctggattctagaatatgagaaagggctgagattgatgatggggcccagctgcattgttgggatggaggaaccagagttgagtcgagggagtaactccaggaaatcatggcacccagaaagtgtggcacagaatgcagggctctaacgtatagttaggagttctttgggcaagtactccagcaagcaaggaagaaggatgatgacatatggttattgccacaggatatttttggctgcgtctggcttctctctctgaaacaaattgcagttgctgtgacaccttctcatttcagcagtgagtcgaagttgcactcaatatagtgttttgaattcggactagtcgtgaagattcctttccagatcatagtatatgtatataagtcacttactgggaagagcactacatcatagttccgtggtccactaaggctgcagttttcttatctgaaataaggaggggtaacggtgcccatcctgcctcccctggcaggtccgcttacgcatgtagtgagaaaatacaggcaggcttgcagggaacaccgctttaaaagtataaagctctctgtgcaggtgctaggtcatggtatttattatcacactgggatcctgtgggaggggtaaggttagctcattggaatggaaaatccaggctctcattccagcactaggactcagtgcagctgcctggccttgggcacttaacctctctccttacagtgtctcccatctgttgagccaagacagggtggctgtctgctgccgcccatttggctggctaatgaggaagagccagtgctgctcacagcatgctcatttcgtggtaatgtagacaggggatagtagtggctgcgtgtagcagaaaccagcagggtaggaccggatgagcccaccttcagggaggtgtacccagggctgttagtttgaggacgtctgtgggattttatatccttactcttattttccaagaaagtctgtccctttgagcaccaggcagatgagtctggggacgctgtgaggaggggtcccccaggagcaggaaggtgactaatgatcccggaagaatgactgtgtgtgtttgcagacgcctgggctcttccccagtttggcctttcccgtcactgttttcctcacttgcttaagaggagaaggaggtaacgcacacaagtgcctttgtctcagggtccccacggtgcccatcttgagggttttgcgggcgccttgcattgcctaaggcctggctttagaagcagaacatggagagagaggtttgcagcctgcaggaagctggccagccagacctgccgggcagcgggacccgcgggcagtgcctctgactcacggcacgtccttgatacgcagtgctcccctccccactttctctgccctcctgtggatcacgggtgtcctagggctgttgggagcctggattaaagttgctgagtggccggctgatgatcagatccagggagtcagaccagaggtggggacatcttttcaaaggcaagaagatgctgccagtgcgtgtatatacatatgagggtggaaggggtaaacccagggtgtgtctttaactgaagaatcaagaaagctgctttccttagtcacccgcctctgtggttcgtttgctaaacgttggcttgcgttagcctgattcacagtaatgtggctcccaaggaagattcacatggtatttgtgaaaatgtagcttcatcccctgcccttcattgaatgactgaattacagtcagcaccacataacgatgtttcggtcaactatggactccatatgtgatgagacagtgatcccatagattatagtggagctgaaaaattcctattacctaggggcatcacaacgcattgcatttcgcccgtgtttgggatgatgctggtgtaaacctactatgctgccagtcatgtaaaagtatagcacacacaattagtaggtaatgcttgcaaataataatgaaagactctgctactggtttatgtatttactatgctatactttttgtcattactttagagtgtactcctacttttttttttttttttttgagatggagtttcactcttgtcctgtaggctggagcgaagtggcgcgatctcggcttactgcaacctccacctcctgggttcaagcgattctcctgcctcagcttcccagagtagctgagattacaggcatgcaccgccacgcacggctaattttgtatttttggtagagacagggtttcaccatgttggccaggctggtcaccaactcctgacctcaggtgacccgccctcctcagcctcccagagtgttgggattacaggtgtgagccaccgcccctggccttttttttttttttttttttaagttaattgtaaaagagcctcaggcaggtccttcaggagggattccagaagaaggcattgcgatcacaggaggtgccagctgcattgggacaagatgtggaggtggaagacagtgatattgatgatcctgaccctctgtaagcctaggctaatgtgtatgtttaagaaaaaagtttaaaaagtaaaaaaataaaaaatgttaaaaggaaaagcttatagaataaggatatagagaaaaaatattttttgtagagctgtacaatgtgttttgtgttttaagccaagtgttattacaagagtcaaaaagtcaaaaaattgaaatttataaaacaaaaacattacagtaagctaaatgtaactaattaattttatttatttttttttttagagacagggtcttgccttgtcgcctaggctggagtgcagtgttgagatcatagtttactgcagcctcgaactcctgggtacaaggaatcctccctcctcagcctcctgagtagctgggattacaggtgcgcaccaccacacagctaatttttaaattggtgtagtgaaggagtttcgcaatgttggccaggtggtctcaagctcttggcctcaagcagtcctcctgcctcgacctcccaaagtgctaggattacaggtatgagtcaccacgcccaaccttgaaatttaatttattatggaagaaagcaaaagtttaaaaaataaatttagtgtagcctaagtgtacagtgtttttaaagtctacggtagtgcacaggaatgtcccaggccttcacatttactcaccaccactcacttaaactcacccagagcaacttccagttctgcaggctccattcatggtaaatgccctacacaggtgtaccattaaaaaaaatcttttggctggttgtgatggctcatgcctgtaatcccatctcctggcttcatgccattctccttccccagcttcccgagttgctgggactacaggcgcctgccaccacgcccagctaaattttgtatttttagtagagatggggtttcgctgtgttagccagtatggtctcgatctcctgaccttgttttgatctgcttgcctcggcctcccaagatgctgggattacaggcgtgagccactgcgcccagcaaaaaacgatgtggtattttcactgtactttttttttgttattgagacggagtttcacttttgttgcccaggctggaatgcagtggcagaatctcggctcaccgcaacctctgcctaccgggttcaagcaattctcctgcctcagcctcccgagtagatgggattacaggtgtgtgccaccacgcccggctaattttgtatttttagtagcgatggggtttcaccatgttggccaggctggtctcgaactcccaacctcaagtgatccacctgccctagcctcccaaagtgctgggattacagttgtgagtcaccgcgcccagccttcactgtacttttggtatatttagattcatttagataacaaataccatggtattccagttgcctgcagtattcagtacagtagcatgctgtacaggtttgtagcctaggagcaacacactatagcgtacagcctaggtgtgcggtagctatcccctctcaatttgtgtaagtacactctgtgatgttcacagaaggatgaagtcacctaacaatgcatatctcagaacatatccccgtcatttgcgatgcgtgactgtaattaaggaatggggcctatggggtatgactgtgggtgctgggcactaaggagacggaggcttgacacaacccaggcattccccatgggagcccctctgtggcaggaaggacagatctccaatgaatcattcctttcaggagtgatgagctcagtcttcagggatcctgcacctcacggggaggagttgggaaaggccccccgaggaaggaatatctcagtatctctatctagacctgaaggagatgtggatgttacaactaaactgtatgattctctgtgtccctgagaacatcacagcctatttccaaggtgcctggccatccccagggtgcctgcatgccactgacactctaatctggggttctgctctgagctgagaaagtgtctgtggtttggggtcatcaggtggcagctcttctcctctctgttctgaaatcttaattccctgtttgactgcctggtggctttcagagaagcccagcctcctcccaggtgggaactttcactgtcgaactaaggacccgaggagggtggaaacaggaggaagggaggctaagcggtcacatcagaggcatttctgctcatcgttggctcataataggtggcagtaggggctggtggagcagtggccaggtaagttgctaaaaataaaacatgctcatgtgacgtgtgcaggtttagggtttgcctgagtgagctttcctggtccaggtcacaacttgtagggcaaagagagacttgaggatggtgtaggcgacaactgtgccttccaaaggtcagagatggacctgggatcttgtagtaccagggcctgctctggaggctcagattcgtgtgtcacttcttgtctcttttgaaaggtaactggagagctggacactttcctgtcctctctctttccttgtagccttcctctctcagagatggcctgctatcaaatgccaggggcacagtcagctgggcttggtaaagggcctgagatgagagcttggggactttcccactggagtccatgatagtccagggtgtagacagaagctcttggatctcacagctttggaaaccgagtcctgtttctccaacaggccagtgcggtgacgggcacagacctgctgtcctctctatttgtgtgtccactgattccctggcacagggggtctttgttacaaaatctctttgctgggtgctttgaaggagcacgtgtgtgggcctttttcagggtggttagacaatgccaagctgtcactcagaagaaatggtcaggatagaagcatagaaaatgccctgtggaaatgtagatgagtgttctggctcacacctgtaatcccagctactcaggaggctgaggcagggggattgctggcggacagcagttcgagaccagccttggcaacggagcaagaccctaactctaaaaataaaaataaaaaaataggccgggcgcggtggctcatgcctgtaattccagcactttgtgaggccaagacgggtggatcacgaggtcagaagtttgagaccagcctggccaacatggtgaaaccccgtctcaactaaaaatacaaaaattagctgggtgtggtagcagatgcctataatctcagctacttgagaggctgaggcgggagaatcacttgaacccgggaggcagaggttgcattgagctgagatcatgccattgcactccaggccgggcaacaagagcaagactctgtctcaagaaaaaaaaaaaaattggttttgtgtggtggtgcacacctgtagtcccagctactcaggaggctgaggtgggaagattgcttgagcccaggagtttgaggttgcagtgagccgtgatcatgctactgcactctagcctgggtgacagagcaagatcctgtctctaaaaatattaaaatgaataaataaaagaacagaaaatgacctgtgtggggagaagggttatctgtgaaaggagttagaaacctcaagtgtacataagtaagactggagatctctctgttaatgaaattgtgcttaaaaatttttttttcttgaaccttggcttctcaggcaataactgaattttaaggtgtgtgtgtatatatatatataggtatatatatatataggtgtatatatatatatatatatatagtgtatatatatatatatatatatatatagtgtatatatatatagtgtatgtgtgtgtgtgtgtgtgtatatatatatatatttgggccaggaagggtgaagtgttaaattgccttacttagaaaattaaggtagatttgtatttagcccttagagcttcaaaaatatcagctcagaaatgacttttaattgtgcaggtgataaaatcacaagaaaaaaattcatctacaagttggaatgactcttagctacttatttgtttttaaatttttttttcaaattttggaaggaagtagagaaggagttagaactgtaatttgctattatgggggttggggtgcagtgcgtattagtacaatgttaggtggtggcaggttccgtttatccttggaattagcactgctccccccacaggcttctgggagttgggagcaggctggttggtgacgctttgcctggccttggataagaactcttgttttcaaattcccttgaggtctcttccaagaatcttttgcattttttctgataaatcaatcataaggaagtttctgaaattctctttcagaccctacaacccacaagttactgcaaagctgggcttctaccagaagtgagtgatttgaaattgaaaacagatttcggatctcacctgagtagctcgagtgtaagggagggactgggagagccacagagaacatttgtcaatccagaaccaaccattcatggtgttgcttgactggagggcagggaaggaaaggactagaagcaaggcgaaagcagatctttctgtagatacacacatataagtcttggatttgcattttagggtgaattgtaattagcttgagatgaccaggggcccaccaatcaagcaactctgggaaaaacacttgtctacatcttaagtttctttgtctataaaatgtcaagattgaactaacactacatgattctctcgggaactcaccagttctaaaatttccactccttcttttcacagggcagtgtaactttaactccctgtttcaactttgggtgtaaaatacaggctcacaagcacttttgctttgcagcggaagctaggaagaccctgctgtggaattttgcagaggggctgagcagtggtgggaaggaccagcggcccatgtaccatgttgggcccctgcattccaaggtgtctgcctagaaataaatgatagtttatttaacatacttgtaacttccaacgacaacacttcaagactgcaaatcatccatccgggcaattacagaaatgctgaacggccacagccccgccctggaatcaagggaagaagtgtggcagatgcttctggaaggctctgtttacagctctctgactccttcctgccagaacctttcacaagttcactaccaggaagctgagtcatccaggggtcagccggcatggccaaggtcaccccgcactgccagcagcacagatggggttagcccatcattccagaggagcatccgtgggaatgatggggttggggagctggggagcctccctgcagcatctccctgccatggtgttttgcatttcctgtagatttcgcagtgagaaacggtctcctcttatattcacttcatttcttctctctttctttctttcttttttttgagatggagtctgtctctgtcaccaggctggactgcagtggcgcgatctcggttcactgcaacctctgcctcccgggttcaagcgattctcctgcttcagcctcctgagtagctgggactacaggcatgtgccaccacgcccagctaattttttgtattctcagtagagatgggatttcaccatgttggtcaggatggtctcaatctcctgaccttgtgatccacccgccttggcctcccaaagtgctgggattacaggcgtgagccaccacgtccgggctttttttttttttttttttagacttgttgcccccccaggatggagtgcagtggcgcaatgtcggctcactgtaacctccacctcctgggttcaagcgatgctactgcctcagcctcccaagtagctgggattacaggcatacaccaccacacccggctgattttatagttttagtagacactgggtttctccatgttggtcaggctggtctcaaattcccgacctcaggtgatctgctcacctcagcctcctaaagtgctgggattacaggcatgagtcactgcgcctggccaaaggcaagagatgaggaccatatagatggaaacacagcattaagggtaaaacactctctctctgctctgtctggtgttcagggcccagcatgggctgtatgtcctacacttcgtttcaggctcatcttcaggtgacaccagccttctcggagcctctgtccacatcccacctgtcactacctctgccctaacttcaccttcagtggtcactgccaggacccctccccaaatctaaatgaggtccccctgcatttgccctcattgcaccttctacttttgcttcatggcatttagagtttggaattttttatcgataggatttttagtactctctctctcctctactagactataaactccttgaaggcaaagacgacacctgctccctcagttccagcagcccctaacactgcgctgacatttaggtagtagcagcgttttcttgcagaacgatcctgtagttttaccagctgagacttctgtggtctggggagtcactcatctctggtccctgcctcctcctctcacttttggaaacccttctggccagacggctttggtttaaattgtatgccggagctcttggttccagggagagggttttagcgtaaaaatctcactcatgatggaaggttcctgctattaccttttgcatccaatacaacttaaattgactcctccaaaagcttcggaagtaatttgtacctattgtctagcataaattcagcaagtgggtcccggaggctgaaagtcgagtcttgcggttgtttcctctggtgtttctccctgagacccttagaacggcaagcctggtgcatctggtgtcctgtcatctttctctgtgattgtcatcagtgtgaaaggtgaaaggtgtgtggagaaagaacatcccttcgagctgtggcttagagctgtgacttggcaccacgtggttagtcactatcaagttagaagcctttgtgggaaatctggctttggtaggatctgggaaatttggacccctcatttgccccctggcatctctaaattccagagcccagctttgatggggcttacatccccagctgttaacctgtggggtgggccccagactgtggccaggtgcattgcgctaggggagacagatccacagcaggcagaatttgaggaggacttaaaatacctgctttgggaggccaaggcgggcagatcccctgaggtcgggagtttgagaccagcctgaccaacatggagaaaccctgtctctactaaaaatacaaaattagttgggtgcggtggcacatgcctgtaatcccagctacttgggaggctgaggcaggagaatcgcttgaacccgggaggcggaggttgtggtgagccgagatcaagccactgcactccagcctgggcaacaagagcgaaattccgtttcaaaaaaaaaaaaaaaaaaaacacaaaaaaacaaaaacccgctttgttacctgcctgtgggtggaattgagttcatctctgaatccgtggtagtcatttattgagcacgtgttttagtgagcatggcatggcgctggctccgagatcacagtgctgccgccctccttcacgtttctctgacctttcatgggagtcacatgcagacgcatcacttggtataattatacgtggaggaatgagcaagaggaggctggcgacgggactgctttaaaaatcccttcttctgtggataataggctaatagcggggtgtgctttagaaggtgtggcctccgccaagggcgtgggaactgcatttgtagaagctgggaggaccacacctggcttgggagacggcatgggtttctgaggtgcctggctccctggcctgtccagtgtggacagcttacgcgcagctaggtgaaatgattgtgcagttgctgagggattgggtggcagagctggacagaatttaggtcttctaacttggaacagggctgtgtccatcttacctaggtgtacagtttggggagcactgctgtttggtctagtgagacacacttggtgtaaatatctgtgccctgtagtacccagattccaagggaccagagagcatgcccgcacccacgggctggcgggagcccaggtcctccagggctgctgtggagcatgggcttcttggtgcccagtcctatagctgaacttgggcggcctctggctgttgcccccagggctggtctccctatagttcagaggcgagccagctctcagcagcagggagggccttttccatagtatgaacttggccacaccagaccagtcagcagtgtcgggaatcttggccctcaaggtccctgcctagccctggcctggacttcagcactggtcaaaggtccccagagctgcccttggctctgagcaggtgagtgaacttcccagagcacttttgtctgggcctctgtgccagtgtaaactgataatagtgatttccctgccccacctctctgccagctatctaagttttctttgttacataatcaggattaatttaagcagcctaggccatccatttagaaatggttagtgaagaaaggtgaatggggaggggtcagagtcccttagggggccaccaggtgcgagtccccttgctctttggggccttggtttcccttctgtgagttggggcagctgaagggaagggctgctcaggtggtcctgccacatcccagtgttgtgtctagtgagtacaggtgagagtgctcccaaccagggcagatcctgctgctaggcagtgagtcaggaaggaattggtaaaaatgacgtcattgctaagaatgacgtcttttttgctgtttatccaaaggaaaaaaaaaaaagcagaaataaaagcagcaggcagctgtccaccagaccccatgcaaagggcttttccttgaatcctcacagagactttaggcagtaggtgccattaggagccccacttacagataagaaaacgggggcagagaactgaagtgagtcgcccaaggacacacattgaggaggaagcaacagagctaggatttagatacagaggggtctccaagcctgtccttccagctttgaggtcctgggcctatatattccatcagaaactgaaaggtgtgttggggggtacctagggtcaggatggggttttatttctgtcccttccttgtgatgctgcagggactgtgacctggagttcccaacaccagtgccctgtggctggtagcctcctcctgggactccaggatctattgtttgatttagccattttcttctgtagtccgatgggagggattcaattcaaacctgcaatactgttctttgggccatacaggccatttatcagcaagtagagaaaaacacccacaccttctagcaagattaagctagttctgtggttcttaatgataatttaagccattttgattaacctaggtggtggttttctccctaccaggtagggaatatactggagcctttctaaaaatagttccggtgaagataaacatttattgagtacctactgtactccactaggtgaatacaaggatttctcgttcatctcaggaagcatggttaggggattttacagacgagggaactgaagttcagggaagttaagttacttatccaagttcatatagctgaaaaatagaataggatttcgaccttgtggtaggtggaaaccggggttgtctttgtgctctcaggcatgtggctggcgtggggtagaagctctctatataatggttgagtgactggatgagcttcaaagctggtccctctggcttttcctgctaccccaggccacgtgcccagaaggaacgctgtcttacctgggaggtctttattgactgtttgacgcccttcccatcctatcccaaccccttccccatggcacctagtttccccaaccagaacgtacgttacttatgggcagagacggtctttgagcattgggtgggtggttgaacgcagtttctttgagattctgtgattgggattttcagcaaaatatggtagcaagttggtcagaggggcgagtctggcagtgggggagcccgggcaagtctaactgtttgctcactggcagaacaaagttggggaggttggaggggtaggggaactgaaagcaaaagaaagctcacagggagccccatcgtgcaaaaccgatgatggcagagctgccgggctgcagcgtggagcggggcgggagccttgtgtggagtctgtgaacatactctaggtgcctggatactcctcttatctccccacacatgggttgatgtgcatgtacggtgctttgatgtggactcttgtgttaaatttgttcttctgcgcagctttgtgacgcttcagtgagtgtgtctatatacaaaaggaaaacagttttggctgggtgcagtggctcacgcctgtaatcccagcactttgggaggccgaggtgggtggatcacctgaggtcaggagtttgagaccagcctggacaacatggtgaaacccagtctctaccaaaaaacacaaaaattagccatgtgtggtagcatgcgcctgtaatcccagctactcaggaggctgaggcaggagatggcttgaacccgggggctggaagttgcagtgagccaagttcacgccattgcactccagtctgggcaacagagtgagactccgtctcaaaaaagaaaaaaacaaaaaacaaaaaaaaaaccaacaattttgaggatgaggcatttcttccttacttatgagtgggatgtttatgggccggtgacattgacaaggctggcagagtcaaggggaggccctgggtagtctagcttactagcagtgaattcagttctctcttgaaagcaccgtgactgttggaatatttcagccttagcctttgaatactgacggagtgccaggctttcgtctgtcaagatgcccctctgtgacctcagctggttaatgtctcaagcgcttctttaggagacagaatgggttggtattgaaccaaccactattgcccagtcttgtgatgaccagggttgtggaacagataagttgtgtgacctccacgggtcagggctgttgactttgcctgtaagttacactcttgcagctgggcatagacacagtcctcaggggttttgtggacattaacaagtaaggatttaggtgactctgacatagggtcttccccaaggtcaggcacagaggaggtggcatccatgggacttagcatgttgtagaaacagagcatattgggacaaaagggaagttgaagatcacctgggatcctttagcgtccatccctttgtgagagataggatagcctagttgttaacagcatgactctggccgaccgcctggcttctttctagtcttccttctgtactttgtgaccttgaggcaagtcatttggtctctgtgcctcagtttcccaatttgtggaatggggataactggttgctaatattgctgtttttattgttataattattttgtaaatagaagggttgaaggttcagggaagcaagttgattgacctgaggccatacaatgtatcagtgccagatgcaggatgagaaagaactgtgactcaggccctgtccctcttaccagggcagggcaggacagggaagctgggcaggagagactggcagctcagttccctctccagtccagggtagtcccttccctttctgtctcgcagtgaggtcaccagttgcactcatgaaatcttagtcctgttatctggcatctttggaatttgccccacctgtagggcagagataacttaatcctttttggtgggccacatatgggatattctgggtgtgttctgggtacactgggcatgggccaggcacagacccttccatccattggaggcttttctagagaaggggtggagaccagattgggttcctagggtcgggggatgtgggaatggcaccctctgaactacaggcaaggctgggagctgctgccagtgggcggagagggaaatctaactggtatgtgatgttagtggtggcctggcaagcagctgtagctttggagagagcgaccagcctgtccaggggcctggtagggaaggcttctgttgcacggcctgttgctttctctcagatactggagagcccatctgtcttgcttactgcatggcttttcatagctcccatcatattgctgttgggtgcgattcatagccatggaagacacctgatcataaagtaaattccacacactccagcaaggtattcagggccttgcatggtctagccccaccctacctttcttccagcaaacaataattgatcatctaaggtggcagcttctctcctaagtctgaggctgcttctctaccctcacctgactgctgtcttctctgcacaccagaccttccggccacaggtcctcattccccagatgcaccagcatgttcacatcctcctgcagcgggaattgttttcttcctctccatgccaaatttgtctttttctttcccagtcaaagtaacatatgtacatagtcacaaaatgaaatagtgtagaagagattgtagtgacagctctaattcttacagcttgacatactcttcctttttctaggtggctgttcaaatggcttccttccagccaccttctccaggttggatgtgatctggactctggatctctaccctatagcacatcctgctgtgacctattccaaggagaaggggggtttggtgctggggcttctctcctaggaggctgaggaacttggttattgctatcttagcagaattgttattttctaccaaatgtgcaatgaaaactcttcactgagtcttttgcccctagcaatagcagtgcttcctgaagccccagtagaccctgaaggtttcaggactgtgtctggagagcatcagtgacaggtggcaggaatcctctgtggtccacttcagaggcggcagatgaccaggaggtcagactgtggctggtcttttcagaaggacaaacgtgacccttctgaaaactgggaccattcggggacattggtggaaagacagaggagcctttatggtttgttctcacacatatgaatccactttctcccccctccaacatcagggtgacctgaacgctgaaggaagtctaggccttcctgtaggtgaggcagggaaagccacgtagacctgatttagttgaagtgttttccaccaggtctcaactcttcattttgtcttggtatagcttttctggctgactttctagcaagctggttgggctctttgcttgttccaaaatggtagttttcaccagagacttttcagatgagcaggaagcttttttcagaatgtatgttcttctaactctgcttgagtcccccgccatgtattctgataggcatttgttttcccaccccatcccccacttttttgaagtgggggcaatgactacttttaggggaatcatttttctgttgctggtttcaaaacattaagagcaccaattttttttttttttttgcaacagagtctttctcaggctgaagtgcggtgacatgatcatagctcactgcagcctcagtctcctgggctcaagtgatcctctcaccttagcctcccaagtagctaagaccactggcacccaccatgcctggctaatttttttaaaaaattactttctgaagagatggggtcttgctatgttgtccagactgggcttgaattcctggcagcaagtgatccacctgccttggccttccaaagtgctgggattacaggtgtgagccactgcacccagctcaaattttccttttcattaaaaacatacatatatgtatatgtatgtatatacatatgtatatatgcatgtgtatatatatgtgtgtatatgtatatatgtgtgtatatatgtgtgtgtgtgtatgtatatgtattatatgtatattctctttgtgtatttatttttgccagtttgggagatgttagaaaaagacacgatttggaaacttcaacttagggataaagttagttatactctgagagctgcagttaaaggattatttgtgctgctctgctcttgcctgcgacgtgtgggaatgatgctgagtgatgtcctcctgcttattttgcgtgatttttttttgagacagattctcgctctgtcacccaggctggagtgcaatggtgcgatcttggctcactgcaacctccacctcctgagttcgagcgactctcctgcctcagcctcctgagtagctgggattacaggcgtgtgccactacacctggctaatttttatatttttagtagagatgggattttgccatgttggccaggctggtctcgaacccctgacctcaggtaatctgcccgcctcggcctcccaaagtgctgggattacaggtgtgagccgccacacttggccaattttgcatgatttttacatggcttttcaaagggccagggtgggactatccaaagccctgttaagagtccctcttctgccaaggagcctaggaagggagcaggtttgagtgaggaaggctggtggttttggacggggaacgggtggttttggacgggtagtgccaacggtttttgtgtgcgtggtgctccttgatgtggtctgggtttctgcatttgtagtgtgtgccttctaaggatgctggaaggtgagacagggctttccaaggcctagatggggtttgtggctttacttaggaagacagtcctttccataaagcgtggtgccaaatgcttttcctcctgggcctcctgctgtgatttgtggcgtggagtttcagtgagggagggctctgcaggaaccagctccttggtctgatcctttctggacaattgtggatgggagttggcttcttggtgtcttgagagtgtcctcagcagaccccagtgaagcaggagcatagagctctggatgggctcatggtggacatgggagagctgctggccagggggctgcagggtgaggcttggaaaacagggagggggctgggcttggccccgcattttactgtggtttatttagtgaatgtcagtgctagctggggacagttgacagacaagagaaaacactggtttgattttgaattctgaagcagacattgggcagcagaggctaacatttggcatttatcctaaactttcgaggtgcccgagccttatttcctttctctgggagaaagtctggaacagagacggtgcggagcagcctctagggctcagccctgggcccccctggagttgtgctgctcatggtatcacagtgcttgtttgtttcctgtttgtatccccattgcacctggctcaaggtaggtgtaaggcaaatgctttagaatgagccagtgagtagatttcacatgatcgtctcctcagtcctagaaatgccacgtgaacttcgaacatggaaagttttttatttttgagagattggagaggtgggagttacaggctgtctccaggtcaggcagggagtcagtggctgagtttctgatgctacagatggctggcttgggtggcatgacctctgcaggacccctagaagggcctgaggcccactaccaggctcagcttgcccccttctcttttcttttttggtcctaggcctggatcagaggctccttacccacaggatcttggacaagtcattttccttcttgggcctcagtttcccatctgaaaaggcaggggctgggctggatgtggtctccctagggccattgttgcttctgttacatgatcccgccagctcacctgggacagaacgtgcattttccactctccctcctccccgcagtgagagaacgggccagtgagacaggcctttcctgttttgtcatcttaggggagaattggtgtcaggggctgacccttcactttgttctagctttgctaggagtttgtggagacagtggatgcagatacagacagagttcatatcactgggagtttcactgtcctggagcagatctggagctggaggggacttgctcaggtcacactgggagtggcagtgtcaggccagagacccttgtctcttgattccccgggcaggacacgtttctccatcctgcaggcaggtgcagaggaggaatgcttattcataggcagcacgtgagggctcctctcagctgcttatttggcaccctctttcccctccaggggccagccacacaaccacctgcctccggcctgctccccacacagttgccagaggggtctttctgactctctctgacacctggatgttcttggcacttgctgcttcaagggcataggttcccattggctacggctgtgttttcacacgtgtgtttggtcaggtgtctctggttattaaatgagacaaggcttgcattgctaaagacagaggtttaggaagtgccttggaaaaccaagtgaaacaggtttctttccggaaggatttcccagaggctttagtatggtaatgtgcttatgcatttccaagaggggagaactaaaatgcaaacgtggaaactgattttaccgaacaggaggagactagaagctaggtcttgggcaggaactgaaacctggacaggaaaagaaatttgtgaaattctctgtctccggttgtgtgtgtgtgtgtgcgtgtgtgtgcgcgcgcgcgtgtgtgtgtttatttttaatctctgccctgtctctgcatcctgattcattcatttcctttttcctcctctccaccctcacttccttttcttgtatttttaaaaattgtagtaaaatatacataacaaaatttctcatcttacccatttttaagcatacagtccagcggcattaagtacattcatactattacacaaccatcagtgtcatgcatccacagaactctcctcatcttgcaaaactcaaactcctgtacccataaaacaagaactctccgtcctgttccctcctcaccccagcccctggctacccccattccactttttgtctacaaatttgactactctaggcacctcatatcagtggaatcatacagtatttgtctttttgtgactggctcctttcacttagcatgctgttgtcaagaactatctatgttgtagcctgtgtcagaattttctttccttttttaaggctgaataatattccactgtatggatatattacatcgtgtttatcccttcatctggtgatggacacttgagttgcttccactcactcccagatgttttttcccctctctgatcctcaaggaatagaaaatgcccagccttcatttttacattttacaggtagtggagctttaaaaaagagagtactttgggaggcacagataggagcatcacttgagcccaagagtttgagaccagcctgagcaacatagtaagacccagtctctacaaaaatcagctgggtgtggtggtgcgcacctgtagtctgagctactcaggaggctgaggtgggaggattgcttgagcccaggaggctcaggctgcagtgagctatgatcgtgccactgcactctagcctaggtgataggtgagaccctgtcttaaaaaaataaaaataaaaaataaaaaagagactaaattgattattgtctctctggctgtggccacttctgcctgccttcctagccgcctgccttctgcctctcttgcctctcctgaggctgctgcagggttgatccctccttgcctcttccttacactccttcgaggcaccctggtggttcgtttcctcctcctgttatcatacactttccttgtttttccccattgttttttctcctctgtatcctggtgccaacctcagtgggtgctccctgcaggcaggtggaagaaatgatggtgctgcaggatgaatgaggctctggccccaaacttggctgctgtgactgcagtggtcccagcgggggcctgaccaggcccatctctgcgcttctgggccacttgcctctgtctggggcttgtgtcattaactaagacctgcccttgagtaaaccaccctgaggacagagaagtccactgaggtgcggtgactgaggcagaactcaatcttttagaggtttattctatcagggttgaggatgcaccggggaaaagaaacacaagttatagtaggatctgtgttctgtgctttttccaaagagggctctggtaacgtcagtatttaaaggggaaagagcaagcaggagggagagaagaaaaataaaagaaggaagggtaggcattaggcaagtggtaccattcttgtgaggctctgattagcacttagtgaatctgcattttacatgtgaaaagaagggagttggggaaagtgaatcatggtcttgcactcagtaaatctacgttttacataagataaagtaagcttatgaaattagagctgtctgtttgggaacaaaaagaaggtcagtttttgcatgactcacttcccaagcttaactttctttttctttgacatagtgagtttagggccctgaggttttatttttctttcacagcacaaagatacccagttgacctttttttttcataacagaatgatgcattttggttcagtagtgtttcctccaactgctctacccctaatttaaaaaggggagggggtgagaaatcagtcccaaatgtccctgtaagttttggtgtgatgccagcctccaactggctgacatgagcagttttgtaaaggagagaccctcttgatggcttcacgtatatcatggggtgggatggggacagtcattattgacagccagcctgtgccaagtgtttcccagcagctctctgggcgattattccagccaaggatggccatgccctaaggttaaggaacctgcttgaggtcccagagctggaattgagattgacaacctcaggctgggtggctgtacagcctgggcactctctgtgccccctgccctcactcagccactccctccataggtcaccaggggtaattccctactgcccaggcagagggctggggctggaaggggtctagatggtcacttagtggttccccaagctgagtcctgatcaaaatcatctggggaattttaaaaagaaaaagaagacttgaatcagtgtgtgctagggtggtgtctatggatgggtattttcaaacatttcccgggtaactctgatcttcagcccctgctctgatcctccctttcattttccagtccaggacactggggaccggagagatgagatgccgtgaccaaggtcactgggttgtagccagagccagcatcaggtccaaagtgcgatctcagtagccagttctccatgctctgtgtttgttcagactgccagccctgctcaatggggctctggaacttaaggaaggcctttgaccataggctgggcttgcaaaaccttggtaggaccctgcccttggctggaaacctcagggctccagccagggctcatccccaagaagatacactgccattctccaaagtgtgggggcctctcccctgaagggcgctgcctggagccacctcttgttcacaggcccatgttaggccccctgggacaggttgccttggctccatatgtggttctgcagatcacacccaggcttgagaaatgcggtgacacgtgaactttgcattgatgtgaaaaggtccaaattaaaggtgatggcaagcacagctaagtccaagaaagtgtggctcctatttaggggtggtgggctaagagacaagacacagtaccctttcaccccggtgggtattctaagttgggttagtttgttcatcaattcattcattcaacaaatatttattgggttcccaataaatcatcttactggtccttggagatctgctgtgaacaagacaaacacaaccccacctctgtggcctgcacaaccctggaaggtcacacactagaaccctatcacttggcctctccatgaatcaccgtcatgtagcccctcgacaggggactcttgtgttattactgacaatattgatggttttagacacatattatcccatttaattttcccaaccattctctcaagtggggaaactcaaacttagaaagtttaatgaccttgcccagggtcacaccatgagtgatggcatctgaattcagccccagttctctctgattccaaagctggggttcttgacagccacattgtaccacctggtacccttgctttttgtcaggggcaagtataagaagaaggcaggtgacacgtgaagctttatttgctctaaaacttgagcgatttcatatgtcctaaaggaggagttttgcctcttccttcccagcatgaacacttggcatggtgtgtacatcttcattcgtttggtctggccaacagccactcgggagctgaatgaggtgttgtgaccatgacctgggtattctcttggttcagataccttcttggttggcacattcactttctcgtccttcccttggtctttcttgcttataatatatcccttttttaatttttaattttttttaagacagggttttgttctgtcacccaggctggagtgcagtggcacaaacatagctcactgcagcctcaaactcctgggctcaagggattctcccacctcagcctcccaaatagccaaggctacagaggtgtgccgccatgcctggctaatttcttatttttttgttgaaatgaggtctcagtatattgcccaggttggtctcaaactcctggcctcaagcaatcctcctgtcttggcctcccaaagcgccaggattacaggtgtgagccatcacacctagcctaatgtatcatcttattaaatcagatcaaatcctttttgaaaagacttaaaattgaaatcactttaaaaaacgaaaggatgcagggctaccctccctgggaccctggggcccaggtgtcttggcagctgccttgggctgggccagaagatgtttttgccagtctgtggtaggaaaaagggtgcagagtagcgagtttttaataaagctaaactggccgggtgcagtggctcacgcctgtaatcccagcactttgggaagccgaagcaagtggatctcgaggtcacgagtttgagaccagcctggccaacatagtgaaacccaatctctactaaaaatataaaaaattagctgggcgtggtggagggcgcctgtaatcccagctactcaggaggctgaggcaggagaatcgcttgaacgtggcaggcggaggttgcagcgagccgagattgtgccactgcactccagcctgggcaacagtgtgagactccgtgtcaaagaaaaaaataaaaataaagctaaatctaatttaaagtaccattttataatcagaggtagtcttccttacttttttttaagcattaaaaatgccctttcttttacaaaatcatgtttgtggtggagggcagtggtgattgttgcttatattgttattgtttttgcgtcctttctgggcaaaataaaaagtttgccttggtgtgtccatttcctttgtggttttaatagctggtgaaatctgaactatgaaaatgaccactaattcaggtgattggttttcaccgttcctccaagccctggggtacctggggctctctgtcccggtgagtgagagggagccccagagagtcctttgcccatcttcaatcagagaagccctccttttttatatgtaggattagattttttttatgattttgtttggagataaaaggatacccctgccaaaagttgaaaagcttctcctctaggatgtgtgttgggggggagtgggggagggagggagtcggggagggaggaagggaagggtgggaggaaggaaaggagggaggcaggaaagaaggaagggaggaagaaggaaggagggaatgtagtgactttggtgggactgagccatggtggatcttctacttggcgagtatttcttgcctatatactagtcagagttctccagagaaacaggtaataggatgtgtaaagtctacttgggtttgtaagaccagcctttggttgaagaccttccttgggtcctagcagacagaaaccaggagagacagagacatctatatccggctacatagagaggttatctgtctaactctctgcctgttctctatctatatctgtctgtctgtctgtctgtctacctacctacctgtctctgtctgtctgtctgtctacctacctacctatctaatctacctacctacctacctatctgtctgatctacctacctacgtacctacctacttagaaattgagagatttactttgaggattgacccacatgattgtggggactagccaagtccaaaatctgcaggctggagatttagggagagctgatgttacagtttgagtctgaaggcagtctggaggcagaatttcttccttgagagagacccagtttttttctcacgaggccttcagctgattaaatgaggtgtatgtacccacagtatacaggttaatctactttattcagagtctactgatttaaatgttaaactcatttagaaaatcccttcatacatacatctaaactagtgttagatcaaatatctgggtactgtggctcatccaggctgacccataaaattaaccatcacacctgtgcaagcgcttttccctcctggatggtgtcctagggatgacagaggaggggaaagccaggtctctgcttcaaggagacaaaattatgcatacgaagaaattaagaatgctgctgtgtctgtggagtagccattcttttattcctttactttcttaacaaacttgcttttacttaaaaaaaaaaaaagaaattaagaacaagaccatttatatttaagtgccaacttatgaaatgtaaaaagggatttagaggtgacaaggcaagtgagggctggaggatttggagagatttcatggtgtagggactgaataggagcttccagaacatggaggtttcagataagtgaggacacagaagtcttcacaaccagagtgggcaccacaggacaattctacatctatctaggactctgagtttttgaagggtttccatatgcattgtttggtttgctgcttgcaacaaccctgttgttttaactgaaggtcttagggcctagggattccccagaggccacacaacttgccagtggcaggggaaggtcttactcttccacagccttctctgtctttctccctttatggagcataatgaaatgtacgtgcacacattcatgtagatttcattatgtccatgtagaattcattttgatttcaaatatgtttccttcccagagaaatcctgtgaaactatgacattgtttttctctctctccttctccaggtcttattttccttctttaccatcctgattaactctatttttgtttgttttctcttcttgcccgctcccagacacgaatgcagagtttgagtccagatcccaaagcccagtacacaagtatctacggagccctcaagaaaatcatgcggaccgaaggcttctggaggcccttgcgaggcgtcaacgtcatgatcatgggtgcagggccggcccatgccatgtattttgcctgctatgaaaacatgaaaaggactttaaatgacgttttccaccaccaaggaaacagccacctagccaacggtattttgaaagcgtttgtctggagttagaaagttctcttcttcaacacgtccctccccagggtgttcctccctgtgacccagccgcctcgacttcggcccgcttgctcacgaataaagaactcagagttgtgtgtgcaatgcacacccagacacacgcacgcacacacacgcgcgcgcacacacatgcttttttctgttcccctccgctttctgaagcctggggagaaatcagtgacagaggtgttttggttttattgttatgtgggttttcttttgtatttttttttgtttgttttgtttttaaacattcaaaagcaattaatgatcagacataggagaaaccctgaatagaaacaaaacttttgaatgctggattcaaaaaaaaaaaaaagttatctggacagcttctttgagactatttaaaaactggtacaacaggtctctacaacgccaagatctaactaagctttaaaaggtcaagaagttttatggctgacaaaggactcgcgcaacgcagaaggcctttcccaccttaagcttccggggatctgggaattttacccccattctcttctgtttgtctgagtctcatctctctgcaagcaagggctgaaatcattttgtttggttgttttgagggagagaggcggggtgggggggtgcaaatctgccagcagctcttacgtaaggcatgttttattggggagggctgagcttttattttctcctctccagtggggttggcttttattgtttcttgtttgggtttggaatggaaatatggatagcagcataaagtacttttattttgacaaaattcatttttttcaacaatggagacatagatttgacccacaataacttctccccctctctttttactctgctcaaaaagcatctctcctcccattacccaaccttggtcataagtgtgcctggctggtttgcagatatttgttctgctttgtaaaaattggccattagtgcatttattgagatgatctctaaagagctatgccctgacctacccctgattctatgacattggggcccttcttttgctgaaactgccttacgtaatggttttactccttgaaagagatttgacggaatccattttatgccaagtgctgccctgcactgtttctgcaatatgtggtgtatgctgtggtgatcttgctgggaatgattataagtgtgtgtgtggtgggggagtgggtattacatgcattgctgaagagtcatcctggtgttcctcattcctcccaccttcccgtggtcattttaattacggggcagtgtcaccgcaaagggaggaaactcaaagccgaaagcaaaattccaggcctgattctggcttttgaggttcctggttcttgaagccaggcctgacccgactctcagatggggtcagtcccgtcgctttgcagactgaccctggaaatctacaaaatgcagattttcctgatttcctcttctcttgcccagttttttttttttttttttttttttttttttaaagcctggattgtaaccagattttcttttttcccccttctcagctgtagatatgatatctcctttcagggccccagcttaagggcaaagtgagttaatgtgtagacaaaggcgagggacaagagagagttaacatctagacagtggaaaaagccatggtgtgtggtttctgggaaccaccaacacttgcaggtttagctttttcccagggttgactacaagaaagaaaaccatgtttttgcaagattaaaatgtggttgagtgtgcctaaattaaccatccccatttttatcatatttccaccatcacttcagggttttaagagtcagtgctcacctgggcggagctggtagtacattttgcttcttagaaagctaagtcctgggttccgtctgattttaggttccaggaacttcctgagaacacccgatcgcagagggtaattttctggagtttgttttgcagggatagctgggagtatggccaccctgctccacgatgcggtaatgaatccagcagaaggtaatgtttcatggtcccagggaggggcagtaggggatgtgcaaaggggcacaaaaaatggttgtgggagagtggagaggactgaaggtgggcagagcggctcctagtctccagtcagagcagacaggagaattgaattttttactacgttatcaaaggcctcaagaaaggacgtgaacataagagtttttggtattcctgtgctcggagctactcaaagtgtgttctacagaccagcagcatcagacatcttgaggggtgttggaaatgctaattctgaggctgggtgcagtggctcatgcctgtaatcccagcattttttgggaggccgaggtgggcagatcacttgaggtcaggagttcgagaccagcctggccaacatggagagacccccatctctactaaaaatacaaaaattagcctagtgtggtgtgtgcacctgtaatcccagctactggggtggccgaggtgggagaatcgcttgaacccagcaggcagaggttgcagtgcaccgagagtacgccactgtactccagcctgggccacagagccagactccatctcaaaaggaaaaaaaaaaaaaaaaaagggaaatgctaattctggccggcatggtggtttaaaactgtaatcccagcactttgggaggccaaggcaggcagatctcttgaacccaggagttcaagaccagcgtgggcagcataatgagaccccgtctctatgaaaaatacaaaaattagccaggtgtggtggtgcatgcctgtagtcccagctgttcggaaggctgaggtggaagaattgcttgagtttgggaggttgaggctgcagtgagtcgtgattgcaccactgcactcagccagggcgacagagcaagactgcctcaaaacagaaaagaaaacaaaggctaattctcaggctttacaccgaacctactggatcagaatccctggagctagggaccagaatctgtttattggtgattctgttgcatgcttttgcactattctaaaacctatgtgtgcatacacacacacacacacacacacacactcactctcttagcccttgttaacccttatcgatcctagacaaatgtatggggaacccatcagaggctattctttagggctagtgttcaatttgactgtttttaatatgaaagattatggatcacatttcaaacagatgtgaacgtggagagaataatacgatgtaccgcagtgtgtccatcactgttcttcagaaattcacattgggtcattttgttttagccatctctttccacattatcttctttttgttcttttaaatttcgggggtaatatgaagcaagcctcagctgggcagaccagagtctgttccctttttatatatcccggcgtcttagccgggtactcgtgtctgaatagtgagtaccttttgggcctggcactgggcaggccttcagctgggtcattctctacctggcgatggctttaggtgagttgtggagctcttttcacctttttgcctcatctgaaaatagttcctggccagaagggagaattggtgagaaaagtttcaacattttaagtctcatgctataagtttgcctgtcttttgtctttcaaggtgaagctattaaatttgttctcagctaccctccatgtcctagcagatagaggacttggtctgaccttcagggttgtgatggggcaggttgggaggtgggcggggagtctctgtggtctgggtgctgaggttgacccgatgggcaggtgaagaaaatcaccttctccattccccttgatttctttatcgtgtgccgcacgaggcatgctgaagggacacacacctttccccctttttatttacaaagtagagagctgagaaagacagctcatgttctgttttgttttgtacacattatctttctcaagagatgtgatgtccttaagtaaactgacctgccttcatggcttgtcctgtaatgaatgcgttcaagacagtgttttggggacaggaaagaggcattcttaggtaagcggtggtggggggtggggtggggtggagaggaaacccttctaggaagtagttcaatgaaaaacctaaaaatgcccaaataaacattcgcttacatattatatatcttgggcttctttttatgacagttcattcagggacccagtcagtaaacaggtagttaacttcgtgtaaccaagcaagggttttgtttatcttttttaaagtagaaaaaagtgaggctcaaactctctctttctccttgtcataactattggtttacagtctttatttgtttaaaagtaaagcacattgtatgtatttatttggcaatacatgaggccattaaaaccctgagcctaaggtaccacagttagtctcatttgcctcttgtcctgtgaactccacttagaatgtcattgaacttgggcagacataattctagtgtctgttccaaacgcactgtgtcacagaagctagaattaccattagaggcacaaacccctgagaatacacaagggggcacgcttccagtagatgtgttggggaaggaggagggcagaggggacaggggacaggattcagctttgtggtgggtcctgagggttcctaccaggggtagccaggatctgggaaacagatcagcgactctagtctgaagtggctgcctggttcgggggctgccttcagcaagattcaggcaggagagacggaaatagccaccttccaggcgtgagtcctggagataaaaatggattttaacctaggactgccgggagctggccctccgcggctgctcagactagggctgtgtgtgctggctctcgcctgtttccggtgtctaactggcttgtttctctttatggcttggcttcattccgacctggggtggggccacatccaacccactgcccactggctgtccgtctggcctgccccgcggttccaaccacagtggtgaagcagcgcttgcagatgtacaactcgcagcaccggtcagcaatcagctgcatccggacggtgtggaggaccgaggggttgggggccttctaccggagctacaccacgcagctgaccatgaaca

SEQ ID NO: 15815 - DNA, 43255 bp, Homo sapiens
cctcctgcagcctcctgcgccccgccgagctggcggatggagctgcgcagcgggagcgtgggcagccaggcggtggcgcggaggatggatggggacagccgagatggcggcggcggcaaggacgccaccgggtcggaggactacgagaacctgccgactagcgcctccgtgtccacccacatgacagcaggagcgatggccgggatcctggagcactcggtcatgtacccggtggactcggtgaaggtgaggcgcggggagacttcggggacgcaacgagcggagaaggagcgcgcgcgcgcatttgcatcccgcgcgccggcagcctcggggcagcgtcccgaaaccgagctctccccaggaccgcggctggccggggtcgccccaggagcagctgcgcgcagcctgggcgccgcgccttccgccgaccccgcgagggtgcccggtcctcgccccgcaccgcccgctgctccagccgcgtgcccggccccggctgctggcggcgctgaggcgggggaggcggagtggcgagcaccgctggcttcggcggcgactgggctcccgggggacgcgatcgctgaagctctgcacagtcttaccacgctggccgttcgggctggctggggccgcccacacgtgcgcggtttccgagggagctccccgcaggggaagccctcaccacgctggagctgagaaacgtgtggccctggcccggccgcgcgccctcgggacttggtgtgtggctgctgctccccgggttatttcgggaacttggggccggcaagtcttctctcgactagtggcagctctttaccggttcgacagcggcccgtgggatcccctttctgagggttcctgcacttcttcccccgactttgggtcgccgagccgccgggaggcaatgacgtttgccttctccttttgcttgcggggaggtgggtgggcttgtgccttacagcccttgctgtggattgtgtgagaggcactcagtttcctttaaaccctgtctgtcacttgccccggtagttttaactgcatttctgtaaagaggcagcgttactaggtgcgttttgcctggtagactgagacctgccctctgtcagcctgcccagaacaccccagggccaggatagagtagtgcaggaagtaatgccagtattgactgttacacgttgcacttttataggcataactcgcctaattcatgcaacagccctgggggttaacagatgaagaaactgaggcgcagagaggcgaaccgattaccttgcccaggctcctacaccacctcctatcctctggctgcagctgcagtgtgctttggaggattcggaggcctctctaggtggcaattattttgcaaggcaggtcccacagaggcacccccagcagctttatcttgttgctgatgctggtcctgcatgagcaggtatgaaggccagaaagtataactcagagggttttcccggctccggggagctcgcttggagccagcagtcagtgtctggacaggcagaagtccagtgaggaaagacatgggcttccaaggtgctgctggacctaagcctgagccatcacccatatgtccctccagtgtcccagtggggagttagaggaatggttctcatctccaggaaagacactggactgataccaggtggcatttgtatgggaaagaatccctcaaatgtaataaaattctccatgattgaagctgttgtctcaactgccctgggcagagtctggggaaagttaggagcagggaggtgttatctgagcaggccctagtcctactggtgtcttgagatgaatgttctattcgggaaccccacagtgagttcactttagagcatcattttagcttatttttaggattagaaataattagttgtgccttctgagcaccctttgacactctcaagaggcgtttctcacacgtttaaattgtgtgatctgtgtttagtttctccctgccccatacatgttgatatgttttggttcagatgtcacctgtatacttagtattactttccatagcagttttcacctgtggacaggttaacatggtgtgaatggtagaaggagccggtctggttttcctagacaagtctgtaaaacaaggcgtgggttagctaatcagtgaagtcttctaggttctgggattataactgacccttaggggcccttccatgctgaagtgtgcagggttggttttgaggctgccactgagtgccaaggtctgccaacatcagcacagttgtctgccaagcatgaggagtcaggggtgcatcctccatcatggaaaggcttgggggagaccacacctgtgttcctcttaagtattttggatgatggcgaagaccgggagtaactgagtcaagaaacccgggttgggcttcaagccctgctctcacttgcttcatgcctcgggcactgttctgtgccttagttttgtcactataaagtggggacagtggacctgctcagtccctctccacatttttaacccatgcctcgtttctctgaacacacaacacccatcgtcctcttttatgttacttgaaatatcaaaagaattattacagctgaaaacaaatctatgtaaatcggatcttgaaagagagaaagctttctccagttttgaaaggcgccatttttaactttgatcttgtaatgacaaataagaatgttgaatcggctggcttttttctatcctaggtaatgtggactgtggagctctgtgctggtcactttcaaccctgaacctgatgctacttattttgcagttctaagtgcaaagtcggcctggtggatgcttcccattataatattaaatttgcttcttcgtgaggtcacacctcacatccccagtgtcactttaataactagtgttttttacatggtgggccatgacccattagtggactctgcatttaaaaataaataaataaataaaagaagttattagtgagagtgtaaaaatacgggtgtgcctggcatgcagtgggagaaatgttgaaattctgtttgggttgtgtgtgtgtctctgagtgcattttacagacgtgtacaatgtacttctggctgggagttgtggtcaaacaaatatgaaaaccactgaacctgagaaaatatctctggagccccagcaggcaacactgagattatgaaatgggtatttggaagacctttggcaactttcctgctgcttcctgtgtcttcttctttcccttggtcctcccatggtgggatgtgagcactcattcatccataaagggccagtctactgggacctttggctgcccctgcgatgacagtgagcagcaaagtgatacccagggagggagtatagggtctctgcagggctctcaccaaatggtggcaatgacttactcctgtctaggcggggtctggtggcaggttttccatgagcctctttctggtgttccagagtggcaaggggcacttggggtggatacaagaacccctggtctgatcaggagagctcaagacttgaggagcatgccaggtgggtggaggaggaaattccaaccagattaggcacaccactcggagaccatgccgagtcccgcctggggaaagcaggggcagaaggaaacaggaaagatttgaagccgggggacttccgctgaccctttcacaacccttcttttgctttgctgttgggggaaaccctgcctgtgactctcctaggatgagccctccttcccaggttggtgcaccacggagcgttccctctaggagcctcctggctgaccttatggtgtgcacagccagcctgcccagctcagcagagcattacctcaacttctgacttctcctcttctgagttttctcctggctgcaggcagactggtaggaagggtgctggggggcagtgcaggcagctgccagagtcccctcccacccacttcattgctttccaaacaaagtgcagttcggtccatgccattcagcttcagaagggcgtgaaatcccaaattgctctagttcctgggacaaaactataatgatttttctctctcccttcttgtctcctctccctcacatccccctgctcccttcttttctctcctttgatgagaggtgattttcttaaaaggcgaatttggaacgaggaatcaaaaaaggggtatttgtgagctgcagtcctgttccttgtttcatgaacccccaggcagccatggcctgtacccctcaggcctaccctgaggagtgtgagaacctcatccacttttctctgccctaaattggggaggggcaggctggagcgtggtttggaggcgcgtgcccaagagtactgtgaacagcaaagggggcctcagctttttagtagggagaggtatttggggttgaatgggaggatttaatcagctgctttgcttaaactatacaggggtgtgcacctggggtgggggatgtgcgtgtcacctggaagggaggaatgtgcttcccaaaccttttcctggcttccacttgggcacgtttcagctgcatgtggccatctcattagagatgagttttgtcctgtcttgcagcagtgaccagtcttggggaatcagttccactttctctgttttttagtcttgggcttctgactctctctgacttcaggggtttccttcttctgactcatcggatgaactcacctgctggtgtggaagccttcagcatctttcttgaaccccagagctttttggctcttttcctgtctccactagtacggaaccttttcttgtcaaagaatttgtgtttttgtttttgtttttaatccgaaataccggctgtcatgtcccatccatgctggccacagacatacccctgtgatcatggtgttggctggaccatgccaggatgcatggctttgccactcccatgcccaccttgaatgttgtgtctgatgtttgtcataggaggggtatatccaatctctttctcttttttttctccctctctctctctttttttttgtttttttgagacagggtctcggtctgtcacccaggttggagagtagtggtgtgattgcagctcactgcagccttgacctcccagggcttgagtgatcctcccagctcagactcctgagtagctgggactacaggcacatgccaccatgcctggctaatttttttgtatttttttgtagagatgggggcctcaatttgttgcccagactggtcttgaactcctgggctcaagcgatcctcccaccttggccttccaaagtgctgggattacaggcatgaaccaccatgcccagcctctttctttttgttgaactggaaaccttccctaaagttccctcaaccttccctcaagttcctactgagatggatttcccacccttagagaactatcttggggttcaaattccagtctttgacttactggttgggcaggacacttagcttcttcatgtccttacttgtcaaatggggatcctgattttcttcctgctttctctttcctgacccagctttccattgcttctttcccacttctctcatttttccagtgggccttgtggaagttccttgttaacaagctcccttacatcttcccctctttaccgaatgtttctttcacttccccctcctgatggaaatccagctcctcttgctaagggttgggagcatggacccttgagtccaaatccctggaccgggtcccatttcccagttaggtgtgaccttgggcaagtttcttaacctttctgtgctatttccctatctgtaaaaagaagaagagatggtaccgatctcccagggtggttgtgaggagggttaagccctcgctgcacttcacatgcctggtacacgcacagaacagttgatactctctgatgtctgctctcatctttatcttcatcatcatcagcatgattgccatcactttctctcattccctgaggactctggcatctgatgcacagacttcacctccacagatcccgtcctcaccctgaggatggcccctcttcgtccccacccgactcaagtccaaatcactccattccttacacctctgagtcaatggccttcacctccatggtcccttgacctaactcagaatcttcctgagatcttaaatccagattattatagcctggaccccaagattgactgctgcagctgctggggcctttagtttctctgcctttggttcttccaaccctggcttgccccacctgggtcctggacagcccatctgtcccttgggcagcgaagcccttcaggggacattcacactgcctccaatgcgcatgctccctggcctcagctccacatgtctgggcagctgcttgcatccttcacgagggtcctgttgccccttagctccccaccctattgttgtcagcctcagcctggcatcttgcttccatgtcatagggaaaccaggacctcaatcaaacccatcttcctgtcactgtccttccaaactctcttgccttctacccccactataagggaacaggtgtcttcattcctttaaggtatatcaatgtggcagagaagggagatgtatacaaaccaccttgacaccaggatttgaatactggctgcacacctgggcacattacctaacctctctaagctcaggttccttctctgcaaagtggggatatgaatactgtattagtctgttttcaagctgctgataaagacatacctgagactgcgtaatttatacagaaagaggtttaatggacccacagttccacgtggctgggaaggcctcacaatcatggcagaaggcaaaaggcacatcttacatggtaacagacaagaaagaggacagaacccagtgaaaggggttttccccatataaaatcatcagatctcgtgagacttattcactaccatgagaacagtgtgggggaaactgcccccatgattcaattacctcccactgggtccctcccataacacgtgggaattatgggagccactattcaagatgagatttgagtggggacgcagccaaaccatatcaaataccaagagctattttatagggttgttgtaagaattaaatgaggcaacatatgtaaagttcttgccacagtgcgtggtgcgtacgttgtcaataaatggtgatggtgatgtcatttttgtcccctcactcttgagtgactcggttccaggatctttaggcttcctgctccattgagtttttctcaaaagtgtttctacagatccaagcccatcctgtcttaaataaaccccagacttctcaccttgacctcacatgcacccccaatgtttcttcccataaacaaactgttgcccctttttttcctccttaaaacaacacatgttctgaaagaactattgacactggtctctacttcctcactgccacccctgcttcctggcttttgcactgcccagccgcagcctcacagagacttctggctacccatcatcttcctggcccaccctgctgcctctgttcctgccaggggcacctccgagagggggttggccctgcgatcctcagttttcctctttgggcatggcttctcctcaggaatgtgcccttccacctcattttccccagcacacatgcctcagtttcctcctgggacctgatggctcccagatcactatcttgggcccagactttctggagctgaatctccagttgcctcggagcctcctcagactcagtgtggccagaatggtggtcctggcttcccctcgggcctgcccttctgcctccttctgcaccctgggatggtcatcagcttttctcccactgctgccctgtatgcagggaaggcctgcctgtggctgtatctgtagtacttcttgaatgtgtttccttctctccctccccacagctacttactgccttggttcagggacctggatgtctcctcttccttgagatcccagactgcccaagttaaaagtgagtttaggccgagctcagtggctcacgcctgtaatcccaataccttgagaggccgaggtgggaggatcacttgaggccaggagttggagaccagcctgggcaacatagcgagaccccataggtacaaaaaataaaaacattagcttggtatagtggtatgcgccagtggtctcagcttcttgggaggctgaggtgggggaattgcttgagcctgggaggtcgaggctgtagtgagctatgattggaccaccgcactccagcctgggcaacagagcaagaccctgtctcaaaaaaaaaaaaaaaaaaatgagattactctcccctgcctcacatttccctattgcccattgctgctttgtttttctccccagcagttgttacttcgtaacacacaccatcgtttatttatattgtttacatattttacttatatttatagtattatttgtattgtttatggtctctcttccctcatcagaatgtaggccccaagtgggcagggatgtatgctcttctgttcaccactgtattcccattgccagaaacacagtaggtgctcagtaagtatttgatggaggagcttctgcagttcattctgcacgtcagccatggctggtcctgctcttcagcctccaagcccagcagcttcctggtgggctgcagttttctcatcggaaatagagaagagtagcagtgccgattctgcctcccttgcaggtcgttttagtgcatctagttggaaaatacaggcaggtttgcagggaacacagttttcaaagtgtaaagctcagtgcaggtgctaggtcatggtgttttttgtcacactgggatcctgcgggagaggtaagtttagctgattggagtggaagatccagcccattcttcgtggtgcctgccgcagagcctgcaagcctgcagaaagacagggagtagccacgtctttctgtagttcacacctgtgtgtctccccacctgataatccctcagcacttctgtttgccttgcatgtaaagcccgacctttgcatggcaggcacacagactgaaactctttcctcctccagcctttcttggactcatccacagaatgacaaagaagtattctgtgaatattggttgaatgaaggaaggcacggctttttaaaaaagatgaaaaaaaaaaaagttatgaaaagctttaaaacttgctattggctgggcgtggtggctcacacctataatcccagcactttgggaggccgaggcgggcagatcacctgaggtcaggagtttgagaccagcctggccaacatggcaaaaccccgtctctactaaaaatacaaaaattagctgggcgtggtggtgggtgcctgtaatcccagctacttgggaggctgaggaaggagaatcacttgaacctgggaggcggaggttgcagtgagccgagatcgcgccattgcactccagcccggacaacagagcgagacttcatctcaaaaaaaaaaaaaaaaaaaaaaaaaaccagaaaaaaaaacttgccattaaacaaattccagttttgatttttgttttgcattggttttgaatccatgcatgttatggccacaaagaagactttcttggctccgttgtttgtcgtgtgtgtgtgtgtgtgtgtgtgtttgtgtgtgtgtgtagaacccagcaagcagcagctataccccgatgaggcaatgtcttcatttggccactcatgtcattccacgtttcctgagtgccctcttggctaggcactgtgctagacactgggctacaaaaataagaatgcctggtccccgttctcaaagtaagcgtgcttcctataattagaccctgagctaaggcgacagaaccagctccctttcaagacaagagtcgcctgtcttgacggactttcagatgggctggaagaacaaggtctggcgtgtatggactctgaactgctcaagctgctgccgtcttgcaggtctagagcctacagggtagcgtcattctagtttctttgctgggcactctggaatttgttctttctcctgcgagagacagtggtcctcagttgtgttccctccccaccatcctcaccctccctcccacggtggttagtcattctggaggctcaagttggctcacagaaggtgctcttgaaaacatcccccaccctcctcgtaaccccagacagtcaggaagggccgttgtcgggtactaagaggtgttatggtttcacattcatgctttctctctgaagagaaaacaaaacatgttgaaatagggagaaatcccagcagcagcttgcttgaagcaagggttgcataacaggtctaggaaacgtctggccgtgtgggtcaagttgagggactgcagccttgtgtcactgagggaacttcttccgggtccaccgagcctctggatccattagatccatccagagagccacttggaaggctctgggaccttgagttctggctggccacgtggtctgtgatggctgtcactggtgaaagagagaccctggctgatatttagccaacagtgtttattccctggcatgaccagaaagggtgcatttgagacactgctgtgggtgggggacccggaggagtgtttgtgtgtcagacttatgctggtgttgaggccctagaaaggtcaccaaactggggcggggtgtgggccccgtgaatttaagtcctggtcctgccattaaccagcttggaaaccttgggctaatcatttctctgggctagttttctccttgtgaatctagactagtgtcatctactttacctttttgacagggctgttgggaagcttaggtgagatagatttgtgaatggctcttgcaaaccttaacatgcaaagctaatgacagattgtatcagaggcaatgtgcttgattattagagctgtttaggttaacagcacaacctctgcagccagactgcctggagtggcacctggtcaagttcctgaaacctctctttgccttatttttctcatctataaaatggggctaataactttacccatttcagtgttgctgtgagaattaattgagatgatacacctagaatgttaaggcacatggcaaatgccccattaatatcagctcctcttgttatttctaaaagtattacttcaatgcctgggtatgtttatatattgctggtgcaattgttaattttatattatttttgtattgttagcttttatttggtcatttgatcctcttagctctcctttgaaggtgagaaaaggcaggtgttgtttctcatttcatatttgagaaaactgaacttcagaaaaattacatgccctagaactcgggcctttttctgctccagagctgaaagcgagagaagagaggaagggaattaggctggagcaagccagtaggatgttggatgcagactcagatgttaatggcagcagagcccttgagctggattctagaatatgagaaagggctgagattgatgatggggcccagctgcattgttgggatggaggaaccagagttgagtcgagggagtaactccaggaaatcatggcacccagaaagtgtggcacagaatgcagggctctaacgtatagttaggagttctttgggcaagtactccagcaagcaaggaagaaggatgatgacatatggttattgccacaggatatttttggctgcgtctggcttctctctctgaaacaaattgcagttgctgtgacaccttctcatttcagcagtgagtcgaagttgcactcaatatagtgttttgaattcggactagtcgtgaagattcctttccagatcatagtatatgtatataagtcacttactgggaagagcactacatcatagttccgtggtccactaaggctgcagttttcttatctgaaataaggaggggtaacggtgcccatcctgcctcccctggcaggtccgcttacgcatgtagtgagaaaatacaggcaggcttgcagggaacaccgctttaaaagtataaagctctctgtgcaggtgctaggtcatggtatttattatcacactgggatcctgtgggaggggtaaggttagctcattggaatggaaaatccaggctctcattccagcactaggactcagtgcagctgcctggccttgggcacttaacctctctccttacagtgtctcccatctgttgagccaagacagggtggctgtctgctgccgcccatttggctggctaatgaggaagagccagtgctgctcacagcatgctcatttcgtggtaatgtagacaggggatagtagtggctgcgtgtagcagaaaccagcagggtaggaccggatgagcccaccttcagggaggtgtacccagggctgttagtttgaggacgtctgtgggattttatatccttactcttattttccaagaaagtctgtccctttgagcaccaggcagatgagtctggggacgctgtgaggaggggtcccccaggagcaggaaggtgactaatgatcccggaagaatgactgtgtgtgtttgcagacgcctgggctcttccccagtttggcctttcccgtcactgttttcctcacttgcttaagaggagaaggaggtaacgcacacaagtgcctttgtctcagggtccccacggtgcccatcttgagggttttgcgggcgccttgcattgcctaaggcctggctttagaagcagaacatggagagagaggtttgcagcctgcaggaagctggccagccagacctgccgggcagcgggacccgcgggcagtgcctctgactcacggcacgtccttgatacgcagtgctcccctccccactttctctgccctcctgtggatcacgggtgtcctagggctgttgggagcctggattaaagttgctgagtggccggctgatgatcagatccagggagtcagaccagaggtggggacatcttttcaaaggcaagaagatgctgccagtgcgtgtatatacatatgagggtggaaggggtaaacccagggtgtgtctttaactgaagaatcaagaaagctgctttccttagtcacccgcctctgtggttcgtttgctaaacgttggcttgcgttagcctgattcacagtaatgtggctcccaaggaagattcacatggtatttgtgaaaatgtagcttcatcccctgcccttcattgaatgactgaattacagtcagcaccacataacgatgtttcggtcaactatggactccatatgtgatgagacagtgatcccatagattatagtggagctgaaaaattcctattacctaggggcatcacaacgcattgcatttcgcccgtgtttgggatgatgctggtgtaaacctactatgctgccagtcatgtaaaagtatagcacacacaattagtaggtaatgcttgcaaataataatgaaagactctgctactggtttatgtatttactatgctatactttttgtcattactttagagtgtactcctacttttttttttttttttttgagatggagtttcactcttgtcctgtaggctggagcgaagtggcgcgatctcggcttactgcaacctccacctcctgggttcaagcgattctcctgcctcagcttcccagagtagctgagattacaggcatgcaccgccacgcacggctaattttgtatttttggtagagacagggtttcaccatgttggccaggctggtcaccaactcctgacctcaggtgacccgccctcctcagcctcccagagtgttgggattacaggtgtgagccaccgcccctggccttttttttttttttttttttaagttaattgtaaaagagcctcaggcaggtccttcaggagggattccagaagaaggcattgcgatcacaggaggtgccagctgcattgggacaagatgtggaggtggaagacagtgatattgatgatcctgaccctctgtaagcctaggctaatgtgtatgtttaagaaaaaagtttaaaaagtaaaaaaataaaaaatgttaaaaggaaaagcttatagaataaggatatagagaaaaaatattttttgtagagctgtacaatgtgttttgtgttttaagccaagtgttattacaagagtcaaaaagtcaaaaaattgaaatttataaaacaaaaacattacagtaagctaaatgtaactaattaattttatttatttttttttttagagacagggtcttgccttgtcgcctaggctggagtgcagtgttgagatcatagtttactgcagcctcgaactcctgggtacaaggaatcctccctcctcagcctcctgagtagctgggattacaggtgcgcaccaccacacagctaatttttaaattggtgtagtgaaggagtttcgcaatgttggccaggtggtctcaagctcttggcctcaagcagtcctcctgcctcgacctcccaaagtgctaggattacaggtatgagtcaccacgcccaaccttgaaatttaatttattatggaagaaagcaaaagtttaaaaaataaatttagtgtagcctaagtgtacagtgtttttaaagtctacggtagtgcacaggaatgtcccaggccttcacatttactcaccaccactcacttaaactcacccagagcaacttccagttctgcaggctccattcatggtaaatgccctacacaggtgtaccattaaaaaaaatcttttggctggttgtgatggctcatgcctgtaatcccatctcctggcttcatgccattctccttccccagcttcccgagttgctgggactacaggcgcctgccaccacgcccagctaaattttgtatttttagtagagatggggtttcgctgtgttagccagtatggtctcgatctcctgaccttgttttgatctgcttgcctcggcctcccaagatgctgggattacaggcgtgagccactgcgcccagcaaaaaacgatgtggtattttcactgtactttttttttgttattgagacggagtttcacttttgttgcccaggctggaatgcagtggcagaatctcggctcaccgcaacctctgcctaccgggttcaagcaattctcctgcctcagcctcccgagtagatgggattacaggtgtgtgccaccacgcccggctaattttgtatttttagtagcgatggggtttcaccatgttggccaggctggtctcgaactcccaacctcaagtgatccacctgccctagcctcccaaagtgctgggattacagttgtgagtcaccgcgcccagccttcactgtacttttggtatatttagattcatttagataacaaataccatggtattccagttgcctgcagtattcagtacagtagcatgctgtacaggtttgtagcctaggagcaacacactatagcgtacagcctaggtgtgcggtagctatcccctctcaatttgtgtaagtacactctgtgatgttcacagaaggatgaagtcacctaacaatgcatatctcagaacatatccccgtcatttgcgatgcgtgactgtaattaaggaatggggcctatggggtatgactgtgggtgctgggcactaaggagacggaggcttgacacaacccaggcattccccatgggagcccctctgtggcaggaaggacagatctccaatgaatcattcctttcaggagtgatgagctcagtcttcagggatcctgcacctcacggggaggagttgggaaaggccccccgaggaaggaatatctcagtatctctatctagacctgaaggagatgtggatgttacaactaaactgtatgattctctgtgtccctgagaacatcacagcctatttccaaggtgcctggccatccccagggtgcctgcatgccactgacactctaatctggggttctgctctgagctgagaaagtgtctgtggtttggggtcatcaggtggcagctcttctcctctctgttctgaaatcttaattccctgtttgactgcctggtggctttcagagaagcccagcctcctcccaggtgggaactttcactgtcgaactaaggacccgaggagggtggaaacaggaggaagggaggctaagcggtcacatcagaggcatttctgctcatcgttggctcataataggtggcagtaggggctggtggagcagtggccaggtaagttgctaaaaataaaacatgctcatgtgacgtgtgcaggtttagggtttgcctgagtgagctttcctggtccaggtcacaacttgtagggcaaagagagacttgaggatggtgtaggcgacaactgtgccttccaaaggtcagagatggacctgggatcttgtagtaccagggcctgctctggaggctcagattcgtgtgtcacttcttgtctcttttgaaaggtaactggagagctggacactttcctgtcctctctctttccttgtagccttcctctctcagagatggcctgctatcaaatgccaggggcacagtcagctgggcttggtaaagggcctgagatgagagcttggggactttcccactggagtccatgatagtccagggtgtagacagaagctcttggatctcacagctttggaaaccgagtcctgtttctccaacaggccagtgcggtgacgggcacagacctgctgtcctctctatttgtgtgtccactgattccctggcacagggggtctttgttacaaaatctctttgctgggtgctttgaaggagcacgtgtgtgggcctttttcagggtggttagacaatgccaagctgtcactcagaagaaatggtcaggatagaagcatagaaaatgccctgtggaaatgtagatgagtgttctggctcacacctgtaatcccagctactcaggaggctgaggcagggggattgctggcggacagcagttcgagaccagccttggcaacggagcaagaccctaactctaaaaataaaaataaaaaaataggccgggcgcggtggctcatgcctgtaattccagcactttgtgaggccaagacgggtggatcacgaggtcagaagtttgagaccagcctggccaacatggtgaaaccccgtctcaactaaaaatacaaaaattagctgggtgtggtagcagatgcctataatctcagctacttgagaggctgaggcgggagaatcacttgaacccgggaggcagaggttgcattgagctgagatcatgccattgcactccaggccgggcaacaagagcaagactctgtctcaagaaaaaaaaaaaaattggttttgtgtggtggtgcacacctgtagtcccagctactcaggaggctgaggtgggaagattgcttgagcccaggagtttgaggttgcagtgagccgtgatcatgctactgcactctagcctgggtgacagagcaagatcctgtctctaaaaatattaaaatgaataaataaaagaacagaaaatgacctgtgtggggagaagggttatctgtgaaaggagttagaaacctcaagtgtacataagtaagactggagatctctctgttaatgaaattgtgcttaaaaatttttttttcttgaaccttggcttctcaggcaataactgaattttaaggtgtgtgtgtatatatatatataggtatatatatatataggtgtatatatatatatatatatatagtgtatatatatatatatatatatatatagtgtatatatatatagtgtatgtgtgtgtgtgtgtgtgtatatatatatatatttgggccaggaagggtgaagtgttaaattgccttacttagaaaattaaggtagatttgtatttagcccttagagcttcaaaaatatcagctcagaaatgacttttaattgtgcaggtgataaaatcacaagaaaaaaattcatctacaagttggaatgactcttagctacttatttgtttttaaatttttttttcaaattttggaaggaagtagagaaggagttagaactgtaatttgctattatgggggttggggtgcagtgcgtattagtacaatgttaggtggtggcaggttccgtttatccttggaattagcactgctccccccacaggcttctgggagttgggagcaggctggttggtgacgctttgcctggccttggataagaactcttgttttcaaattcccttgaggtctcttccaagaatcttttgcattttttctgataaatcaatcataaggaagtttctgaaattctctttcagaccctacaacccacaagttactgcaaagctgggcttctaccagaagtgagtgatttgaaattgaaaacagatttcggatctcacctgagtagctcgagtgtaagggagggactgggagagccacagagaacatttgtcaatccagaaccaaccattcatggtgttgcttgactggagggcagggaaggaaaggactagaagcaaggcgaaagcagatctttctgtagatacacacatataagtcttggatttgcattttagggtgaattgtaattagcttgagatgaccaggggcccaccaatcaagcaactctgggaaaaacacttgtctacatcttaagtttctttgtctataaaatgtcaagattgaactaacactacatgattctctcgggaactcaccagttctaaaatttccactccttcttttcacagggcagtgtaactttaactccctgtttcaactttgggtgtaaaatacaggctcacaagcacttttgctttgcagcggaagctaggaagaccctgctgtggaattttgcagaggggctgagcagtggtgggaaggaccagcggcccatgtaccatgttgggcccctgcattccaaggtgtctgcctagaaataaatgatagtttatttaacatacttgtaacttccaacgacaacacttcaagactgcaaatcatccatccgggcaattacagaaatgctgaacggccacagccccgccctggaatcaagggaagaagtgtggcagatgcttctggaaggctctgtttacagctctctgactccttcctgccagaacctttcacaagttcactaccaggaagctgagtcatccaggggtcagccggcatggccaaggtcaccccgcactgccagcagcacagatggggttagcccatcattccagaggagcatccgtgggaatgatggggttggggagctggggagcctccctgcagcatctccctgccatggtgttttgcatttcctgtagatttcgcagtgagaaacggtctcctcttatattcacttcatttcttctctctttctttctttcttttttttgagatggagtctgtctctgtcaccaggctggactgcagtggcgcgatctcggttcactgcaacctctgcctcccgggttcaagcgattctcctgcttcagcctcctgagtagctgggactacaggcatgtgccaccacgcccagctaattttttgtattctcagtagagatgggatttcaccatgttggtcaggatggtctcaatctcctgaccttgtgatccacccgccttggcctcccaaagtgctgggattacaggcgtgagccaccacgtccgggctttttttttttttttttttagacttgttgcccccccaggatggagtgcagtggcgcaatgtcggctcactgtaacctccacctcctgggttcaagcgatgctactgcctcagcctcccaagtagctgggattacaggcatacaccaccacacccggctgattttatagttttagtagacactgggtttctccatgttggtcaggctggtctcaaattcccgacctcaggtgatctgctcacctcagcctcctaaagtgctgggattacaggcatgagtcactgcgcctggccaaaggcaagagatgaggaccatatagatggaaacacagcattaagggtaaaacactctctctctgctctgtctggtgttcagggcccagcatgggctgtatgtcctacacttcgtttcaggctcatcttcaggtgacaccagccttctcggagcctctgtccacatcccacctgtcactacctctgccctaacttcaccttcagtggtcactgccaggacccctccccaaatctaaatgaggtccccctgcatttgccctcattgcaccttctacttttgcttcatggcatttagagtttggaattttttatcgataggatttttagtactctctctctcctctactagactataaactccttgaaggcaaagacgacacctgctccctcagttccagcagcccctaacactgcgctgacatttaggtagtagcagcgttttcttgcagaacgatcctgtagttttaccagctgagacttctgtggtctggggagtcactcatctctggtccctgcctcctcctctcacttttggaaacccttctggccagacggctttggtttaaattgtatgccggagctcttggttccagggagagggttttagcgtaaaaatctcactcatgatggaaggttcctgctattaccttttgcatccaatacaacttaaattgactcctccaaaagcttcggaagtaatttgtacctattgtctagcataaattcagcaagtgggtcccggaggctgaaagtcgagtcttgcggttgtttcctctggtgtttctccctgagacccttagaacggcaagcctggtgcatctggtgtcctgtcatctttctctgtgattgtcatcagtgtgaaaggtgaaaggtgtgtggagaaagaacatcccttcgagctgtggcttagagctgtgacttggcaccacgtggttagtcactatcaagttagaagcctttgtgggaaatctggctttggtaggatctgggaaatttggacccctcatttgccccctggcatctctaaattccagagcccagctttgatggggcttacatccccagctgttaacctgtggggtgggccccagactgtggccaggtgcattgcgctaggggagacagatccacagcaggcagaatttgaggaggacttaaaatacctgctttgggaggccaaggcgggcagatcccctgaggtcgggagtttgagaccagcctgaccaacatggagaaaccctgtctctactaaaaatacaaaattagttgggtgcggtggcacatgcctgtaatcccagctacttgggaggctgaggcaggagaatcgcttgaacccgggaggcggaggttgtggtgagccgagatcaagccactgcactccagcctgggcaacaagagcgaaattccgtttcaaaaaaaaaaaaaaaaaaaacacaaaaaaacaaaaacccgctttgttacctgcctgtgggtggaattgagttcatctctgaatccgtggtagtcatttattgagcacgtgttttagtgagcatggcatggcgctggctccgagatcacagtgctgccgccctccttcacgtttctctgacctttcatgggagtcacatgcagacgcatcacttggtataattatacgtggaggaatgagcaagaggaggctggcgacgggactgctttaaaaatcccttcttctgtggataataggctaatagcggggtgtgctttagaaggtgtggcctccgccaagggcgtgggaactgcatttgtagaagctgggaggaccacacctggcttgggagacggcatgggtttctgaggtgcctggctccctggcctgtccagtgtggacagcttacgcgcagctaggtgaaatgattgtgcagttgctgagggattgggtggcagagctggacagaatttaggtcttctaacttggaacagggctgtgtccatcttacctaggtgtacagtttggggagcactgctgtttggtctagtgagacacacttggtgtaaatatctgtgccctgtagtacccagattccaagggaccagagagcatgcccgcacccacgggctggcgggagcccaggtcctccagggctgctgtggagcatgggcttcttggtgcccagtcctatagctgaacttgggcggcctctggctgttgcccccagggctggtctccctatagttcagaggcgagccagctctcagcagcagggagggccttttccatagtatgaacttggccacaccagaccagtcagcagtgtcgggaatcttggccctcaaggtccctgcctagccctggcctggacttcagcactggtcaaaggtccccagagctgcccttggctctgagcaggtgagtgaacttcccagagcacttttgtctgggcctctgtgccagtgtaaactgataatagtgatttccctgccccacctctctgccagctatctaagttttctttgttacataatcaggattaatttaagcagcctaggccatccatttagaaatggttagtgaagaaaggtgaatggggaggggtcagagtcccttagggggccaccaggtgcgagtccccttgctctttggggccttggtttcccttctgtgagttggggcagctgaagggaagggctgctcaggtggtcctgccacatcccagtgttgtgtctagtgagtacaggtgagagtgctcccaaccagggcagatcctgctgctaggcagtgagtcaggaaggaattggtaaaaatgacgtcattgctaagaatgacgtcttttttgctgtttatccaaaggaaaaaaaaaaaagcagaaataaaagcagcaggcagctgtccaccagaccccatgcaaagggcttttccttgaatcctcacagagactttaggcagtaggtgccattaggagccccacttacagataagaaaacgggggcagagaactgaagtgagtcgcccaaggacacacattgaggaggaagcaacagagctaggatttagatacagaggggtctccaagcctgtccttccagctttgaggtcctgggcctatatattccatcagaaactgaaaggtgtgttggggggtacctagggtcaggatggggttttatttctgtcccttccttgtgatgctgcagggactgtgacctggagttcccaacaccagtgccctgtggctggtagcctcctcctgggactccaggatctattgtttgatttagccattttcttctgtagtccgatgggagggattcaattcaaacctgcaatactgttctttgggccatacaggccatttatcagcaagtagagaaaaacacccacaccttctagcaagattaagctagttctgtggttcttaatgataatttaagccattttgattaacctaggtggtggttttctccctaccaggtagggaatatactggagcctttctaaaaatagttccggtgaagataaacatttattgagtacctactgtactccactaggtgaatacaaggatttctcgttcatctcaggaagcatggttaggggattttacagacgagggaactgaagttcagggaagttaagttacttatccaagttcatatagctgaaaaatagaataggatttcgaccttgtggtaggtggaaaccggggttgtctttgtgctctcaggcatgtggctggcgtggggtagaagctctctatataatggttgagtgactggatgagcttcaaagctggtccctctggcttttcctgctaccccaggccacgtgcccagaaggaacgctgtcttacctgggaggtctttattgactgtttgacgcccttcccatcctatcccaaccccttccccatggcacctagtttccccaaccagaacgtacgttacttatgggcagagacggtctttgagcattgggtgggtggttgaacgcagtttctttgagattctgtgattgggattttcagcaaaatatggtagcaagttggtcagaggggcgagtctggcagtgggggagcccgggcaagtctaactgtttgctcactggcagaacaaagttggggaggttggaggggtaggggaactgaaagcaaaagaaagctcacagggagccccatcgtgcaaaaccgatgatggcagagctgccgggctgcagcgtggagcggggcgggagccttgtgtggagtctgtgaacatactctaggtgcctggatactcctcttatctccccacacatgggttgatgtgcatgtacggtgctttgatgtggactcttgtgttaaatttgttcttctgcgcagctttgtgacgcttcagtgagtgtgtctatatacaaaaggaaaacagttttggctgggtgcagtggctcacgcctgtaatcccagcactttgggaggccgaggtgggtggatcacctgaggtcaggagtttgagaccagcctggacaacatggtgaaacccagtctctaccaaaaaacacaaaaattagccatgtgtggtagcatgcgcctgtaatcccagctactcaggaggctgaggcaggagatggcttgaacccgggggctggaagttgcagtgagccaagttcacgccattgcactccagtctgggcaacagagtgagactccgtctcaaaaaagaaaaaaacaaaaaacaaaaaaaaaaccaacaattttgaggatgaggcatttcttccttacttatgagtgggatgtttatgggccggtgacattgacaaggctggcagagtcaaggggaggccctgggtagtctagcttactagcagtgaattcagttctctcttgaaagcaccgtgactgttggaatatttcagccttagcctttgaatactgacggagtgccaggctttcgtctgtcaagatgcccctctgtgacctcagctggttaatgtctcaagcgcttctttaggagacagaatgggttggtattgaaccaaccactattgcccagtcttgtgatgaccagggttgtggaacagataagttgtgtgacctccacgggtcagggctgttgactttgcctgtaagttacactcttgcagctgggcatagacacagtcctcaggggttttgtggacattaacaagtaaggatttaggtgactctgacatagggtcttccccaaggtcaggcacagaggaggtggcatccatgggacttagcatgttgtagaaacagagcatattgggacaaaagggaagttgaagatcacctgggatcctttagcgtccatccctttgtgagagataggatagcctagttgttaacagcatgactctggccgaccgcctggcttctttctagtcttccttctgtactttgtgaccttgaggcaagtcatttggtctctgtgcctcagtttcccaatttgtggaatggggataactggttgctaatattgctgtttttattgttataattattttgtaaatagaagggttgaaggttcagggaagcaagttgattgacctgaggccatacaatgtatcagtgccagatgcaggatgagaaagaactgtgactcaggccctgtccctcttaccagggcagggcaggacagggaagctgggcaggagagactggcagctcagttccctctccagtccagggtagtcccttccctttctgtctcgcagtgaggtcaccagttgcactcatgaaatcttagtcctgttatctggcatctttggaatttgccccacctgtagggcagagataacttaatcctttttggtgggccacatatgggatattctgggtgtgttctgggtacactgggcatgggccaggcacagacccttccatccattggaggcttttctagagaaggggtggagaccagattgggttcctagggtcgggggatgtgggaatggcaccctctgaactacaggcaaggctgggagctgctgccagtgggcggagagggaaatctaactggtatgtgatgttagtggtggcctggcaagcagctgtagctttggagagagcgaccagcctgtccaggggcctggtagggaaggcttctgttgcacggcctgttgctttctctcagatactggagagcccatctgtcttgcttactgcatggcttttcatagctcccatcatattgctgttgggtgcgattcatagccatggaagacacctgatcataaagtaaattccacacactccagcaaggtattcagggccttgcatggtctagccccaccctacctttcttccagcaaacaataattgatcatctaaggtggcagcttctctcctaagtctgaggctgcttctctaccctcacctgactgctgtcttctctgcacaccagaccttccggccacaggtcctcattccccagatgcaccagcatgttcacatcctcctgcagcgggaattgttttcttcctctccatgccaaatttgtctttttctttcccagtcaaagtaacatatgtacatagtcacaaaatgaaatagtgtagaagagattgtagtgacagctctaattcttacagcttgacatactcttcctttttctaggtggctgttcaaatggcttccttccagccaccttctccaggttggatgtgatctggactctggatctctaccctatagcacatcctgctgtgacctattccaaggagaaggggggtttggtgctggggcttctctcctaggaggctgaggaacttggttattgctatcttagcagaattgttattttctaccaaatgtgcaatgaaaactcttcactgagtcttttgcccctagcaatagcagtgcttcctgaagccccagtagaccctgaaggtttcaggactgtgtctggagagcatcagtgacaggtggcaggaatcctctgtggtccacttcagaggcggcagatgaccaggaggtcagactgtggctggtcttttcagaaggacaaacgtgacccttctgaaaactgggaccattcggggacattggtggaaagacagaggagcctttatggtttgttctcacacatatgaatccactttctcccccctccaacatcagggtgacctgaacgctgaaggaagtctaggccttcctgtaggtgaggcagggaaagccacgtagacctgatttagttgaagtgttttccaccaggtctcaactcttcattttgtcttggtatagcttttctggctgactttctagcaagctggttgggctctttgcttgttccaaaatggtagttttcaccagagacttttcagatgagcaggaagcttttttcagaatgtatgttcttctaactctgcttgagtcccccgccatgtattctgataggcatttgttttcccaccccatcccccacttttttgaagtgggggcaatgactacttttaggggaatcatttttctgttgctggtttcaaaacattaagagcaccaattttttttttttttttgcaacagagtctttctcaggctgaagtgcggtgacatgatcatagctcactgcagcctcagtctcctgggctcaagtgatcctctcaccttagcctcccaagtagctaagaccactggcacccaccatgcctggctaatttttttaaaaaattactttctgaagagatggggtcttgctatgttgtccagactgggcttgaattcctggcagcaagtgatccacctgccttggccttccaaagtgctgggattacaggtgtgagccactgcacccagctcaaattttccttttcattaaaaacatacatatatgtatatgtatgtatatacatatgtatatatgcatgtgtatatatatgtgtgtatatgtatatatgtgtgtatatatgtgtgtgtgtgtatgtatatgtattatatgtatattctctttgtgtatttatttttgccagtttgggagatgttagaaaaagacacgatttggaaacttcaacttagggataaagttagttatactctgagagctgcagttaaaggattatttgtgctgctctgctcttgcctgcgacgtgtgggaatgatgctgagtgatgtcctcctgcttattttgcgtgatttttttttgagacagattctcgctctgtcacccaggctggagtgcaatggtgcgatcttggctcactgcaacctccacctcctgagttcgagcgactctcctgcctcagcctcctgagtagctgggattacaggcgtgtgccactacacctggctaatttttatatttttagtagagatgggattttgccatgttggccaggctggtctcgaacccctgacctcaggtaatctgcccgcctcggcctcccaaagtgctgggattacaggtgtgagccgccacacttggccaattttgcatgatttttacatggcttttcaaagggccagggtgggactatccaaagccctgttaagagtccctcttctgccaaggagcctaggaagggagcaggtttgagtgaggaaggctggtggttttggacggggaacgggtggttttggacgggtagtgccaacggtttttgtgtgcgtggtgctccttgatgtggtctgggtttctgcatttgtagtgtgtgccttctaaggatgctggaaggtgagacagggctttccaaggcctagatggggtttgtggctttacttaggaagacagtcctttccataaagcgtggtgccaaatgcttttcctcctgggcctcctgctgtgatttgtggcgtggagtttcagtgagggagggctctgcaggaaccagctccttggtctgatcctttctggacaattgtggatgggagttggcttcttggtgtcttgagagtgtcctcagcagaccccagtgaagcaggagcatagagctctggatgggctcatggtggacatgggagagctgctggccagggggctgcagggtgaggcttggaaaacagggagggggctgggcttggccccgcattttactgtggtttatttagtgaatgtcagtgctagctggggacagttgacagacaagagaaaacactggtttgattttgaattctgaagcagacattgggcagcagaggctaacatttggcatttatcctaaactttcgaggtgcccgagccttatttcctttctctgggagaaagtctggaacagagacggtgcggagcagcctctagggctcagccctgggcccccctggagttgtgctgctcatggtatcacagtgcttgtttgtttcctgtttgtatccccattgcacctggctcaaggtaggtgtaaggcaaatgctttagaatgagccagtgagtagatttcacatgatcgtctcctcagtcctagaaatgccacgtgaacttcgaacatggaaagttttttatttttgagagattggagaggtgggagttacaggctgtctccaggtcaggcagggagtcagtggctgagtttctgatgctacagatggctggcttgggtggcatgacctctgcaggacccctagaagggcctgaggcccactaccaggctcagcttgcccccttctcttttcttttttggtcctaggcctggatcagaggctccttacccacaggatcttggacaagtcattttccttcttgggcctcagtttcccatctgaaaaggcaggggctgggctggatgtggtctccctagggccattgttgcttctgttacatgatcccgccagctcacctgggacagaacgtgcattttccactctccctcctccccgcagtgagagaacgggccagtgagacaggcctttcctgttttgtcatcttaggggagaattggtgtcaggggctgacccttcactttgttctagctttgctaggagtttgtggagacagtggatgcagatacagacagagttcatatcactgggagtttcactgtcctggagcagatctggagctggaggggacttgctcaggtcacactgggagtggcagtgtcaggccagagacccttgtctcttgattccccgggcaggacacgtttctccatcctgcaggcaggtgcagaggaggaatgcttattcataggcagcacgtgagggctcctctcagctgcttatttggcaccctctttcccctccaggggccagccacacaaccacctgcctccggcctgctccccacacagttgccagaggggtctttctgactctctctgacacctggatgttcttggcacttgctgcttcaagggcataggttcccattggctacggctgtgttttcacacgtgtgtttggtcaggtgtctctggttattaaatgagacaaggcttgcattgctaaagacagaggtttaggaagtgccttggaaaaccaagtgaaacaggtttctttccggaaggatttcccagaggctttagtatggtaatgtgcttatgcatttccaagaggggagaactaaaatgcaaacgtggaaactgattttaccgaacaggaggagactagaagctaggtcttgggcaggaactgaaacctggacaggaaaagaaatttgtgaaattctctgtctccggttgtgtgtgtgtgtgtgcgtgtgtgtgcgcgcgcgcgtgtgtgtgtttatttttaatctctgccctgtctctgcatcctgattcattcatttcctttttcctcctctccaccctcacttccttttcttgtatttttaaaaattgtagtaaaatatacataacaaaatttctcatcttacccatttttaagcatacagtccagcggcattaagtacattcatactattacacaaccatcagtgtcatgcatccacagaactctcctcatcttgcaaaactcaaactcctgtacccataaaacaagaactctccgtcctgttccctcctcaccccagcccctggctacccccattccactttttgtctacaaatttgactactctaggcacctcatatcagtggaatcatacagtatttgtctttttgtgactggctcctttcacttagcatgctgttgtcaagaactatctatgttgtagcctgtgtcagaattttctttccttttttaaggctgaataatattccactgtatggatatattacatcgtgtttatcccttcatctggtgatggacacttgagttgcttccactcactcccagatgttttttcccctctctgatcctcaaggaatagaaaatgcccagccttcatttttacattttacaggtagtggagctttaaaaaagagagtactttgggaggcacagataggagcatcacttgagcccaagagtttgagaccagcctgagcaacatagtaagacccagtctctacaaaaatcagctgggtgtggtggtgcgcacctgtagtctgagctactcaggaggctgaggtgggaggattgcttgagcccaggaggctcaggctgcagtgagctatgatcgtgccactgcactctagcctaggtgataggtgagaccctgtcttaaaaaaataaaaataaaaaataaaaaagagactaaattgattattgtctctctggctgtggccacttctgcctgccttcctagccgcctgccttctgcctctcttgcctctcctgaggctgctgcagggttgatccctccttgcctcttccttacactccttcgaggcaccctggtggttcgtttcctcctcctgttatcatacactttccttgtttttccccattgttttttctcctctgtatcctggtgccaacctcagtgggtgctccctgcaggcaggtggaagaaatgatggtgctgcaggatgaatgaggctctggccccaaacttggctgctgtgactgcagtggtcccagcgggggcctgaccaggcccatctctgcgcttctgggccacttgcctctgtctggggcttgtgtcattaactaagacctgcccttgagtaaaccaccctgaggacagagaagtccactgaggtgcggtgactgaggcagaactcaatcttttagaggtttattctatcagggttgaggatgcaccggggaaaagaaacacaagttatagtaggatctgtgttctgtgctttttccaaagagggctctggtaacgtcagtatttaaaggggaaagagcaagcaggagggagagaagaaaaataaaagaaggaagggtaggcattaggcaagtggtaccattcttgtgaggctctgattagcacttagtgaatctgcattttacatgtgaaaagaagggagttggggaaagtgaatcatggtcttgcactcagtaaatctacgttttacataagataaagtaagcttatgaaattagagctgtctgtttgggaacaaaaagaaggtcagtttttgcatgactcacttcccaagcttaactttctttttctttgacatagtgagtttagggccctgaggttttatttttctttcacagcacaaagatacccagttgacctttttttttcataacagaatgatgcattttggttcagtagtgtttcctccaactgctctacccctaatttaaaaaggggagggggtgagaaatcagtcccaaatgtccctgtaagttttggtgtgatgccagcctccaactggctgacatgagcagttttgtaaaggagagaccctcttgatggcttcacgtatatcatggggtgggatggggacagtcattattgacagccagcctgtgccaagtgtttcccagcagctctctgggcgattattccagccaaggatggccatgccctaaggttaaggaacctgcttgaggtcccagagctggaattgagattgacaacctcaggctgggtggctgtacagcctgggcactctctgtgccccctgccctcactcagccactccctccataggtcaccaggggtaattccctactgcccaggcagagggctggggctggaaggggtctagatggtcacttagtggttccccaagctgagtcctgatcaaaatcatctggggaattttaaaaagaaaaagaagacttgaatcagtgtgtgctagggtggtgtctatggatgggtattttcaaacatttcccgggtaactctgatcttcagcccctgctctgatcctccctttcattttccagtccaggacactggggaccggagagatgagatgccgtgaccaaggtcactgggttgtagccagagccagcatcaggtccaaagtgcgatctcagtagccagttctccatgctctgtgtttgttcagactgccagccctgctcaatggggctctggaacttaaggaaggcctttgaccataggctgggcttgcaaaaccttggtaggaccctgcccttggctggaaacctcagggctccagccagggctcatccccaagaagatacactgccattctccaaagtgtgggggcctctcccctgaagggcgctgcctggagccacctcttgttcacaggcccatgttaggccccctgggacaggttgccttggctccatatgtggttctgcagatcacacccaggcttgagaaatgcggtgacacgtgaactttgcattgatgtgaaaaggtccaaattaaaggtgatggcaagcacagctaagtccaagaaagtgtggctcctatttaggggtggtgggctaagagacaagacacagtaccctttcaccccggtgggtattctaagttgggttagtttgttcatcaattcattcattcaacaaatatttattgggttcccaataaatcatcttactggtccttggagatctgctgtgaacaagacaaacacaaccccacctctgtggcctgcacaaccctggaaggtcacacactagaaccctatcacttggcctctccatgaatcaccgtcatgtagcccctcgacaggggactcttgtgttattactgacaatattgatggttttagacacatattatcccatttaattttcccaaccattctctcaagtggggaaactcaaacttagaaagtttaatgaccttgcccagggtcacaccatgagtgatggcatctgaattcagccccagttctctctgattccaaagctggggttcttgacagccacattgtaccacctggtacccttgctttttgtcaggggcaagtataagaagaaggcaggtgacacgtgaagctttatttgctctaaaacttgagcgatttcatatgtcctaaaggaggagttttgcctcttccttcccagcatgaacacttggcatggtgtgtacatcttcattcgtttggtctggccaacagccactcgggagctgaatgaggtgttgtgaccatgacctgggtattctcttggttcagataccttcttggttggcacattcactttctcgtccttcccttggtctttcttgcttataatatatcccttttttaatttttaattttttttaagacagggttttgttctgtcacccaggctggagtgcagtggcacaaacatagctcactgcagcctcaaactcctgggctcaagggattctcccacctcagcctcccaaatagccaaggctacagaggtgtgccgccatgcctggctaatttcttatttttttgttgaaatgaggtctcagtatattgcccaggttggtctcaaactcctggcctcaagcaatcctcctgtcttggcctcccaaagcgccaggattacaggtgtgagccatcacacctagcctaatgtatcatcttattaaatcagatcaaatcctttttgaaaagacttaaaattgaaatcactttaaaaaacgaaaggatgcagggctaccctccctgggaccctggggcccaggtgtcttggcagctgccttgggctgggccagaagatgtttttgccagtctgtggtaggaaaaagggtgcagagtagcgagtttttaataaagctaaactggccgggtgcagtggctcacgcctgtaatcccagcactttgggaagccgaagcaagtggatctcgaggtcacgagtttgagaccagcctggccaacatagtgaaacccaatctctactaaaaatataaaaaattagctgggcgtggtggagggcgcctgtaatcccagctactcaggaggctgaggcaggagaatcgcttgaacgtggcaggcggaggttgcagcgagccgagattgtgccactgcactccagcctgggcaacagtgtgagactccgtgtcaaagaaaaaaataaaaataaagctaaatctaatttaaagtaccattttataatcagaggtagtcttccttacttttttttaagcattaaaaatgccctttcttttacaaaatcatgtttgtggtggagggcagtggtgattgttgcttatattgttattgtttttgcgtcctttctgggcaaaataaaaagtttgccttggtgtgtccatttcctttgtggttttaatagctggtgaaatctgaactatgaaaatgaccactaattcaggtgattggttttcaccgttcctccaagccctggggtacctggggctctctgtcccggtgagtgagagggagccccagagagtcctttgcccatcttcaatcagagaagccctccttttttatatgtaggattagattttttttatgattttgtttggagataaaaggatacccctgccaaaagttgaaaagcttctcctctaggatgtgtgttgggggggagtgggggagggagggagtcggggagggaggaagggaagggtgggaggaaggaaaggagggaggcaggaaagaaggaagggaggaagaaggaaggagggaatgtagtgactttggtgggactgagccatggtggatcttctacttggcgagtatttcttgcctatatactagtcagagttctccagagaaacaggtaataggatgtgtaaagtctacttgggtttgtaagaccagcctttggttgaagaccttccttgggtcctagcagacagaaaccaggagagacagagacatctatatccggctacatagagaggttatctgtctaactctctgcctgttctctatctatatctgtctgtctgtctgtctgtctacctacctacctgtctctgtctgtctgtctgtctacctacctacctatctaatctacctacctacctacctatctgtctgatctacctacctacgtacctacctacttagaaattgagagatttactttgaggattgacccacatgattgtggggactagccaagtccaaaatctgcaggctggagatttagggagagctgatgttacagtttgagtctgaaggcagtctggaggcagaatttcttccttgagagagacccagtttttttctcacgaggccttcagctgattaaatgaggtgtatgtacccacagtatacaggttaatctactttattcagagtctactgatttaaatgttaaactcatttagaaaatcccttcatacatacatctaaactagtgttagatcaaatatctgggtactgtggctcatccaggctgacccataaaattaaccatcacacctgtgcaagcgcttttccctcctggatggtgtcctagggatgacagaggaggggaaagccaggtctctgcttcaaggagacaaaattatgcatacgaagaaattaagaatgctgctgtgtctgtggagtagccattcttttattcctttactttcttaacaaacttgcttttacttaaaaaaaaaaaaagaaattaagaacaagaccatttatatttaagtgccaacttatgaaatgtaaaaagggatttagaggtgacaaggcaagtgagggctggaggatttggagagatttcatggtgtagggactgaataggagcttccagaacatggaggtttcagataagtgaggacacagaagtcttcacaaccagagtgggcaccacaggacaattctacatctatctaggactctgagtttttgaagggtttccatatgcattgtttggtttgctgcttgcaacaaccctgttgttttaactgaaggtcttagggcctagggattccccagaggccacacaacttgccagtggcaggggaaggtcttactcttccacagccttctctgtctttctccctttatggagcataatgaaatgtacgtgcacacattcatgtagatttcattatgtccatgtagaattcattttgatttcaaatatgtttccttcccagagaaatcctgtgaaactatgacattgtttttctctctctccttctccaggtcttattttccttctttaccatcctgattaactctatttttgtttgttttctcttcttgcccgctcccagacacgaatgcagagtttgagtccagatcccaaagcccagtacacaagtatctacggagccctcaagaaaatcatgcggaccgaaggcttctggaggcccttgcgaggcgtcaacgtcatgatcatgggtgcagggccggcccatgccatgtattttgcctgctatgaaaacatgaaaaggactttaaatgacgttttccaccaccaaggaaacagccacctagccaacggtattttgaaagcgtttgtctggagttagaaagttctcttcttcaacacgtccctccccagggtgttcctccctgtgacccagccgcctcgacttcggcccgcttgctcacgaataaagaactcagagttgtgtgtgcaatgcacacccagacacacgcacgcacacacacgcgcgcgcacacacatgcttttttctgttcccctccgctttctgaagcctggggagaaatcagtgacagaggtgttttggttttattgttatgtgggttttcttttgtatttttttttgtttgttttgtttttaaacattcaaaagcaattaatgatcagacataggagaaaccctgaatagaaacaaaacttttgaatgctggattcaaaaaaaaaaaaaagttatctggacagcttctttgagactatttaaaaactggtacaacaggtctctacaacgccaagatctaactaagctttaaaaggtcaagaagttttatggctgacaaaggactcgcgcaacgcagaaggcctttcccaccttaagcttccggggatctgggaattttacccccattctcttctgtttgtctgagtctcatctctctgcaagcaagggctgaaatcattttgtttggttgttttgagggagagaggcggggtgggggggtgcaaatctgccagcagctcttacgtaaggcatgttttattggggagggctgagcttttattttctcctctccagtggggttggcttttattgtttcttgtttgggtttggaatggaaatatggatagcagcataaagtacttttattttgacaaaattcatttttttcaacaatggagacatagatttgacccacaataacttctccccctctctttttactctgctcaaaaagcatctctcctcccattacccaaccttggtcataagtgtgcctggctggtttgcagatatttgttctgctttgtaaaaattggccattagtgcatttattgagatgatctctaaagagctatgccctgacctacccctgattctatgacattggggcccttcttttgctgaaactgccttacgtaatggttttactccttgaaagagatttgacggaatccattttatgccaagtgctgccctgcactgtttctgcaatatgtggtgtatgctgtggtgatcttgctgggaatgattataagtgtgtgtgtggtgggggagtgggtattacatgcattgctgaagagtcatcctggtgttcctcattcctcccaccttcccgtggtcattttaattacggggcagtgtcaccgcaaagggaggaaactcaaagccgaaagcaaaattccaggcctgattctggcttttgaggttcctggttcttgaagccaggcctgacccgactctcagatggggtcagtcccgtcgctttgcagactgaccctggaaatctacaaaatgcagattttcctgatttcctcttctcttgcccagttttttttttttttttttttttttttttttaaagcctggattgtaaccagattttcttttttcccccttctcagctgtagatatgatatctcctttcagggccccagcttaagggcaaagtgagttaatgtgtagacaaaggcgagggacaagagagagttaacatctagacagtggaaaaagccatggtgtgtggtttctgggaaccaccaacacttgcaggtttagctttttcccagggttgactacaagaaagaaaaccatgtttttgcaagattaaaatgtggttgagtgtgcctaaattaaccatccccatttttatcatatttccaccatcacttcagggttttaagagtcagtgctcacctgggcggagctggtagtacattttgcttcttagaaagctaagtcctgggttccgtctgattttaggttccaggaacttcctgagaacacccgatcgcagagggtaattttctggagtttgttttgcagggatagctgggagtatggccaccctgctccacgatgcggtaatgaatccagcagaaggtaatgtttcatggtcccagggaggggcagtaggggatgtgcaaaggggcacaaaaaatggttgtgggagagtggagaggactgaaggtgggcagagcggctcctagtctccagtcagagcagacaggagaattgaattttttactacgttatcaaaggcctcaagaaaggacgtgaacataagagtttttggtattcctgtgctcggagctactcaaagtgtgttctacagaccagcagcatcagacatcttgaggggtgttggaaatgctaattctgaggctgggtgcagtggctcatgcctgtaatcccagcattttttgggaggccgaggtgggcagatcacttgaggtcaggagttcgagaccagcctggccaacatggagagacccccatctctactaaaaatacaaaaattagcctagtgtggtgtgtgcacctgtaatcccagctactggggtggccgaggtgggagaatcgcttgaacccagcaggcagaggttgcagtgcaccgagagtacgccactgtactccagcctgggccacagagccagactccatctcaaaaggaaaaaaaaaaaaaaaaaagggaaatgctaattctggccggcatggtggtttaaaactgtaatcccagcactttgggaggccaaggcaggcagatctcttgaacccaggagttcaagaccagcgtgggcagcataatgagaccccgtctctatgaaaaatacaaaaattagccaggtgtggtggtgcatgcctgtagtcccagctgttcggaaggctgaggtggaagaattgcttgagtttgggaggttgaggctgcagtgagtcgtgattgcaccactgcactcagccagggcgacagagcaagactgcctcaaaacagaaaagaaaacaaaggctaattctcaggctttacaccgaacctactggatcagaatccctggagctagggaccagaatctgtttattggtgattctgttgcatgcttttgcactattctaaaacctatgtgtgcatacacacacacacacacacacacacactcactctcttagcccttgttaacccttatcgatcctagacaaatgtatggggaacccatcagaggctattctttagggctagtgttcaatttgactgtttttaatatgaaagattatggatcacatttcaaacagatgtgaacgtggagagaataatacgatgtaccgcagtgtgtccatcactgttcttcagaaattcacattgggtcattttgttttagccatctctttccacattatcttctttttgttcttttaaatttcgggggtaatatgaagcaagcctcagctgggcagaccagagtctgttccctttttatatatcccggcgtcttagccgggtactcgtgtctgaatagtgagtaccttttgggcctggcactgggcaggccttcagctgggtcattctctacctggcgatggctttaggtgagttgtggagctcttttcacctttttgcctcatctgaaaatagttcctggccagaagggagaattggtgagaaaagtttcaacattttaagtctcatgctataagtttgcctgtcttttgtctttcaaggtgaagctattaaatttgttctcagctaccctccatgtcctagcagatagaggacttggtctgaccttcagggttgtgatggggcaggttgggaggtgggcggggagtctctgtggtctgggtgctgaggttgacccgatgggcaggtgaagaaaatcaccttctccattccccttgatttctttatcgtgtgccgcacgaggcatgctgaagggacacacacctttccccctttttatttacaaagtagagagctgagaaagacagctcatgttctgttttgttttgtacacattatctttctcaagagatgtgatgtccttaagtaaactgacctgccttcatggcttgtcctgtaatgaatgcgttcaagacagtgttttggggacaggaaagaggcattcttaggtaagcggtggtggggggtggggtggggtggagaggaaacccttctaggaagtagttcaatgaaaaacctaaaaatgcccaaataaacattcgcttacatattatatatcttgggcttctttttatgacagttcattcagggacccagtcagtaaacaggtagttaacttcgtgtaaccaagcaagggttttgtttatcttttttaaagtagaaaaaagtgaggctcaaactctctctttctccttgtcataactattggtttacagtctttatttgtttaaaagtaaagcacattgtatgtatttatttggcaatacatgaggccattaaaaccctgagcctaaggtaccacagttagtctcatttgcctcttgtcctgtgaactccacttagaatgtcattgaacttgggcagacataattctagtgtctgttccaaacgcactgtgtcacagaagctagaattaccattagaggcacaaacccctgagaatacacaagggggcacgcttccagtagatgtgttggggaaggaggagggcagaggggacaggggacaggattcagctttgtggtgggtcctgagggttcctaccaggggtagccaggatctgggaaacagatcagcgactctagtctgaagtggctgcctggttcgggggctgccttcagcaagattcaggcaggagagacggaaatagccaccttccaggcgtgagtcctggagataaaaatggattttaacctaggactgccgggagctggccctccgcggctgctcagactagggctgtgtgtgctggctctcgcctgtttccggtgtctaactggcttgtttctctttatggcttggcttcattccgacctggggtggggccacatccaacccactgcccactggctgtccgtctggcctgccccgcggttccaaccacagtggtgaagcagcgcttgcagatgtacaactcgcagcaccggtcagcaatcagctgcatccggacggtgtggaggaccgaggggttgggggccttctaccggagctacaccacgcagctgaccatgaacatccccttccagtccatccacttcatcacctatgagttcctgcaggagcaggtcaacccccaccggacctacaacccgcagtcccacatcatctcaggcgggctggccggggccctcgccgcggccgccacgacccccctggacgtctgtaagacccttctgaacactcaggagaacgtggccctctcgctggccaacatcagcggccggctgtcgggtatggccaatgccttccggacggtgtaccagctcaacggcctggccggctacttcaaaggcatccaggcgcgtgtcatctaccagatgccctccaccgccatttcttggtctgtctatgagttcttcaagtactttctcaccaagcgccagctggaaaatcgagctccatactaaaggaagggatcatagaatcttttcttaaagtcattctctgcctgcatccagccccttgccctctcctcacacgtagatcattttttttttgcagggtgctgcctatgggccctctgctccccaatgccttagagagaggaggggacggcacggccgctcaccggaaggctgtgtgcggggacatccgaggtggtggtggacaggaaggacttgggaaggggagcgagaaattgctttttctcttcctccctgggcagaatgtagcttttctgcttcactgtggcagcctcctccctggatccttagatcccagaggagggaagaaaatttgcagtgactgaaaacagtaaaaaaaaaaaaaaaaaa

SEQ ID NO: 15816 - DNA, 46508 bp, Homo sapiens; identical to SEQ ID NO: 1262

SEQ ID NO: 15817 - DNA, 39913 bp, Homo sapiens
ggatggggacagccgagatggcggcggcggcaaggacgccaccgggtcggaggactacgagaacctgccgactagcgcctccgtgtccacccacatgacagcaggagcgatggccgggatcctggagcactcggtcatgtacccggtggactcggtgaaggtgaggcgcggggagacttcggggacgcaacgagcggagaaggagcgcgcgcgcgcatttgcatcccgcgcgccggcagcctcggggcagcgtcccgaaaccgagctctccccaggaccgcggctggccggggtcgccccaggagcagctgcgcgcagcctgggcgccgcgccttccgccgaccccgcgagggtgcccggtcctcgccccgcaccgcccgctgctccagccgcgtgcccggccccggctgctggcggcgctgaggcgggggaggcggagtggcgagcaccgctggcttcggcggcgactgggctcccgggggacgcgatcgctgaagctctgcacagtcttaccacgctggccgttcgggctggctggggccgcccacacgtgcgcggtttccgagggagctccccgcaggggaagccctcaccacgctggagctgagaaacgtgtggccctggcccggccgcgcgccctcgggacttggtgtgtggctgctgctccccgggttatttcgggaacttggggccggcaagtcttctctcgactagtggcagctctttaccggttcgacagcggcccgtgggatcccctttctgagggttcctgcacttcttcccccgactttgggtcgccgagccgccgggaggcaatgacgtttgccttctccttttgcttgcggggaggtgggtgggcttgtgccttacagcccttgctgtggattgtgtgagaggcactcagtttcctttaaaccctgtctgtcacttgccccggtagttttaactgcatttctgtaaagaggcagcgttactaggtgcgttttgcctggtagactgagacctgccctctgtcagcctgcccagaacaccccagggccaggatagagtagtgcaggaagtaatgccagtattgactgttacacgttgcacttttataggcataactcgcctaattcatgcaacagccctgggggttaacagatgaagaaactgaggcgcagagaggcgaaccgattaccttgcccaggctcctacaccacctcctatcctctggctgcagctgcagtgtgctttggaggattcggaggcctctctaggtggcaattattttgcaaggcaggtcccacagaggcacccccagcagctttatcttgttgctgatgctggtcctgcatgagcaggtatgaaggccagaaagtataactcagagggttttcccggctccggggagctcgcttggagccagcagtcagtgtctggacaggcagaagtccagtgaggaaagacatgggcttccaaggtgctgctggacctaagcctgagccatcacccatatgtccctccagtgtcccagtggggagttagaggaatggttctcatctccaggaaagacactggactgataccaggtggcatttgtatgggaaagaatccctcaaatgtaataaaattctccatgattgaagctgttgtctcaactgccctgggcagagtctggggaaagttaggagcagggaggtgttatctgagcaggccctagtcctactggtgtcttgagatgaatgttctattcgggaaccccacagtgagttcactttagagcatcattttagcttatttttaggattagaaataattagttgtgccttctgagcaccctttgacactctcaagaggcgtttctcacacgtttaaattgtgtgatctgtgtttagtttctccctgccccatacatgttgatatgttttggttcagatgtcacctgtatacttagtattactttccatagcagttttcacctgtggacaggttaacatggtgtgaatggtagaaggagccggtctggttttcctagacaagtctgtaaaacaaggcgtgggttagctaatcagtgaagtcttctaggttctgggattataactgacccttaggggcccttccatgctgaagtgtgcagggttggttttgaggctgccactgagtgccaaggtctgccaacatcagcacagttgtctgccaagcatgaggagtcaggggtgcatcctccatcatggaaaggcttgggggagaccacacctgtgttcctcttaagtattttggatgatggcgaagaccgggagtaactgagtcaagaaacccgggttgggcttcaagccctgctctcacttgcttcatgcctcgggcactgttctgtgccttagttttgtcactataaagtggggacagtggacctgctcagtccctctccacatttttaacccatgcctcgtttctctgaacacacaacacccatcgtcctcttttatgttacttgaaatatcaaaagaattattacagctgaaaacaaatctatgtaaatcggatcttgaaagagagaaagctttctccagttttgaaaggcgccatttttaactttgatcttgtaatgacaaataagaatgttgaatcggctggcttttttctatcctaggtaatgtggactgtggagctctgtgctggtcactttcaaccctgaacctgatgctacttattttgcagttctaagtgcaaagtcggcctggtggatgcttcccattataatattaaatttgcttcttcgtgaggtcacacctcacatccccagtgtcactttaataactagtgttttttacatggtgggccatgacccattagtggactctgcatttaaaaataaataaataaataaaagaagttattagtgagagtgtaaaaatacgggtgtgcctggcatgcagtgggagaaatgttgaaattctgtttgggttgtgtgtgtgtctctgagtgcattttacagacgtgtacaatgtacttctggctgggagttgtggtcaaacaaatatgaaaaccactgaacctgagaaaatatctctggagccccagcaggcaacactgagattatgaaatgggtatttggaagacctttggcaactttcctgctgcttcctgtgtcttcttctttcccttggtcctcccatggtgggatgtgagcactcattcatccataaagggccagtctactgggacctttggctgcccctgcgatgacagtgagcagcaaagtgatacccagggagggagtatagggtctctgcagggctctcaccaaatggtggcaatgacttactcctgtctaggcggggtctggtggcaggttttccatgagcctctttctggtgttccagagtggcaaggggcacttggggtggatacaagaacccctggtctgatcaggagagctcaagacttgaggagcatgccaggtgggtggaggaggaaattccaaccagattaggcacaccactcggagaccatgccgagtcccgcctggggaaagcaggggcagaaggaaacaggaaagatttgaagccgggggacttccgctgaccctttcacaacccttcttttgctttgctgttgggggaaaccctgcctgtgactctcctaggatgagccctccttcccaggttggtgcaccacggagcgttccctctaggagcctcctggctgaccttatggtgtgcacagccagcctgcccagctcagcagagcattacctcaacttctgacttctcctcttctgagttttctcctggctgcaggcagactggtaggaagggtgctggggggcagtgcaggcagctgccagagtcccctcccacccacttcattgctttccaaacaaagtgcagttcggtccatgccattcagcttcagaagggcgtgaaatcccaaattgctctagttcctgggacaaaactataatgatttttctctctcccttcttgtctcctctccctcacatccccctgctcccttcttttctctcctttgatgagaggtgattttcttaaaaggcgaatttggaacgaggaatcaaaaaaggggtatttgtgagctgcagtcctgttccttgtttcatgaacccccaggcagccatggcctgtacccctcaggcctaccctgaggagtgtgagaacctcatccacttttctctgccctaaattggggaggggcaggctggagcgtggtttggaggcgcgtgcccaagagtactgtgaacagcaaagggggcctcagctttttagtagggagaggtatttggggttgaatgggaggatttaatcagctgctttgcttaaactatacaggggtgtgcacctggggtgggggatgtgcgtgtcacctggaagggaggaatgtgcttcccaaaccttttcctggcttccacttgggcacgtttcagctgcatgtggccatctcattagagatgagttttgtcctgtcttgcagcagtgaccagtcttggggaatcagttccactttctctgttttttagtcttgggcttctgactctctctgacttcaggggtttccttcttctgactcatcggatgaactcacctgctggtgtggaagccttcagcatctttcttgaaccccagagctttttggctcttttcctgtctccactagtacggaaccttttcttgtcaaagaatttgtgtttttgtttttgtttttaatccgaaataccggctgtcatgtcccatccatgctggccacagacatacccctgtgatcatggtgttggctggaccatgccaggatgcatggctttgccactcccatgcccaccttgaatgttgtgtctgatgtttgtcataggaggggtatatccaatctctttctcttttttttctccctctctctctctttttttttgtttttttgagacagggtctcggtctgtcacccaggttggagagtagtggtgtgattgcagctcactgcagccttgacctcccagggcttgagtgatcctcccagctcagactcctgagtagctgggactacaggcacatgccaccatgcctggctaatttttttgtatttttttgtagagatgggggcctcaatttgttgcccagactggtcttgaactcctgggctcaagcgatcctcccaccttggccttccaaagtgctgggattacaggcatgaaccaccatgcccagcctctttctttttgttgaactggaaaccttccctaaagttccctcaaccttccctcaagttcctactgagatggatttcccacccttagagaactatcttggggttcaaattccagtctttgacttactggttgggcaggacacttagcttcttcatgtccttacttgtcaaatggggatcctgattttcttcctgctttctctttcctgacccagctttccattgcttctttcccacttctctcatttttccagtgggccttgtggaagttccttgttaacaagctcccttacatcttcccctctttaccgaatgtttctttcacttccccctcctgatggaaatccagctcctcttgctaagggttgggagcatggacccttgagtccaaatccctggaccgggtcccatttcccagttaggtgtgaccttgggcaagtttcttaacctttctgtgctatttccctatctgtaaaaagaagaagagatggtaccgatctcccagggtggttgtgaggagggttaagccctcgctgcacttcacatgcctggtacacgcacagaacagttgatactctctgatgtctgctctcatctttatcttcatcatcatcagcatgattgccatcactttctctcattccctgaggactctggcatctgatgcacagacttcacctccacagatcccgtcctcaccctgaggatggcccctcttcgtccccacccgactcaagtccaaatcactccattccttacacctctgagtcaatggccttcacctccatggtcccttgacctaactcagaatcttcctgagatcttaaatccagattattatagcctggaccccaagattgactgctgcagctgctggggcctttagtttctctgcctttggttcttccaaccctggcttgccccacctgggtcctggacagcccatctgtcccttgggcagcgaagcccttcaggggacattcacactgcctccaatgcgcatgctccctggcctcagctccacatgtctgggcagctgcttgcatccttcacgagggtcctgttgccccttagctccccaccctattgttgtcagcctcagcctggcatcttgcttccatgtcatagggaaaccaggacctcaatcaaacccatcttcctgtcactgtccttccaaactctcttgccttctacccccactataagggaacaggtgtcttcattcctttaaggtatatcaatgtggcagagaagggagatgtatacaaaccaccttgacaccaggatttgaatactggctgcacacctgggcacattacctaacctctctaagctcaggttccttctctgcaaagtggggatatgaatactgtattagtctgttttcaagctgctgataaagacatacctgagactgcgtaatttatacagaaagaggtttaatggacccacagttccacgtggctgggaaggcctcacaatcatggcagaaggcaaaaggcacatcttacatggtaacagacaagaaagaggacagaacccagtgaaaggggttttccccatataaaatcatcagatctcgtgagacttattcactaccatgagaacagtgtgggggaaactgcccccatgattcaattacctcccactgggtccctcccataacacgtgggaattatgggagccactattcaagatgagatttgagtggggacgcagccaaaccatatcaaataccaagagctattttatagggttgttgtaagaattaaatgaggcaacatatgtaaagttcttgccacagtgcgtggtgcgtacgttgtcaataaatggtgatggtgatgtcatttttgtcccctcactcttgagtgactcggttccaggatctttaggcttcctgctccattgagtttttctcaaaagtgtttctacagatccaagcccatcctgtcttaaataaaccccagacttctcaccttgacctcacatgcacccccaatgtttcttcccataaacaaactgttgcccctttttttcctccttaaaacaacacatgttctgaaagaactattgacactggtctctacttcctcactgccacccctgcttcctggcttttgcactgcccagccgcagcctcacagagacttctggctacccatcatcttcctggcccaccctgctgcctctgttcctgccaggggcacctccgagagggggttggccctgcgatcctcagttttcctctttgggcatggcttctcctcaggaatgtgcccttccacctcattttccccagcacacatgcctcagtttcctcctgggacctgatggctcccagatcactatcttgggcccagactttctggagctgaatctccagttgcctcggagcctcctcagactcagtgtggccagaatggtggtcctggcttcccctcgggcctgcccttctgcctccttctgcaccctgggatggtcatcagcttttctcccactgctgccctgtatgcagggaaggcctgcctgtggctgtatctgtagtacttcttgaatgtgtttccttctctccctccccacagctacttactgccttggttcagggacctggatgtctcctcttccttgagatcccagactgcccaagttaaaagtgagtttaggccgagctcagtggctcacgcctgtaatcccaataccttgagaggccgaggtgggaggatcacttgaggccaggagttggagaccagcctgggcaacatagcgagaccccataggtacaaaaaataaaaacattagcttggtatagtggtatgcgccagtggtctcagcttcttgggaggctgaggtgggggaattgcttgagcctgggaggtcgaggctgtagtgagctatgattggaccaccgcactccagcctgggcaacagagcaagaccctgtctcaaaaaaaaaaaaaaaaaaatgagattactctcccctgcctcacatttccctattgcccattgctgctttgtttttctccccagcagttgttacttcgtaacacacaccatcgtttatttatattgtttacatattttacttatatttatagtattatttgtattgtttatggtctctcttccctcatcagaatgtaggccccaagtgggcagggatgtatgctcttctgttcaccactgtattcccattgccagaaacacagtaggtgctcagtaagtatttgatggaggagcttctgcagttcattctgcacgtcagccatggctggtcctgctcttcagcctccaagcccagcagcttcctggtgggctgcagttttctcatcggaaatagagaagagtagcagtgccgattctgcctcccttgcaggtcgttttagtgcatctagttggaaaatacaggcaggtttgcagggaacacagttttcaaagtgtaaagctcagtgcaggtgctaggtcatggtgttttttgtcacactgggatcctgcgggagaggtaagtttagctgattggagtggaagatccagcccattcttcgtggtgcctgccgcagagcctgcaagcctgcagaaagacagggagtagccacgtctttctgtagttcacacctgtgtgtctccccacctgataatccctcagcacttctgtttgccttgcatgtaaagcccgacctttgcatggcaggcacacagactgaaactctttcctcctccagcctttcttggactcatccacagaatgacaaagaagtattctgtgaatattggttgaatgaaggaaggcacggctttttaaaaaagatgaaaaaaaaaaaagttatgaaaagctttaaaacttgctattggctgggcgtggtggctcacacctataatcccagcactttgggaggccgaggcgggcagatcacctgaggtcaggagtttgagaccagcctggccaacatggcaaaaccccgtctctactaaaaatacaaaaattagctgggcgtggtggtgggtgcctgtaatcccagctacttgggaggctgaggaaggagaatcacttgaacctgggaggcggaggttgcagtgagccgagatcgcgccattgcactccagcccggacaacagagcgagacttcatctcaaaaaaaaaaaaaaaaaaaaaaaaaaccagaaaaaaaaacttgccattaaacaaattccagttttgatttttgttttgcattggttttgaatccatgcatgttatggccacaaagaagactttcttggctccgttgtttgtcgtgtgtgtgtgtgtgtgtgtgtgtttgtgtgtgtgtgtagaacccagcaagcagcagctataccccgatgaggcaatgtcttcatttggccactcatgtcattccacgtttcctgagtgccctcttggctaggcactgtgctagacactgggctacaaaaataagaatgcctggtccccgttctcaaagtaagcgtgcttcctataattagaccctgagctaaggcgacagaaccagctccctttcaagacaagagtcgcctgtcttgacggactttcagatgggctggaagaacaaggtctggcgtgtatggactctgaactgctcaagctgctgccgtcttgcaggtctagagcctacagggtagcgtcattctagtttctttgctgggcactctggaatttgttctttctcctgcgagagacagtggtcctcagttgtgttccctccccaccatcctcaccctccctcccacggtggttagtcattctggaggctcaagttggctcacagaaggtgctcttgaaaacatcccccaccctcctcgtaaccccagacagtcaggaagggccgttgtcgggtactaagaggtgttatggtttcacattcatgctttctctctgaagagaaaacaaaacatgttgaaatagggagaaatcccagcagcagcttgcttgaagcaagggttgcataacaggtctaggaaacgtctggccgtgtgggtcaagttgagggactgcagccttgtgtcactgagggaacttcttccgggtccaccgagcctctggatccattagatccatccagagagccacttggaaggctctgggaccttgagttctggctggccacgtggtctgtgatggctgtcactggtgaaagagagaccctggctgatatttagccaacagtgtttattccctggcatgaccagaaagggtgcatttgagacactgctgtgggtgggggacccggaggagtgtttgtgtgtcagacttatgctggtgttgaggccctagaaaggtcaccaaactggggcggggtgtgggccccgtgaatttaagtcctggtcctgccattaaccagcttggaaaccttgggctaatcatttctctgggctagttttctccttgtgaatctagactagtgtcatctactttacctttttgacagggctgttgggaagcttaggtgagatagatttgtgaatggctcttgcaaaccttaacatgcaaagctaatgacagattgtatcagaggcaatgtgcttgattattagagctgtttaggttaacagcacaacctctgcagccagactgcctggagtggcacctggtcaagttcctgaaacctctctttgccttatttttctcatctataaaatggggctaataactttacccatttcagtgttgctgtgagaattaattgagatgatacacctagaatgttaaggcacatggcaaatgccccattaatatcagctcctcttgttatttctaaaagtattacttcaatgcctgggtatgtttatatattgctggtgcaattgttaattttatattatttttgtattgttagcttttatttggtcatttgatcctcttagctctcctttgaaggtgagaaaaggcaggtgttgtttctcatttcatatttgagaaaactgaacttcagaaaaattacatgccctagaactcgggcctttttctgctccagagctgaaagcgagagaagagaggaagggaattaggctggagcaagccagtaggatgttggatgcagactcagatgttaatggcagcagagcccttgagctggattctagaatatgagaaagggctgagattgatgatggggcccagctgcattgttgggatggaggaaccagagttgagtcgagggagtaactccaggaaatcatggcacccagaaagtgtggcacagaatgcagggctctaacgtatagttaggagttctttgggcaagtactccagcaagcaaggaagaaggatgatgacatatggttattgccacaggatatttttggctgcgtctggcttctctctctgaaacaaattgcagttgctgtgacaccttctcatttcagcagtgagtcgaagttgcactcaatatagtgttttgaattcggactagtcgtgaagattcctttccagatcatagtatatgtatataagtcacttactgggaagagcactacatcatagttccgtggtccactaaggctgcagttttcttatctgaaataaggaggggtaacggtgcccatcctgcctcccctggcaggtccgcttacgcatgtagtgagaaaatacaggcaggcttgcagggaacaccgctttaaaagtataaagctctctgtgcaggtgctaggtcatggtatttattatcacactgggatcctgtgggaggggtaaggttagctcattggaatggaaaatccaggctctcattccagcactaggactcagtgcagctgcctggccttgggcacttaacctctctccttacagtgtctcccatctgttgagccaagacagggtggctgtctgctgccgcccatttggctggctaatgaggaagagccagtgctgctcacagcatgctcatttcgtggtaatgtagacaggggatagtagtggctgcgtgtagcagaaaccagcagggtaggaccggatgagcccaccttcagggaggtgtacccagggctgttagtttgaggacgtctgtgggattttatatccttactcttattttccaagaaagtctgtccctttgagcaccaggcagatgagtctggggacgctgtgaggaggggtcccccaggagcaggaaggtgactaatgatcccggaagaatgactgtgtgtgtttgcagacgcctgggctcttccccagtttggcctttcccgtcactgttttcctcacttgcttaagaggagaaggaggtaacgcacacaagtgcctttgtctcagggtccccacggtgcccatcttgagggttttgcgggcgccttgcattgcctaaggcctggctttagaagcagaacatggagagagaggtttgcagcctgcaggaagctggccagccagacctgccgggcagcgggacccgcgggcagtgcctctgactcacggcacgtccttgatacgcagtgctcccctccccactttctctgccctcctgtggatcacgggtgtcctagggctgttgggagcctggattaaagttgctgagtggccggctgatgatcagatccagggagtcagaccagaggtggggacatcttttcaaaggcaagaagatgctgccagtgcgtgtatatacatatgagggtggaaggggtaaacccagggtgtgtctttaactgaagaatcaagaaagctgctttccttagtcacccgcctctgtggttcgtttgctaaacgttggcttgcgttagcctgattcacagtaatgtggctcccaaggaagattcacatggtatttgtgaaaatgtagcttcatcccctgcccttcattgaatgactgaattacagtcagcaccacataacgatgtttcggtcaactatggactccatatgtgatgagacagtgatcccatagattatagtggagctgaaaaattcctattacctaggggcatcacaacgcattgcatttcgcccgtgtttgggatgatgctggtgtaaacctactatgctgccagtcatgtaaaagtatagcacacacaattagtaggtaatgcttgcaaataataatgaaagactctgctactggtttatgtatttactatgctatactttttgtcattactttagagtgtactcctacttttttttttttttttttgagatggagtttcactcttgtcctgtaggctggagcgaagtggcgcgatctcggcttactgcaacctccacctcctgggttcaagcgattctcctgcctcagcttcccagagtagctgagattacaggcatgcaccgccacgcacggctaattttgtatttttggtagagacagggtttcaccatgttggccaggctggtcaccaactcctgacctcaggtgacccgccctcctcagcctcccagagtgttgggattacaggtgtgagccaccgcccctggccttttttttttttttttttttaagttaattgtaaaagagcctcaggcaggtccttcaggagggattccagaagaaggcattgcgatcacaggaggtgccagctgcattgggacaagatgtggaggtggaagacagtgatattgatgatcctgaccctctgtaagcctaggctaatgtgtatgtttaagaaaaaagtttaaaaagtaaaaaaataaaaaatgttaaaaggaaaagcttatagaataaggatatagagaaaaaatattttttgtagagctgtacaatgtgttttgtgttttaagccaagtgttattacaagagtcaaaaagtcaaaaaattgaaatttataaaacaaaaacattacagtaagctaaatgtaactaattaattttatttatttttttttttagagacagggtcttgccttgtcgcctaggctggagtgcagtgttgagatcatagtttactgcagcctcgaactcctgggtacaaggaatcctccctcctcagcctcctgagtagctgggattacaggtgcgcaccaccacacagctaatttttaaattggtgtagtgaaggagtttcgcaatgttggccaggtggtctcaagctcttggcctcaagcagtcctcctgcctcgacctcccaaagtgctaggattacaggtatgagtcaccacgcccaaccttgaaatttaatttattatggaagaaagcaaaagtttaaaaaataaatttagtgtagcctaagtgtacagtgtttttaaagtctacggtagtgcacaggaatgtcccaggccttcacatttactcaccaccactcacttaaactcacccagagcaacttccagttctgcaggctccattcatggtaaatgccctacacaggtgtaccattaaaaaaaatcttttggctggttgtgatggctcatgcctgtaatcccatctcctggcttcatgccattctccttccccagcttcccgagttgctgggactacaggcgcctgccaccacgcccagctaaattttgtatttttagtagagatggggtttcgctgtgttagccagtatggtctcgatctcctgaccttgttttgatctgcttgcctcggcctcccaagatgctgggattacaggcgtgagccactgcgcccagcaaaaaacgatgtggtattttcactgtactttttttttgttattgagacggagtttcacttttgttgcccaggctggaatgcagtggcagaatctcggctcaccgcaacctctgcctaccgggttcaagcaattctcctgcctcagcctcccgagtagatgggattacaggtgtgtgccaccacgcccggctaattttgtatttttagtagcgatggggtttcaccatgttggccaggctggtctcgaactcccaacctcaagtgatccacctgccctagcctcccaaagtgctgggattacagttgtgagtcaccgcgcccagccttcactgtacttttggtatatttagattcatttagataacaaataccatggtattccagttgcctgcagtattcagtacagtagcatgctgtacaggtttgtagcctaggagcaacacactatagcgtacagcctaggtgtgcggtagctatcccctctcaatttgtgtaagtacactctgtgatgttcacagaaggatgaagtcacctaacaatgcatatctcagaacatatccccgtcatttgcgatgcgtgactgtaattaaggaatggggcctatggggtatgactgtgggtgctgggcactaaggagacggaggcttgacacaacccaggcattccccatgggagcccctctgtggcaggaaggacagatctccaatgaatcattcctttcaggagtgatgagctcagtcttcagggatcctgcacctcacggggaggagttgggaaaggccccccgaggaaggaatatctcagtatctctatctagacctgaaggagatgtggatgttacaactaaactgtatgattctctgtgtccctgagaacatcacagcctatttccaaggtgcctggccatccccagggtgcctgcatgccactgacactctaatctggggttctgctctgagctgagaaagtgtctgtggtttggggtcatcaggtggcagctcttctcctctctgttctgaaatcttaattccctgtttgactgcctggtggctttcagagaagcccagcctcctcccaggtgggaactttcactgtcgaactaaggacccgaggagggtggaaacaggaggaagggaggctaagcggtcacatcagaggcatttctgctcatcgttggctcataataggtggcagtaggggctggtggagcagtggccaggtaagttgctaaaaataaaacatgctcatgtgacgtgtgcaggtttagggtttgcctgagtgagctttcctggtccaggtcacaacttgtagggcaaagagagacttgaggatggtgtaggcgacaactgtgccttccaaaggtcagagatggacctgggatcttgtagtaccagggcctgctctggaggctcagattcgtgtgtcacttcttgtctcttttgaaaggtaactggagagctggacactttcctgtcctctctctttccttgtagccttcctctctcagagatggcctgctatcaaatgccaggggcacagtcagctgggcttggtaaagggcctgagatgagagcttggggactttcccactggagtccatgatagtccagggtgtagacagaagctcttggatctcacagctttggaaaccgagtcctgtttctccaacaggccagtgcggtgacgggcacagacctgctgtcctctctatttgtgtgtccactgattccctggcacagggggtctttgttacaaaatctctttgctgggtgctttgaaggagcacgtgtgtgggcctttttcagggtggttagacaatgccaagctgtcactcagaagaaatggtcaggatagaagcatagaaaatgccctgtggaaatgtagatgagtgttctggctcacacctgtaatcccagctactcaggaggctgaggcagggggattgctggcggacagcagttcgagaccagccttggcaacggagcaagaccctaactctaaaaataaaaataaaaaaataggccgggcgcggtggctcatgcctgtaattccagcactttgtgaggccaagacgggtggatcacgaggtcagaagtttgagaccagcctggccaacatggtgaaaccccgtctcaactaaaaatacaaaaattagctgggtgtggtagcagatgcctataatctcagctacttgagaggctgaggcgggagaatcacttgaacccgggaggcagaggttgcattgagctgagatcatgccattgcactccaggccgggcaacaagagcaagactctgtctcaagaaaaaaaaaaaaattggttttgtgtggtggtgcacacctgtagtcccagctactcaggaggctgaggtgggaagattgcttgagcccaggagtttgaggttgcagtgagccgtgatcatgctactgcactctagcctgggtgacagagcaagatcctgtctctaaaaatattaaaatgaataaataaaagaacagaaaatgacctgtgtggggagaagggttatctgtgaaaggagttagaaacctcaagtgtacataagtaagactggagatctctctgttaatgaaattgtgcttaaaaatttttttttcttgaaccttggcttctcaggcaataactgaattttaaggtgtgtgtgtatatatatatataggtatatatatatataggtgtatatatatatatatatatatagtgtatatatatatatatatatatatatagtgtatatatatatagtgtatgtgtgtgtgtgtgtgtgtatatatatatatatttgggccaggaagggtgaagtgttaaattgccttacttagaaaattaaggtagatttgtatttagcccttagagcttcaaaaatatcagctcagaaatgacttttaattgtgcaggtgataaaatcacaagaaaaaaattcatctacaagttggaatgactcttagctacttatttgtttttaaatttttttttcaaattttggaaggaagtagagaaggagttagaactgtaatttgctattatgggggttggggtgcagtgcgtattagtacaatgttaggtggtggcaggttccgtttatccttggaattagcactgctccccccacaggcttctgggagttgggagcaggctggttggtgacgctttgcctggccttggataagaactcttgttttcaaattcccttgaggtctcttccaagaatcttttgcattttttctgataaatcaatcataaggaagtttctgaaattctctttcagaccctacaacccacaagttactgcaaagctgggcttctaccagaagtgagtgatttgaaattgaaaacagatttcggatctcacctgagtagctcgagtgtaagggagggactgggagagccacagagaacatttgtcaatccagaaccaaccattcatggtgttgcttgactggagggcagggaaggaaaggactagaagcaaggcgaaagcagatctttctgtagatacacacatataagtcttggatttgcattttagggtgaattgtaattagcttgagatgaccaggggcccaccaatcaagcaactctgggaaaaacacttgtctacatcttaagtttctttgtctataaaatgtcaagattgaactaacactacatgattctctcgggaactcaccagttctaaaatttccactccttcttttcacagggcagtgtaactttaactccctgtttcaactttgggtgtaaaatacaggctcacaagcacttttgctttgcagcggaagctaggaagaccctgctgtggaattttgcagaggggctgagcagtggtgggaaggaccagcggcccatgtaccatgttgggcccctgcattccaaggtgtctgcctagaaataaatgatagtttatttaacatacttgtaacttccaacgacaacacttcaagactgcaaatcatccatccgggcaattacagaaatgctgaacggccacagccccgccctggaatcaagggaagaagtgtggcagatgcttctggaaggctctgtttacagctctctgactccttcctgccagaacctttcacaagttcactaccaggaagctgagtcatccaggggtcagccggcatggccaaggtcaccccgcactgccagcagcacagatggggttagcccatcattccagaggagcatccgtgggaatgatggggttggggagctggggagcctccctgcagcatctccctgccatggtgttttgcatttcctgtagatttcgcagtgagaaacggtctcctcttatattcacttcatttcttctctctttctttctttcttttttttgagatggagtctgtctctgtcaccaggctggactgcagtggcgcgatctcggttcactgcaacctctgcctcccgggttcaagcgattctcctgcttcagcctcctgagtagctgggactacaggcatgtgccaccacgcccagctaattttttgtattctcagtagagatgggatttcaccatgttggtcaggatggtctcaatctcctgaccttgtgatccacccgccttggcctcccaaagtgctgggattacaggcgtgagccaccacgtccgggctttttttttttttttttttagacttgttgcccccccaggatggagtgcagtggcgcaatgtcggctcactgtaacctccacctcctgggttcaagcgatgctactgcctcagcctcccaagtagctgggattacaggcatacaccaccacacccggctgattttatagttttagtagacactgggtttctccatgttggtcaggctggtctcaaattcccgacctcaggtgatctgctcacctcagcctcctaaagtgctgggattacaggcatgagtcactgcgcctggccaaaggcaagagatgaggaccatatagatggaaacacagcattaagggtaaaacactctctctctgctctgtctggtgttcagggcccagcatgggctgtatgtcctacacttcgtttcaggctcatcttcaggtgacaccagccttctcggagcctctgtccacatcccacctgtcactacctctgccctaacttcaccttcagtggtcactgccaggacccctccccaaatctaaatgaggtccccctgcatttgccctcattgcaccttctacttttgcttcatggcatttagagtttggaattttttatcgataggatttttagtactctctctctcctctactagactataaactccttgaaggcaaagacgacacctgctccctcagttccagcagcccctaacactgcgctgacatttaggtagtagcagcgttttcttgcagaacgatcctgtagttttaccagctgagacttctgtggtctggggagtcactcatctctggtccctgcctcctcctctcacttttggaaacccttctggccagacggctttggtttaaattgtatgccggagctcttggttccagggagagggttttagcgtaaaaatctcactcatgatggaaggttcctgctattaccttttgcatccaatacaacttaaattgactcctccaaaagcttcggaagtaatttgtacctattgtctagcataaattcagcaagtgggtcccggaggctgaaagtcgagtcttgcggttgtttcctctggtgtttctccctgagacccttagaacggcaagcctggtgcatctggtgtcctgtcatctttctctgtgattgtcatcagtgtgaaaggtgaaaggtgtgtggagaaagaacatcccttcgagctgtggcttagagctgtgacttggcaccacgtggttagtcactatcaagttagaagcctttgtgggaaatctggctttggtaggatctgggaaatttggacccctcatttgccccctggcatctctaaattccagagcccagctttgatggggcttacatccccagctgttaacctgtggggtgggccccagactgtggccaggtgcattgcgctaggggagacagatccacagcaggcagaatttgaggaggacttaaaatacctgctttgggaggccaaggcgggcagatcccctgaggtcgggagtttgagaccagcctgaccaacatggagaaaccctgtctctactaaaaatacaaaattagttgggtgcggtggcacatgcctgtaatcccagctacttgggaggctgaggcaggagaatcgcttgaacccgggaggcggaggttgtggtgagccgagatcaagccactgcactccagcctgggcaacaagagcgaaattccgtttcaaaaaaaaaaaaaaaaaaaacacaaaaaaacaaaaacccgctttgttacctgcctgtgggtggaattgagttcatctctgaatccgtggtagtcatttattgagcacgtgttttagtgagcatggcatggcgctggctccgagatcacagtgctgccgccctccttcacgtttctctgacctttcatgggagtcacatgcagacgcatcacttggtataattatacgtggaggaatgagcaagaggaggctggcgacgggactgctttaaaaatcccttcttctgtggataataggctaatagcggggtgtgctttagaaggtgtggcctccgccaagggcgtgggaactgcatttgtagaagctgggaggaccacacctggcttgggagacggcatgggtttctgaggtgcctggctccctggcctgtccagtgtggacagcttacgcgcagctaggtgaaatgattgtgcagttgctgagggattgggtggcagagctggacagaatttaggtcttctaacttggaacagggctgtgtccatcttacctaggtgtacagtttggggagcactgctgtttggtctagtgagacacacttggtgtaaatatctgtgccctgtagtacccagattccaagggaccagagagcatgcccgcacccacgggctggcgggagcccaggtcctccagggctgctgtggagcatgggcttcttggtgcccagtcctatagctgaacttgggcggcctctggctgttgcccccagggctggtctccctatagttcagaggcgagccagctctcagcagcagggagggccttttccatagtatgaacttggccacaccagaccagtcagcagtgtcgggaatcttggccctcaaggtccctgcctagccctggcctggacttcagcactggtcaaaggtccccagagctgcccttggctctgagcaggtgagtgaacttcccagagcacttttgtctgggcctctgtgccagtgtaaactgataatagtgatttccctgccccacctctctgccagctatctaagttttctttgttacataatcaggattaatttaagcagcctaggccatccatttagaaatggttagtgaagaaaggtgaatggggaggggtcagagtcccttagggggccaccaggtgcgagtccccttgctctttggggccttggtttcccttctgtgagttggggcagctgaagggaagggctgctcaggtggtcctgccacatcccagtgttgtgtctagtgagtacaggtgagagtgctcccaaccagggcagatcctgctgctaggcagtgagtcaggaaggaattggtaaaaatgacgtcattgctaagaatgacgtcttttttgctgtttatccaaaggaaaaaaaaaaaagcagaaataaaagcagcaggcagctgtccaccagaccccatgcaaagggcttttccttgaatcctcacagagactttaggcagtaggtgccattaggagccccacttacagataagaaaacgggggcagagaactgaagtgagtcgcccaaggacacacattgaggaggaagcaacagagctaggatttagatacagaggggtctccaagcctgtccttccagctttgaggtcctgggcctatatattccatcagaaactgaaaggtgtgttggggggtacctagggtcaggatggggttttatttctgtcccttccttgtgatgctgcagggactgtgacctggagttcccaacaccagtgccctgtggctggtagcctcctcctgggactccaggatctattgtttgatttagccattttcttctgtagtccgatgggagggattcaattcaaacctgcaatactgttctttgggccatacaggccatttatcagcaagtagagaaaaacacccacaccttctagcaagattaagctagttctgtggttcttaatgataatttaagccattttgattaacctaggtggtggttttctccctaccaggtagggaatatactggagcctttctaaaaatagttccggtgaagataaacatttattgagtacctactgtactccactaggtgaatacaaggatttctcgttcatctcaggaagcatggttaggggattttacagacgagggaactgaagttcagggaagttaagttacttatccaagttcatatagctgaaaaatagaataggatttcgaccttgtggtaggtggaaaccggggttgtctttgtgctctcaggcatgtggctggcgtggggtagaagctctctatataatggttgagtgactggatgagcttcaaagctggtccctctggcttttcctgctaccccaggccacgtgcccagaaggaacgctgtcttacctgggaggtctttattgactgtttgacgcccttcccatcctatcccaaccccttccccatggcacctagtttccccaaccagaacgtacgttacttatgggcagagacggtctttgagcattgggtgggtggttgaacgcagtttctttgagattctgtgattgggattttcagcaaaatatggtagcaagttggtcagaggggcgagtctggcagtgggggagcccgggcaagtctaactgtttgctcactggcagaacaaagttggggaggttggaggggtaggggaactgaaagcaaaagaaagctcacagggagccccatcgtgcaaaaccgatgatggcagagctgccgggctgcagcgtggagcggggcgggagccttgtgtggagtctgtgaacatactctaggtgcctggatactcctcttatctccccacacatgggttgatgtgcatgtacggtgctttgatgtggactcttgtgttaaatttgttcttctgcgcagctttgtgacgcttcagtgagtgtgtctatatacaaaaggaaaacagttttggctgggtgcagtggctcacgcctgtaatcccagcactttgggaggccgaggtgggtggatcacctgaggtcaggagtttgagaccagcctggacaacatggtgaaacccagtctctaccaaaaaacacaaaaattagccatgtgtggtagcatgcgcctgtaatcccagctactcaggaggctgaggcaggagatggcttgaacccgggggctggaagttgcagtgagccaagttcacgccattgcactccagtctgggcaacagagtgagactccgtctcaaaaaagaaaaaaacaaaaaacaaaaaaaaaaccaacaattttgaggatgaggcatttcttccttacttatgagtgggatgtttatgggccggtgacattgacaaggctggcagagtcaaggggaggccctgggtagtctagcttactagcagtgaattcagttctctcttgaaagcaccgtgactgttggaatatttcagccttagcctttgaatactgacggagtgccaggctttcgtctgtcaagatgcccctctgtgacctcagctggttaatgtctcaagcgcttctttaggagacagaatgggttggtattgaaccaaccactattgcccagtcttgtgatgaccagggttgtggaacagataagttgtgtgacctccacgggtcagggctgttgactttgcctgtaagttacactcttgcagctgggcatagacacagtcctcaggggttttgtggacattaacaagtaaggatttaggtgactctgacatagggtcttccccaaggtcaggcacagaggaggtggcatccatgggacttagcatgttgtagaaacagagcatattgggacaaaagggaagttgaagatcacctgggatcctttagcgtccatccctttgtgagagataggatagcctagttgttaacagcatgactctggccgaccgcctggcttctttctagtcttccttctgtactttgtgaccttgaggcaagtcatttggtctctgtgcctcagtttcccaatttgtggaatggggataactggttgctaatattgctgtttttattgttataattattttgtaaatagaagggttgaaggttcagggaagcaagttgattgacctgaggccatacaatgtatcagtgccagatgcaggatgagaaagaactgtgactcaggccctgtccctcttaccagggcagggcaggacagggaagctgggcaggagagactggcagctcagttccctctccagtccagggtagtcccttccctttctgtctcgcagtgaggtcaccagttgcactcatgaaatcttagtcctgttatctggcatctttggaatttgccccacctgtagggcagagataacttaatcctttttggtgggccacatatgggatattctgggtgtgttctgggtacactgggcatgggccaggcacagacccttccatccattggaggcttttctagagaaggggtggagaccagattgggttcctagggtcgggggatgtgggaatggcaccctctgaactacaggcaaggctgggagctgctgccagtgggcggagagggaaatctaactggtatgtgatgttagtggtggcctggcaagcagctgtagctttggagagagcgaccagcctgtccaggggcctggtagggaaggcttctgttgcacggcctgttgctttctctcagatactggagagcccatctgtcttgcttactgcatggcttttcatagctcccatcatattgctgttgggtgcgattcatagccatggaagacacctgatcataaagtaaattccacacactccagcaaggtattcagggccttgcatggtctagccccaccctacctttcttccagcaaacaataattgatcatctaaggtggcagcttctctcctaagtctgaggctgcttctctaccctcacctgactgctgtcttctctgcacaccagaccttccggccacaggtcctcattccccagatgcaccagcatgttcacatcctcctgcagcgggaattgttttcttcctctccatgccaaatttgtctttttctttcccagtcaaagtaacatatgtacatagtcacaaaatgaaatagtgtagaagagattgtagtgacagctctaattcttacagcttgacatactcttcctttttctaggtggctgttcaaatggcttccttccagccaccttctccaggttggatgtgatctggactctggatctctaccctatagcacatcctgctgtgacctattccaaggagaaggggggtttggtgctggggcttctctcctaggaggctgaggaacttggttattgctatcttagcagaattgttattttctaccaaatgtgcaatgaaaactcttcactgagtcttttgcccctagcaatagcagtgcttcctgaagccccagtagaccctgaaggtttcaggactgtgtctggagagcatcagtgacaggtggcaggaatcctctgtggtccacttcagaggcggcagatgaccaggaggtcagactgtggctggtcttttcagaaggacaaacgtgacccttctgaaaactgggaccattcggggacattggtggaaagacagaggagcctttatggtttgttctcacacatatgaatccactttctcccccctccaacatcagggtgacctgaacgctgaaggaagtctaggccttcctgtaggtgaggcagggaaagccacgtagacctgatttagttgaagtgttttccaccaggtctcaactcttcattttgtcttggtatagcttttctggctgactttctagcaagctggttgggctctttgcttgttccaaaatggtagttttcaccagagacttttcagatgagcaggaagcttttttcagaatgtatgttcttctaactctgcttgagtcccccgccatgtattctgataggcatttgttttcccaccccatcccccacttttttgaagtgggggcaatgactacttttaggggaatcatttttctgttgctggtttcaaaacattaagagcaccaattttttttttttttttgcaacagagtctttctcaggctgaagtgcggtgacatgatcatagctcactgcagcctcagtctcctgggctcaagtgatcctctcaccttagcctcccaagtagctaagaccactggcacccaccatgcctggctaatttttttaaaaaattactttctgaagagatggggtcttgctatgttgtccagactgggcttgaattcctggcagcaagtgatccacctgccttggccttccaaagtgctgggattacaggtgtgagccactgcacccagctcaaattttccttttcattaaaaacatacatatatgtatatgtatgtatatacatatgtatatatgcatgtgtatatatatgtgtgtatatgtatatatgtgtgtatatatgtgtgtgtgtgtatgtatatgtattatatgtatattctctttgtgtatttatttttgccagtttgggagatgttagaaaaagacacgatttggaaacttcaacttagggataaagttagttatactctgagagctgcagttaaaggattatttgtgctgctctgctcttgcctgcgacgtgtgggaatgatgctgagtgatgtcctcctgcttattttgcgtgatttttttttgagacagattctcgctctgtcacccaggctggagtgcaatggtgcgatcttggctcactgcaacctccacctcctgagttcgagcgactctcctgcctcagcctcctgagtagctgggattacaggcgtgtgccactacacctggctaatttttatatttttagtagagatgggattttgccatgttggccaggctggtctcgaacccctgacctcaggtaatctgcccgcctcggcctcccaaagtgctgggattacaggtgtgagccgccacacttggccaattttgcatgatttttacatggcttttcaaagggccagggtgggactatccaaagccctgttaagagtccctcttctgccaaggagcctaggaagggagcaggtttgagtgaggaaggctggtggttttggacggggaacgggtggttttggacgggtagtgccaacggtttttgtgtgcgtggtgctccttgatgtggtctgggtttctgcatttgtagtgtgtgccttctaaggatgctggaaggtgagacagggctttccaaggcctagatggggtttgtggctttacttaggaagacagtcctttccataaagcgtggtgccaaatgcttttcctcctgggcctcctgctgtgatttgtggcgtggagtttcagtgagggagggctctgcaggaaccagctccttggtctgatcctttctggacaattgtggatgggagttggcttcttggtgtcttgagagtgtcctcagcagaccccagtgaagcaggagcatagagctctggatgggctcatggtggacatgggagagctgctggccagggggctgcagggtgaggcttggaaaacagggagggggctgggcttggccccgcattttactgtggtttatttagtgaatgtcagtgctagctggggacagttgacagacaagagaaaacactggtttgattttgaattctgaagcagacattgggcagcagaggctaacatttggcatttatcctaaactttcgaggtgcccgagccttatttcctttctctgggagaaagtctggaacagagacggtgcggagcagcctctagggctcagccctgggcccccctggagttgtgctgctcatggtatcacagtgcttgtttgtttcctgtttgtatccccattgcacctggctcaaggtaggtgtaaggcaaatgctttagaatgagccagtgagtagatttcacatgatcgtctcctcagtcctagaaatgccacgtgaacttcgaacatggaaagttttttatttttgagagattggagaggtgggagttacaggctgtctccaggtcaggcagggagtcagtggctgagtttctgatgctacagatggctggcttgggtggcatgacctctgcaggacccctagaagggcctgaggcccactaccaggctcagcttgcccccttctcttttcttttttggtcctaggcctggatcagaggctccttacccacaggatcttggacaagtcattttccttcttgggcctcagtttcccatctgaaaaggcaggggctgggctggatgtggtctccctagggccattgttgcttctgttacatgatcccgccagctcacctgggacagaacgtgcattttccactctccctcctccccgcagtgagagaacgggccagtgagacaggcctttcctgttttgtcatcttaggggagaattggtgtcaggggctgacccttcactttgttctagctttgctaggagtttgtggagacagtggatgcagatacagacagagttcatatcactgggagtttcactgtcctggagcagatctggagctggaggggacttgctcaggtcacactgggagtggcagtgtcaggccagagacccttgtctcttgattccccgggcaggacacgtttctccatcctgcaggcaggtgcagaggaggaatgcttattcataggcagcacgtgagggctcctctcagctgcttatttggcaccctctttcccctccaggggccagccacacaaccacctgcctccggcctgctccccacacagttgccagaggggtctttctgactctctctgacacctggatgttcttggcacttgctgcttcaagggcataggttcccattggctacggctgtgttttcacacgtgtgtttggtcaggtgtctctggttattaaatgagacaaggcttgcattgctaaagacagaggtttaggaagtgccttggaaaaccaagtgaaacaggtttctttccggaaggatttcccagaggctttagtatggtaatgtgcttatgcatttccaagaggggagaactaaaatgcaaacgtggaaactgattttaccgaacaggaggagactagaagctaggtcttgggcaggaactgaaacctggacaggaaaagaaatttgtgaaattctctgtctccggttgtgtgtgtgtgtgtgcgtgtgtgtgcgcgcgcgcgtgtgtgtgtttatttttaatctctgccctgtctctgcatcctgattcattcatttcctttttcctcctctccaccctcacttccttttcttgtatttttaaaaattgtagtaaaatatacataacaaaatttctcatcttacccatttttaagcatacagtccagcggcattaagtacattcatactattacacaaccatcagtgtcatgcatccacagaactctcctcatcttgcaaaactcaaactcctgtacccataaaacaagaactctccgtcctgttccctcctcaccccagcccctggctacccccattccactttttgtctacaaatttgactactctaggcacctcatatcagtggaatcatacagtatttgtctttttgtgactggctcctttcacttagcatgctgttgtcaagaactatctatgttgtagcctgtgtcagaattttctttccttttttaaggctgaataatattccactgtatggatatattacatcgtgtttatcccttcatctggtgatggacacttgagttgcttccactcactcccagatgttttttcccctctctgatcctcaaggaatagaaaatgcccagccttcatttttacattttacaggtagtggagctttaaaaaagagagtactttgggaggcacagataggagcatcacttgagcccaagagtttgagaccagcctgagcaacatagtaagacccagtctctacaaaaatcagctgggtgtggtggtgcgcacctgtagtctgagctactcaggaggctgaggtgggaggattgcttgagcccaggaggctcaggctgcagtgagctatgatcgtgccactgcactctagcctaggtgataggtgagaccctgtcttaaaaaaataaaaataaaaaataaaaaagagactaaattgattattgtctctctggctgtggccacttctgcctgccttcctagccgcctgccttctgcctctcttgcctctcctgaggctgctgcagggttgatccctccttgcctcttccttacactccttcgaggcaccctggtggttcgtttcctcctcctgttatcatacactttccttgtttttccccattgttttttctcctctgtatcctggtgccaacctcagtgggtgctccctgcaggcaggtggaagaaatgatggtgctgcaggatgaatgaggctctggccccaaacttggctgctgtgactgcagtggtcccagcgggggcctgaccaggcccatctctgcgcttctgggccacttgcctctgtctggggcttgtgtcattaactaagacctgcccttgagtaaaccaccctgaggacagagaagtccactgaggtgcggtgactgaggcagaactcaatcttttagaggtttattctatcagggttgaggatgcaccggggaaaagaaacacaagttatagtaggatctgtgttctgtgctttttccaaagagggctctggtaacgtcagtatttaaaggggaaagagcaagcaggagggagagaagaaaaataaaagaaggaagggtaggcattaggcaagtggtaccattcttgtgaggctctgattagcacttagtgaatctgcattttacatgtgaaaagaagggagttggggaaagtgaatcatggtcttgcactcagtaaatctacgttttacataagataaagtaagcttatgaaattagagctgtctgtttgggaacaaaaagaaggtcagtttttgcatgactcacttcccaagcttaactttctttttctttgacatagtgagtttagggccctgaggttttatttttctttcacagcacaaagatacccagttgacctttttttttcataacagaatgatgcattttggttcagtagtgtttcctccaactgctctacccctaatttaaaaaggggagggggtgagaaatcagtcccaaatgtccctgtaagttttggtgtgatgccagcctccaactggctgacatgagcagttttgtaaaggagagaccctcttgatggcttcacgtatatcatggggtgggatggggacagtcattattgacagccagcctgtgccaagtgtttcccagcagctctctgggcgattattccagccaaggatggccatgccctaaggttaaggaacctgcttgaggtcccagagctggaattgagattgacaacctcaggctgggtggctgtacagcctgggcactctctgtgccccctgccctcactcagccactccctccataggtcaccaggggtaattccctactgcccaggcagagggctggggctggaaggggtctagatggtcacttagtggttccccaagctgagtcctgatcaaaatcatctggggaattttaaaaagaaaaagaagacttgaatcagtgtgtgctagggtggtgtctatggatgggtattttcaaacatttcccgggtaactctgatcttcagcccctgctctgatcctccctttcattttccagtccaggacactggggaccggagagatgagatgccgtgaccaaggtcactgggttgtagccagagccagcatcaggtccaaagtgcgatctcagtagccagttctccatgctctgtgtttgttcagactgccagccctgctcaatggggctctggaacttaaggaaggcctttgaccataggctgggcttgcaaaaccttggtaggaccctgcccttggctggaaacctcagggctccagccagggctcatccccaagaagatacactgccattctccaaagtgtgggggcctctcccctgaagggcgctgcctggagccacctcttgttcacaggcccatgttaggccccctgggacaggttgccttggctccatatgtggttctgcagatcacacccaggcttgagaaatgcggtgacacgtgaactttgcattgatgtgaaaaggtccaaattaaaggtgatggcaagcacagctaagtccaagaaagtgtggctcctatttaggggtggtgggctaagagacaagacacagtaccctttcaccccggtgggtattctaagttgggttagtttgttcatcaattcattcattcaacaaatatttattgggttcccaataaatcatcttactggtccttggagatctgctgtgaacaagacaaacacaaccccacctctgtggcctgcacaaccctggaaggtcacacactagaaccctatcacttggcctctccatgaatcaccgtcatgtagcccctcgacaggggactcttgtgttattactgacaatattgatggttttagacacatattatcccatttaattttcccaaccattctctcaagtggggaaactcaaacttagaaagtttaatgaccttgcccagggtcacaccatgagtgatggcatctgaattcagccccagttctctctgattccaaagctggggttcttgacagccacattgtaccacctggtacccttgctttttgtcaggggcaagtataagaagaaggcaggtgacacgtgaagctttatttgctctaaaacttgagcgatttcatatgtcctaaaggaggagttttgcctcttccttcccagcatgaacacttggcatggtgtgtacatcttcattcgtttggtctggccaacagccactcgggagctgaatgaggtgttgtgaccatgacctgggtattctcttggttcagataccttcttggttggcacattcactttctcgtccttcccttggtctttcttgcttataatatatcccttttttaatttttaattttttttaagacagggttttgttctgtcacccaggctggagtgcagtggcacaaacatagctcactgcagcctcaaactcctgggctcaagggattctcccacctcagcctcccaaatagccaaggctacagaggtgtgccgccatgcctggctaatttcttatttttttgttgaaatgaggtctcagtatattgcccaggttggtctcaaactcctggcctcaagcaatcctcctgtcttggcctcccaaagcgccaggattacaggtgtgagccatcacacctagcctaatgtatcatcttattaaatcagatcaaatcctttttgaaaagacttaaaattgaaatcactttaaaaaacgaaaggatgcagggctaccctccctgggaccctggggcccaggtgtcttggcagctgccttgggctgggccagaagatgtttttgccagtctgtggtaggaaaaagggtgcagagtagcgagtttttaataaagctaaactggccgggtgcagtggctcacgcctgtaatcccagcactttgggaagccgaagcaagtggatctcgaggtcacgagtttgagaccagcctggccaacatagtgaaacccaatctctactaaaaatataaaaaattagctgggcgtggtggagggcgcctgtaatcccagctactcaggaggctgaggcaggagaatcgcttgaacgtggcaggcggaggttgcagcgagccgagattgtgccactgcactccagcctgggcaacagtgtgagactccgtgtcaaagaaaaaaataaaaataaagctaaatctaatttaaagtaccattttataatcagaggtagtcttccttacttttttttaagcattaaaaatgccctttcttttacaaaatcatgtttgtggtggagggcagtggtgattgttgcttatattgttattgtttttgcgtcctttctgggcaaaataaaaagtttgccttggtgtgtccatttcctttgtggttttaatagctggtgaaatctgaactatgaaaatgaccactaattcaggtgattggttttcaccgttcctccaagccctggggtacctggggctctctgtcccggtgagtgagagggagccccagagagtcctttgcccatcttcaatcagagaagccctccttttttatatgtaggattagattttttttatgattttgtttggagataaaaggatacccctgccaaaagttgaaaagcttctcctctaggatgtgtgttgggggggagtgggggagggagggagtcggggagggaggaagggaagggtgggaggaaggaaaggagggaggcaggaaagaaggaagggaggaagaaggaaggagggaatgtagtgactttggtgggactgagccatggtggatcttctacttggcgagtatttcttgcctatatactagtcagagttctccagagaaacaggtaataggatgtgtaaagtctacttgggtttgtaagaccagcctttggttgaagaccttccttgggtcctagcagacagaaaccaggagagacagagacatctatatccggctacatagagaggttatctgtctaactctctgcctgttctctatctatatctgtctgtctgtctgtctgtctacctacctacctgtctctgtctgtctgtctgtctacctacctacctatctaatctacctacctacctacctatctgtctgatctacctacctacgtacctacctacttagaaattgagagatttactttgaggattgacccacatgattgtggggactagccaagtccaaaatctgcaggctggagatttagggagagctgatgttacagtttgagtctgaaggcagtctggaggcagaatttcttccttgagagagacccagtttttttctcacgaggccttcagctgattaaatgaggtgtatgtacccacagtatacaggttaatctactttattcagagtctactgatttaaatgttaaactcatttagaaaatcccttcatacatacatctaaactagtgttagatcaaatatctgggtactgtggctcatccaggctgacccataaaattaaccatcacacctgtgcaagcgcttttccctcctggatggtgtcctagggatgacagaggaggggaaagccaggtctctgcttcaaggagacaaaattatgcatacgaagaaattaagaatgctgctgtgtctgtggagtagccattcttttattcctttactttcttaacaaacttgcttttacttaaaaaaaaaaaaagaaattaagaacaagaccatttatatttaagtgccaacttatgaaatgtaaaaagggatttagaggtgacaaggcaagtgagggctggaggatttggagagatttcatggtgtagggactgaataggagcttccagaacatggaggtttcagataagtgaggacacagaagtcttcacaaccagagtgggcaccacaggacaattctacatctatctaggactctgagtttttgaagggtttccatatgcattgtttggtttgctgcttgcaacaaccctgttgttttaactgaaggtcttagggcctagggattccccagaggccacacaacttgccagtggcaggggaaggtcttactcttccacagccttctctgtctttctccctttatggagcataatgaaatgtacgtgcacacattcatgtagatttcattatgtccatgtagaattcattttgatttcaaatatgtttccttcccagagaaatcctgtgaaactatgacattgtttttctctctctccttctccaggtcttattttccttctttaccatcctgattaactctatttttgtttgttttctcttcttgcccgctcccagacacgaatgcagagtttgagtccagatcccaaagcccagtacacaagtatctacggagccctcaagaaaatcatgcggaccgaaggcttctggaggcccttgcgaggcgtcaacgtcatgatcatgggtgcagggccggcccatgccatgtattttgcctgctatgaaaacatgaaaaggactttaaatgacgttttccaccaccaaggaaacagccacctagccaacggtattttgaaagcgtttgtctggagttagaaagttctcttcttcaacacgtccctccccagggtgttcctccctgtgacccagccgcctcgacttcggcccgcttgctcacgaataaagaactcagagttgtgtgtgcaatgcacacccagacacacgcacgcacacacacgcgcgcgcacacacatgcttttttctgttcccctccgctttctgaagcctggggagaaatcagtgacagaggtgttttggttttattgttatgtgggttttcttttgtatttttttttgtttgttttgtttttaaacattcaaaagcaattaatgatcagacataggagaaaccctgaatagaaacaaaacttttgaatgctggattcaaaaaaaaaaaaaagttatctggacagcttctttgagactatttaaaaactggtacaacaggtctctacaacgccaagatctaactaagctttaaaaggtcaagaagttttatggctgacaaaggactcgcgcaacgcagaaggcctttcccaccttaagcttccggggatctgggaattttacccccattctcttctgtttgtctgagtctcatctctctgcaagcaagggctgaaatcattttgtttggttgttttgagggagagaggcggggtgggggggtgcaaatctgccagcagctcttacgtaaggcatgttttattggggagggctgagcttttattttctcctctccagtggggttggcttttattgtttcttgtttgggtttggaatggaaatatggatagcagcataaagtacttttattttgacaaaattcatttttttcaacaatggagacatagatttgacccacaataacttctccccctctctttttactctgctcaaaaagcatctctcctcccattacccaaccttggtcataagtgtgcctggctggtttgcagatatttgttctgctttgtaaaaattggccattagtgcatttattgagatgatctctaaagagctatgccctgacctacccctgattctatgacattggggcccttcttttgctgaaactgccttacgtaatggttttactccttgaaagagatttgacggaatccattttatgccaagtgctgccctgcactgtttctgcaatatgtggtgtatgctgtggtgatcttgctgggaatgattataagtgtgtgtgtggtgggggagtgggtattacatgcattgctgaagagtcatcctggtgttcctcattcctcccaccttcccgtggtcattttaattacggggcagtgtcaccgcaaagggaggaaactcaaagccgaaagcaaaattccaggcctgattctggcttttgaggttcctggttcttgaagccaggcctgacccgactctcagatggggtcagtcccgtcgctttgcagactgaccctggaaatctacaaaatgcagattttcctgatttcctcttctcttgcccagttttttttttttttttttttttttttttttaaagcctggattgtaaccagattttcttttttcccccttctcagctgtagatatgatatctcctttcagggccccagcttaagggcaaagtgagttaatgtgtagacaaaggcgagggacaagagagagttaacatctagacagtggaaaaagccatggtgtgtggtttctgggaaccaccaacacttgcaggtttagctttttcccagggttgactacaagaaagaaaaccatgtttttgcaagattaaaatgtggttgagtgtgcctaaattaaccatccccatttttatcatatttccaccatcacttcagggttttaagagtcagtgctcacctgggcggagctggtagtacattttgcttcttagaaagctaagtcctgggttccgtctgattttaggttccaggaacttcctgagaacacccgatcgcagagggtaattttctggagtttgttttgcagggatagctgggagtatggccaccctgctccacgatgcggtaatgaatccagcagaaggtaatgtttcatggtcccagggaggggcagtaggggatgtgcaaaggggcacaaaaaatggttgtgggagagtggagaggactgaaggtgggcagagcggctcctagtctccagtcagagcagacaggagaattgaattttttactacgttatcaaaggcctcaagaaaggacgtgaacataagagtttttggtattcctgtgctcggagctactcaaagtgtgttctacagaccagcagcatcagacatcttgaggggtgttggaaatgctaattctgaggctgggtgcagtggctcatgcctgtaatcccagcattttttgggaggccgaggtgggcagatcacttgaggtcaggagttcgagaccagcctggccaacatggagagacccccatctctactaaaaatacaaaaattagcctagtgtggtgtgtgcacctgtaatcccagctactggggtggccgaggtgggagaatcgcttgaacccagcaggcagaggttgcagtgcaccgagagtacgccactgtactccagcctgggccacagagccagactccatctcaaaaggaaaaaaaaaaaaaaaaa

SEQ ID NO: 15818 - DNA, 30734 bp, Homo sapiens
cttgcttaagaggagaaggaggtaacgcacacaagtgcctttgtctcagggtccccacggtgcccatcttgagggttttgcgggcgccttgcattgcctaaggcctggctttagaagcagaacatggagagagaggtttgcagcctgcaggaagctggccagccagacctgccgggcagcgggacccgcgggcagtgcctctgactcacggcacgtccttgatacgcagtgctcccctccccactttctctgccctcctgtggatcacgggtgtcctagggctgttgggagcctggattaaagttgctgagtggccggctgatgatcagatccagggagtcagaccagaggtggggacatcttttcaaaggcaagaagatgctgccagtgcgtgtatatacatatgagggtggaaggggtaaacccagggtgtgtctttaactgaagaatcaagaaagctgctttccttagtcacccgcctctgtggttcgtttgctaaacgttggcttgcgttagcctgattcacagtaatgtggctcccaaggaagattcacatggtatttgtgaaaatgtagcttcatcccctgcccttcattgaatgactgaattacagtcagcaccacataacgatgtttcggtcaactatggactccatatgtgatgagacagtgatcccatagattatagtggagctgaaaaattcctattacctaggggcatcacaacgcattgcatttcgcccgtgtttgggatgatgctggtgtaaacctactatgctgccagtcatgtaaaagtatagcacacacaattagtaggtaatgcttgcaaataataatgaaagactctgctactggtttatgtatttactatgctatactttttgtcattactttagagtgtactcctacttttttttttttttttttgagatggagtttcactcttgtcctgtaggctggagcgaagtggcgcgatctcggcttactgcaacctccacctcctgggttcaagcgattctcctgcctcagcttcccagagtagctgagattacaggcatgcaccgccacgcacggctaattttgtatttttggtagagacagggtttcaccatgttggccaggctggtcaccaactcctgacctcaggtgacccgccctcctcagcctcccagagtgttgggattacaggtgtgagccaccgcccctggccttttttttttttttttttttaagttaattgtaaaagagcctcaggcaggtccttcaggagggattccagaagaaggcattgcgatcacaggaggtgccagctgcattgggacaagatgtggaggtggaagacagtgatattgatgatcctgaccctctgtaagcctaggctaatgtgtatgtttaagaaaaaagtttaaaaagtaaaaaaataaaaaatgttaaaaggaaaagcttatagaataaggatatagagaaaaaatattttttgtagagctgtacaatgtgttttgtgttttaagccaagtgttattacaagagtcaaaaagtcaaaaaattgaaatttataaaacaaaaacattacagtaagctaaatgtaactaattaattttatttatttttttttttagagacagggtcttgccttgtcgcctaggctggagtgcagtgttgagatcatagtttactgcagcctcgaactcctgggtacaaggaatcctccctcctcagcctcctgagtagctgggattacaggtgcgcaccaccacacagctaatttttaaattggtgtagtgaaggagtttcgcaatgttggccaggtggtctcaagctcttggcctcaagcagtcctcctgcctcgacctcccaaagtgctaggattacaggtatgagtcaccacgcccaaccttgaaatttaatttattatggaagaaagcaaaagtttaaaaaataaatttagtgtagcctaagtgtacagtgtttttaaagtctacggtagtgcacaggaatgtcccaggccttcacatttactcaccaccactcacttaaactcacccagagcaacttccagttctgcaggctccattcatggtaaatgccctacacaggtgtaccattaaaaaaaatcttttggctggttgtgatggctcatgcctgtaatcccatctcctggcttcatgccattctccttccccagcttcccgagttgctgggactacaggcgcctgccaccacgcccagctaaattttgtatttttagtagagatggggtttcgctgtgttagccagtatggtctcgatctcctgaccttgttttgatctgcttgcctcggcctcccaagatgctgggattacaggcgtgagccactgcgcccagcaaaaaacgatgtggtattttcactgtactttttttttgttattgagacggagtttcacttttgttgcccaggctggaatgcagtggcagaatctcggctcaccgcaacctctgcctaccgggttcaagcaattctcctgcctcagcctcccgagtagatgggattacaggtgtgtgccaccacgcccggctaattttgtatttttagtagcgatggggtttcaccatgttggccaggctggtctcgaactcccaacctcaagtgatccacctgccctagcctcccaaagtgctgggattacagttgtgagtcaccgcgcccagccttcactgtacttttggtatatttagattcatttagataacaaataccatggtattccagttgcctgcagtattcagtacagtagcatgctgtacaggtttgtagcctaggagcaacacactatagcgtacagcctaggtgtgcggtagctatcccctctcaatttgtgtaagtacactctgtgatgttcacagaaggatgaagtcacctaacaatgcatatctcagaacatatccccgtcatttgcgatgcgtgactgtaattaaggaatggggcctatggggtatgactgtgggtgctgggcactaaggagacggaggcttgacacaacccaggcattccccatgggagcccctctgtggcaggaaggacagatctccaatgaatcattcctttcaggagtgatgagctcagtcttcagggatcctgcacctcacggggaggagttgggaaaggccccccgaggaaggaatatctcagtatctctatctagacctgaaggagatgtggatgttacaactaaactgtatgattctctgtgtccctgagaacatcacagcctatttccaaggtgcctggccatccccagggtgcctgcatgccactgacactctaatctggggttctgctctgagctgagaaagtgtctgtggtttggggtcatcaggtggcagctcttctcctctctgttctgaaatcttaattccctgtttgactgcctggtggctttcagagaagcccagcctcctcccaggtgggaactttcactgtcgaactaaggacccgaggagggtggaaacaggaggaagggaggctaagcggtcacatcagaggcatttctgctcatcgttggctcataataggtggcagtaggggctggtggagcagtggccaggtaagttgctaaaaataaaacatgctcatgtgacgtgtgcaggtttagggtttgcctgagtgagctttcctggtccaggtcacaacttgtagggcaaagagagacttgaggatggtgtaggcgacaactgtgccttccaaaggtcagagatggacctgggatcttgtagtaccagggcctgctctggaggctcagattcgtgtgtcacttcttgtctcttttgaaaggtaactggagagctggacactttcctgtcctctctctttccttgtagccttcctctctcagagatggcctgctatcaaatgccaggggcacagtcagctgggcttggtaaagggcctgagatgagagcttggggactttcccactggagtccatgatagtccagggtgtagacagaagctcttggatctcacagctttggaaaccgagtcctgtttctccaacaggccagtgcggtgacgggcacagacctgctgtcctctctatttgtgtgtccactgattccctggcacagggggtctttgttacaaaatctctttgctgggtgctttgaaggagcacgtgtgtgggcctttttcagggtggttagacaatgccaagctgtcactcagaagaaatggtcaggatagaagcatagaaaatgccctgtggaaatgtagatgagtgttctggctcacacctgtaatcccagctactcaggaggctgaggcagggggattgctggcggacagcagttcgagaccagccttggcaacggagcaagaccctaactctaaaaataaaaataaaaaaataggccgggcgcggtggctcatgcctgtaattccagcactttgtgaggccaagacgggtggatcacgaggtcagaagtttgagaccagcctggccaacatggtgaaaccccgtctcaactaaaaatacaaaaattagctgggtgtggtagcagatgcctataatctcagctacttgagaggctgaggcgggagaatcacttgaacccgggaggcagaggttgcattgagctgagatcatgccattgcactccaggccgggcaacaagagcaagactctgtctcaagaaaaaaaaaaaaattggttttgtgtggtggtgcacacctgtagtcccagctactcaggaggctgaggtgggaagattgcttgagcccaggagtttgaggttgcagtgagccgtgatcatgctactgcactctagcctgggtgacagagcaagatcctgtctctaaaaatattaaaatgaataaataaaagaacagaaaatgacctgtgtggggagaagggttatctgtgaaaggagttagaaacctcaagtgtacataagtaagactggagatctctctgttaatgaaattgtgcttaaaaatttttttttcttgaaccttggcttctcaggcaataactgaattttaaggtgtgtgtgtatatatatatataggtatatatatatataggtgtatatatatatatatatatatagtgtatatatatatatatatatatatatagtgtatatatatatagtgtatgtgtgtgtgtgtgtgtgtatatatatatatatttgggccaggaagggtgaagtgttaaattgccttacttagaaaattaaggtagatttgtatttagcccttagagcttcaaaaatatcagctcagaaatgacttttaattgtgcaggtgataaaatcacaagaaaaaaattcatctacaagttggaatgactcttagctacttatttgtttttaaatttttttttcaaattttggaaggaagtagagaaggagttagaactgtaatttgctattatgggggttggggtgcagtgcgtattagtacaatgttaggtggtggcaggttccgtttatccttggaattagcactgctccccccacaggcttctgggagttgggagcaggctggttggtgacgctttgcctggccttggataagaactcttgttttcaaattcccttgaggtctcttccaagaatcttttgcattttttctgataaatcaatcataaggaagtttctgaaattctctttcagaccctacaacccacaagttactgcaaagctgggcttctaccagaagtgagtgatttgaaattgaaaacagatttcggatctcacctgagtagctcgagtgtaagggagggactgggagagccacagagaacatttgtcaatccagaaccaaccattcatggtgttgcttgactggagggcagggaaggaaaggactagaagcaaggcgaaagcagatctttctgtagatacacacatataagtcttggatttgcattttagggtgaattgtaattagcttgagatgaccaggggcccaccaatcaagcaactctgggaaaaacacttgtctacatcttaagtttctttgtctataaaatgtcaagattgaactaacactacatgattctctcgggaactcaccagttctaaaatttccactccttcttttcacagggcagtgtaactttaactccctgtttcaactttgggtgtaaaatacaggctcacaagcacttttgctttgcagcggaagctaggaagaccctgctgtggaattttgcagaggggctgagcagtggtgggaaggaccagcggcccatgtaccatgttgggcccctgcattccaaggtgtctgcctagaaataaatgatagtttatttaacatacttgtaacttccaacgacaacacttcaagactgcaaatcatccatccgggcaattacagaaatgctgaacggccacagccccgccctggaatcaagggaagaagtgtggcagatgcttctggaaggctctgtttacagctctctgactccttcctgccagaacctttcacaagttcactaccaggaagctgagtcatccaggggtcagccggcatggccaaggtcaccccgcactgccagcagcacagatggggttagcccatcattccagaggagcatccgtgggaatgatggggttggggagctggggagcctccctgcagcatctccctgccatggtgttttgcatttcctgtagatttcgcagtgagaaacggtctcctcttatattcacttcatttcttctctctttctttctttcttttttttgagatggagtctgtctctgtcaccaggctggactgcagtggcgcgatctcggttcactgcaacctctgcctcccgggttcaagcgattctcctgcttcagcctcctgagtagctgggactacaggcatgtgccaccacgcccagctaattttttgtattctcagtagagatgggatttcaccatgttggtcaggatggtctcaatctcctgaccttgtgatccacccgccttggcctcccaaagtgctgggattacaggcgtgagccaccacgtccgggctttttttttttttttttttagacttgttgcccccccaggatggagtgcagtggcgcaatgtcggctcactgtaacctccacctcctgggttcaagcgatgctactgcctcagcctcccaagtagctgggattacaggcatacaccaccacacccggctgattttatagttttagtagacactgggtttctccatgttggtcaggctggtctcaaattcccgacctcaggtgatctgctcacctcagcctcctaaagtgctgggattacaggcatgagtcactgcgcctggccaaaggcaagagatgaggaccatatagatggaaacacagcattaagggtaaaacactctctctctgctctgtctggtgttcagggcccagcatgggctgtatgtcctacacttcgtttcaggctcatcttcaggtgacaccagccttctcggagcctctgtccacatcccacctgtcactacctctgccctaacttcaccttcagtggtcactgccaggacccctccccaaatctaaatgaggtccccctgcatttgccctcattgcaccttctacttttgcttcatggcatttagagtttggaattttttatcgataggatttttagtactctctctctcctctactagactataaactccttgaaggcaaagacgacacctgctccctcagttccagcagcccctaacactgcgctgacatttaggtagtagcagcgttttcttgcagaacgatcctgtagttttaccagctgagacttctgtggtctggggagtcactcatctctggtccctgcctcctcctctcacttttggaaacccttctggccagacggctttggtttaaattgtatgccggagctcttggttccagggagagggttttagcgtaaaaatctcactcatgatggaaggttcctgctattaccttttgcatccaatacaacttaaattgactcctccaaaagcttcggaagtaatttgtacctattgtctagcataaattcagcaagtgggtcccggaggctgaaagtcgagtcttgcggttgtttcctctggtgtttctccctgagacccttagaacggcaagcctggtgcatctggtgtcctgtcatctttctctgtgattgtcatcagtgtgaaaggtgaaaggtgtgtggagaaagaacatcccttcgagctgtggcttagagctgtgacttggcaccacgtggttagtcactatcaagttagaagcctttgtgggaaatctggctttggtaggatctgggaaatttggacccctcatttgccccctggcatctctaaattccagagcccagctttgatggggcttacatccccagctgttaacctgtggggtgggccccagactgtggccaggtgcattgcgctaggggagacagatccacagcaggcagaatttgaggaggacttaaaatacctgctttgggaggccaaggcgggcagatcccctgaggtcgggagtttgagaccagcctgaccaacatggagaaaccctgtctctactaaaaatacaaaattagttgggtgcggtggcacatgcctgtaatcccagctacttgggaggctgaggcaggagaatcgcttgaacccgggaggcggaggttgtggtgagccgagatcaagccactgcactccagcctgggcaacaagagcgaaattccgtttcaaaaaaaaaaaaaaaaaaaacacaaaaaaacaaaaacccgctttgttacctgcctgtgggtggaattgagttcatctctgaatccgtggtagtcatttattgagcacgtgttttagtgagcatggcatggcgctggctccgagatcacagtgctgccgccctccttcacgtttctctgacctttcatgggagtcacatgcagacgcatcacttggtataattatacgtggaggaatgagcaagaggaggctggcgacgggactgctttaaaaatcccttcttctgtggataataggctaatagcggggtgtgctttagaaggtgtggcctccgccaagggcgtgggaactgcatttgtagaagctgggaggaccacacctggcttgggagacggcatgggtttctgaggtgcctggctccctggcctgtccagtgtggacagcttacgcgcagctaggtgaaatgattgtgcagttgctgagggattgggtggcagagctggacagaatttaggtcttctaacttggaacagggctgtgtccatcttacctaggtgtacagtttggggagcactgctgtttggtctagtgagacacacttggtgtaaatatctgtgccctgtagtacccagattccaagggaccagagagcatgcccgcacccacgggctggcgggagcccaggtcctccagggctgctgtggagcatgggcttcttggtgcccagtcctatagctgaacttgggcggcctctggctgttgcccccagggctggtctccctatagttcagaggcgagccagctctcagcagcagggagggccttttccatagtatgaacttggccacaccagaccagtcagcagtgtcgggaatcttggccctcaaggtccctgcctagccctggcctggacttcagcactggtcaaaggtccccagagctgcccttggctctgagcaggtgagtgaacttcccagagcacttttgtctgggcctctgtgccagtgtaaactgataatagtgatttccctgccccacctctctgccagctatctaagttttctttgttacataatcaggattaatttaagcagcctaggccatccatttagaaatggttagtgaagaaaggtgaatggggaggggtcagagtcccttagggggccaccaggtgcgagtccccttgctctttggggccttggtttcccttctgtgagttggggcagctgaagggaagggctgctcaggtggtcctgccacatcccagtgttgtgtctagtgagtacaggtgagagtgctcccaaccagggcagatcctgctgctaggcagtgagtcaggaaggaattggtaaaaatgacgtcattgctaagaatgacgtcttttttgctgtttatccaaaggaaaaaaaaaaaagcagaaataaaagcagcaggcagctgtccaccagaccccatgcaaagggcttttccttgaatcctcacagagactttaggcagtaggtgccattaggagccccacttacagataagaaaacgggggcagagaactgaagtgagtcgcccaaggacacacattgaggaggaagcaacagagctaggatttagatacagaggggtctccaagcctgtccttccagctttgaggtcctgggcctatatattccatcagaaactgaaaggtgtgttggggggtacctagggtcaggatggggttttatttctgtcccttccttgtgatgctgcagggactgtgacctggagttcccaacaccagtgccctgtggctggtagcctcctcctgggactccaggatctattgtttgatttagccattttcttctgtagtccgatgggagggattcaattcaaacctgcaatactgttctttgggccatacaggccatttatcagcaagtagagaaaaacacccacaccttctagcaagattaagctagttctgtggttcttaatgataatttaagccattttgattaacctaggtggtggttttctccctaccaggtagggaatatactggagcctttctaaaaatagttccggtgaagataaacatttattgagtacctactgtactccactaggtgaatacaaggatttctcgttcatctcaggaagcatggttaggggattttacagacgagggaactgaagttcagggaagttaagttacttatccaagttcatatagctgaaaaatagaataggatttcgaccttgtggtaggtggaaaccggggttgtctttgtgctctcaggcatgtggctggcgtggggtagaagctctctatataatggttgagtgactggatgagcttcaaagctggtccctctggcttttcctgctaccccaggccacgtgcccagaaggaacgctgtcttacctgggaggtctttattgactgtttgacgcccttcccatcctatcccaaccccttccccatggcacctagtttccccaaccagaacgtacgttacttatgggcagagacggtctttgagcattgggtgggtggttgaacgcagtttctttgagattctgtgattgggattttcagcaaaatatggtagcaagttggtcagaggggcgagtctggcagtgggggagcccgggcaagtctaactgtttgctcactggcagaacaaagttggggaggttggaggggtaggggaactgaaagcaaaagaaagctcacagggagccccatcgtgcaaaaccgatgatggcagagctgccgggctgcagcgtggagcggggcgggagccttgtgtggagtctgtgaacatactctaggtgcctggatactcctcttatctccccacacatgggttgatgtgcatgtacggtgctttgatgtggactcttgtgttaaatttgttcttctgcgcagctttgtgacgcttcagtgagtgtgtctatatacaaaaggaaaacagttttggctgggtgcagtggctcacgcctgtaatcccagcactttgggaggccgaggtgggtggatcacctgaggtcaggagtttgagaccagcctggacaacatggtgaaacccagtctctaccaaaaaacacaaaaattagccatgtgtggtagcatgcgcctgtaatcccagctactcaggaggctgaggcaggagatggcttgaacccgggggctggaagttgcagtgagccaagttcacgccattgcactccagtctgggcaacagagtgagactccgtctcaaaaaagaaaaaaacaaaaaacaaaaaaaaaaccaacaattttgaggatgaggcatttcttccttacttatgagtgggatgtttatgggccggtgacattgacaaggctggcagagtcaaggggaggccctgggtagtctagcttactagcagtgaattcagttctctcttgaaagcaccgtgactgttggaatatttcagccttagcctttgaatactgacggagtgccaggctttcgtctgtcaagatgcccctctgtgacctcagctggttaatgtctcaagcgcttctttaggagacagaatgggttggtattgaaccaaccactattgcccagtcttgtgatgaccagggttgtggaacagataagttgtgtgacctccacgggtcagggctgttgactttgcctgtaagttacactcttgcagctgggcatagacacagtcctcaggggttttgtggacattaacaagtaaggatttaggtgactctgacatagggtcttccccaaggtcaggcacagaggaggtggcatccatgggacttagcatgttgtagaaacagagcatattgggacaaaagggaagttgaagatcacctgggatcctttagcgtccatccctttgtgagagataggatagcctagttgttaacagcatgactctggccgaccgcctggcttctttctagtcttccttctgtactttgtgaccttgaggcaagtcatttggtctctgtgcctcagtttcccaatttgtggaatggggataactggttgctaatattgctgtttttattgttataattattttgtaaatagaagggttgaaggttcagggaagcaagttgattgacctgaggccatacaatgtatcagtgccagatgcaggatgagaaagaactgtgactcaggccctgtccctcttaccagggcagggcaggacagggaagctgggcaggagagactggcagctcagttccctctccagtccagggtagtcccttccctttctgtctcgcagtgaggtcaccagttgcactcatgaaatcttagtcctgttatctggcatctttggaatttgccccacctgtagggcagagataacttaatcctttttggtgggccacatatgggatattctgggtgtgttctgggtacactgggcatgggccaggcacagacccttccatccattggaggcttttctagagaaggggtggagaccagattgggttcctagggtcgggggatgtgggaatggcaccctctgaactacaggcaaggctgggagctgctgccagtgggcggagagggaaatctaactggtatgtgatgttagtggtggcctggcaagcagctgtagctttggagagagcgaccagcctgtccaggggcctggtagggaaggcttctgttgcacggcctgttgctttctctcagatactggagagcccatctgtcttgcttactgcatggcttttcatagctcccatcatattgctgttgggtgcgattcatagccatggaagacacctgatcataaagtaaattccacacactccagcaaggtattcagggccttgcatggtctagccccaccctacctttcttccagcaaacaataattgatcatctaaggtggcagcttctctcctaagtctgaggctgcttctctaccctcacctgactgctgtcttctctgcacaccagaccttccggccacaggtcctcattccccagatgcaccagcatgttcacatcctcctgcagcgggaattgttttcttcctctccatgccaaatttgtctttttctttcccagtcaaagtaacatatgtacatagtcacaaaatgaaatagtgtagaagagattgtagtgacagctctaattcttacagcttgacatactcttcctttttctaggtggctgttcaaatggcttccttccagccaccttctccaggttggatgtgatctggactctggatctctaccctatagcacatcctgctgtgacctattccaaggagaaggggggtttggtgctggggcttctctcctaggaggctgaggaacttggttattgctatcttagcagaattgttattttctaccaaatgtgcaatgaaaactcttcactgagtcttttgcccctagcaatagcagtgcttcctgaagccccagtagaccctgaaggtttcaggactgtgtctggagagcatcagtgacaggtggcaggaatcctctgtggtccacttcagaggcggcagatgaccaggaggtcagactgtggctggtcttttcagaaggacaaacgtgacccttctgaaaactgggaccattcggggacattggtggaaagacagaggagcctttatggtttgttctcacacatatgaatccactttctcccccctccaacatcagggtgacctgaacgctgaaggaagtctaggccttcctgtaggtgaggcagggaaagccacgtagacctgatttagttgaagtgttttccaccaggtctcaactcttcattttgtcttggtatagcttttctggctgactttctagcaagctggttgggctctttgcttgttccaaaatggtagttttcaccagagacttttcagatgagcaggaagcttttttcagaatgtatgttcttctaactctgcttgagtcccccgccatgtattctgataggcatttgttttcccaccccatcccccacttttttgaagtgggggcaatgactacttttaggggaatcatttttctgttgctggtttcaaaacattaagagcaccaattttttttttttttttgcaacagagtctttctcaggctgaagtgcggtgacatgatcatagctcactgcagcctcagtctcctgggctcaagtgatcctctcaccttagcctcccaagtagctaagaccactggcacccaccatgcctggctaatttttttaaaaaattactttctgaagagatggggtcttgctatgttgtccagactgggcttgaattcctggcagcaagtgatccacctgccttggccttccaaagtgctgggattacaggtgtgagccactgcacccagctcaaattttccttttcattaaaaacatacatatatgtatatgtatgtatatacatatgtatatatgcatgtgtatatatatgtgtgtatatgtatatatgtgtgtatatatgtgtgtgtgtgtatgtatatgtattatatgtatattctctttgtgtatttatttttgccagtttgggagatgttagaaaaagacacgatttggaaacttcaacttagggataaagttagttatactctgagagctgcagttaaaggattatttgtgctgctctgctcttgcctgcgacgtgtgggaatgatgctgagtgatgtcctcctgcttattttgcgtgatttttttttgagacagattctcgctctgtcacccaggctggagtgcaatggtgcgatcttggctcactgcaacctccacctcctgagttcgagcgactctcctgcctcagcctcctgagtagctgggattacaggcgtgtgccactacacctggctaatttttatatttttagtagagatgggattttgccatgttggccaggctggtctcgaacccctgacctcaggtaatctgcccgcctcggcctcccaaagtgctgggattacaggtgtgagccgccacacttggccaattttgcatgatttttacatggcttttcaaagggccagggtgggactatccaaagccctgttaagagtccctcttctgccaaggagcctaggaagggagcaggtttgagtgaggaaggctggtggttttggacggggaacgggtggttttggacgggtagtgccaacggtttttgtgtgcgtggtgctccttgatgtggtctgggtttctgcatttgtagtgtgtgccttctaaggatgctggaaggtgagacagggctttccaaggcctagatggggtttgtggctttacttaggaagacagtcctttccataaagcgtggtgccaaatgcttttcctcctgggcctcctgctgtgatttgtggcgtggagtttcagtgagggagggctctgcaggaaccagctccttggtctgatcctttctggacaattgtggatgggagttggcttcttggtgtcttgagagtgtcctcagcagaccccagtgaagcaggagcatagagctctggatgggctcatggtggacatgggagagctgctggccagggggctgcagggtgaggcttggaaaacagggagggggctgggcttggccccgcattttactgtggtttatttagtgaatgtcagtgctagctggggacagttgacagacaagagaaaacactggtttgattttgaattctgaagcagacattgggcagcagaggctaacatttggcatttatcctaaactttcgaggtgcccgagccttatttcctttctctgggagaaagtctggaacagagacggtgcggagcagcctctagggctcagccctgggcccccctggagttgtgctgctcatggtatcacagtgcttgtttgtttcctgtttgtatccccattgcacctggctcaaggtaggtgtaaggcaaatgctttagaatgagccagtgagtagatttcacatgatcgtctcctcagtcctagaaatgccacgtgaacttcgaacatggaaagttttttatttttgagagattggagaggtgggagttacaggctgtctccaggtcaggcagggagtcagtggctgagtttctgatgctacagatggctggcttgggtggcatgacctctgcaggacccctagaagggcctgaggcccactaccaggctcagcttgcccccttctcttttcttttttggtcctaggcctggatcagaggctccttacccacaggatcttggacaagtcattttccttcttgggcctcagtttcccatctgaaaaggcaggggctgggctggatgtggtctccctagggccattgttgcttctgttacatgatcccgccagctcacctgggacagaacgtgcattttccactctccctcctccccgcagtgagagaacgggccagtgagacaggcctttcctgttttgtcatcttaggggagaattggtgtcaggggctgacccttcactttgttctagctttgctaggagtttgtggagacagtggatgcagatacagacagagttcatatcactgggagtttcactgtcctggagcagatctggagctggaggggacttgctcaggtcacactgggagtggcagtgtcaggccagagacccttgtctcttgattccccgggcaggacacgtttctccatcctgcaggcaggtgcagaggaggaatgcttattcataggcagcacgtgagggctcctctcagctgcttatttggcaccctctttcccctccaggggccagccacacaaccacctgcctccggcctgctccccacacagttgccagaggggtctttctgactctctctgacacctggatgttcttggcacttgctgcttcaagggcataggttcccattggctacggctgtgttttcacacgtgtgtttggtcaggtgtctctggttattaaatgagacaaggcttgcattgctaaagacagaggtttaggaagtgccttggaaaaccaagtgaaacaggtttctttccggaaggatttcccagaggctttagtatggtaatgtgcttatgcatttccaagaggggagaactaaaatgcaaacgtggaaactgattttaccgaacaggaggagactagaagctaggtcttgggcaggaactgaaacctggacaggaaaagaaatttgtgaaattctctgtctccggttgtgtgtgtgtgtgtgcgtgtgtgtgcgcgcgcgcgtgtgtgtgtttatttttaatctctgccctgtctctgcatcctgattcattcatttcctttttcctcctctccaccctcacttccttttcttgtatttttaaaaattgtagtaaaatatacataacaaaatttctcatcttacccatttttaagcatacagtccagcggcattaagtacattcatactattacacaaccatcagtgtcatgcatccacagaactctcctcatcttgcaaaactcaaactcctgtacccataaaacaagaactctccgtcctgttccctcctcaccccagcccctggctacccccattccactttttgtctacaaatttgactactctaggcacctcatatcagtggaatcatacagtatttgtctttttgtgactggctcctttcacttagcatgctgttgtcaagaactatctatgttgtagcctgtgtcagaattttctttccttttttaaggctgaataatattccactgtatggatatattacatcgtgtttatcccttcatctggtgatggacacttgagttgcttccactcactcccagatgttttttcccctctctgatcctcaaggaatagaaaatgcccagccttcatttttacattttacaggtagtggagctttaaaaaagagagtactttgggaggcacagataggagcatcacttgagcccaagagtttgagaccagcctgagcaacatagtaagacccagtctctacaaaaatcagctgggtgtggtggtgcgcacctgtagtctgagctactcaggaggctgaggtgggaggattgcttgagcccaggaggctcaggctgcagtgagctatgatcgtgccactgcactctagcctaggtgataggtgagaccctgtcttaaaaaaataaaaataaaaaataaaaaagagactaaattgattattgtctctctggctgtggccacttctgcctgccttcctagccgcctgccttctgcctctcttgcctctcctgaggctgctgcagggttgatccctccttgcctcttccttacactccttcgaggcaccctggtggttcgtttcctcctcctgttatcatacactttccttgtttttccccattgttttttctcctctgtatcctggtgccaacctcagtgggtgctccctgcaggcaggtggaagaaatgatggtgctgcaggatgaatgaggctctggccccaaacttggctgctgtgactgcagtggtcccagcgggggcctgaccaggcccatctctgcgcttctgggccacttgcctctgtctggggcttgtgtcattaactaagacctgcccttgagtaaaccaccctgaggacagagaagtccactgaggtgcggtgactgaggcagaactcaatcttttagaggtttattctatcagggttgaggatgcaccggggaaaagaaacacaagttatagtaggatctgtgttctgtgctttttccaaagagggctctggtaacgtcagtatttaaaggggaaagagcaagcaggagggagagaagaaaaataaaagaaggaagggtaggcattaggcaagtggtaccattcttgtgaggctctgattagcacttagtgaatctgcattttacatgtgaaaagaagggagttggggaaagtgaatcatggtcttgcactcagtaaatctacgttttacataagataaagtaagcttatgaaattagagctgtctgtttgggaacaaaaagaaggtcagtttttgcatgactcacttcccaagcttaactttctttttctttgacatagtgagtttagggccctgaggttttatttttctttcacagcacaaagatacccagttgacctttttttttcataacagaatgatgcattttggttcagtagtgtttcctccaactgctctacccctaatttaaaaaggggagggggtgagaaatcagtcccaaatgtccctgtaagttttggtgtgatgccagcctccaactggctgacatgagcagttttgtaaaggagagaccctcttgatggcttcacgtatatcatggggtgggatggggacagtcattattgacagccagcctgtgccaagtgtttcccagcagctctctgggcgattattccagccaaggatggccatgccctaaggttaaggaacctgcttgaggtcccagagctggaattgagattgacaacctcaggctgggtggctgtacagcctgggcactctctgtgccccctgccctcactcagccactccctccataggtcaccaggggtaattccctactgcccaggcagagggctggggctggaaggggtctagatggtcacttagtggttccccaagctgagtcctgatcaaaatcatctggggaattttaaaaagaaaaagaagacttgaatcagtgtgtgctagggtggtgtctatggatgggtattttcaaacatttcccgggtaactctgatcttcagcccctgctctgatcctccctttcattttccagtccaggacactggggaccggagagatgagatgccgtgaccaaggtcactgggttgtagccagagccagcatcaggtccaaagtgcgatctcagtagccagttctccatgctctgtgtttgttcagactgccagccctgctcaatggggctctggaacttaaggaaggcctttgaccataggctgggcttgcaaaaccttggtaggaccctgcccttggctggaaacctcagggctccagccagggctcatccccaagaagatacactgccattctccaaagtgtgggggcctctcccctgaagggcgctgcctggagccacctcttgttcacaggcccatgttaggccccctgggacaggttgccttggctccatatgtggttctgcagatcacacccaggcttgagaaatgcggtgacacgtgaactttgcattgatgtgaaaaggtccaaattaaaggtgatggcaagcacagctaagtccaagaaagtgtggctcctatttaggggtggtgggctaagagacaagacacagtaccctttcaccccggtgggtattctaagttgggttagtttgttcatcaattcattcattcaacaaatatttattgggttcccaataaatcatcttactggtccttggagatctgctgtgaacaagacaaacacaaccccacctctgtggcctgcacaaccctggaaggtcacacactagaaccctatcacttggcctctccatgaatcaccgtcatgtagcccctcgacaggggactcttgtgttattactgacaatattgatggttttagacacatattatcccatttaattttcccaaccattctctcaagtggggaaactcaaacttagaaagtttaatgaccttgcccagggtcacaccatgagtgatggcatctgaattcagccccagttctctctgattccaaagctggggttcttgacagccacattgtaccacctggtacccttgctttttgtcaggggcaagtataagaagaaggcaggtgacacgtgaagctttatttgctctaaaacttgagcgatttcatatgtcctaaaggaggagttttgcctcttccttcccagcatgaacacttggcatggtgtgtacatcttcattcgtttggtctggccaacagccactcgggagctgaatgaggtgttgtgaccatgacctgggtattctcttggttcagataccttcttggttggcacattcactttctcgtccttcccttggtctttcttgcttataatatatcccttttttaatttttaattttttttaagacagggttttgttctgtcacccaggctggagtgcagtggcacaaacatagctcactgcagcctcaaactcctgggctcaagggattctcccacctcagcctcccaaatagccaaggctacagaggtgtgccgccatgcctggctaatttcttatttttttgttgaaatgaggtctcagtatattgcccaggttggtctcaaactcctggcctcaagcaatcctcctgtcttggcctcccaaagcgccaggattacaggtgtgagccatcacacctagcctaatgtatcatcttattaaatcagatcaaatcctttttgaaaagacttaaaattgaaatcactttaaaaaacgaaaggatgcagggctaccctccctgggaccctggggcccaggtgtcttggcagctgccttgggctgggccagaagatgtttttgccagtctgtggtaggaaaaagggtgcagagtagcgagtttttaataaagctaaactggccgggtgcagtggctcacgcctgtaatcccagcactttgggaagccgaagcaagtggatctcgaggtcacgagtttgagaccagcctggccaacatagtgaaacccaatctctactaaaaatataaaaaattagctgggcgtggtggagggcgcctgtaatcccagctactcaggaggctgaggcaggagaatcgcttgaacgtggcaggcggaggttgcagcgagccgagattgtgccactgcactccagcctgggcaacagtgtgagactccgtgtcaaagaaaaaaataaaaataaagctaaatctaatttaaagtaccattttataatcagaggtagtcttccttacttttttttaagcattaaaaatgccctttcttttacaaaatcatgtttgtggtggagggcagtggtgattgttgcttatattgttattgtttttgcgtcctttctgggcaaaataaaaagtttgccttggtgtgtccatttcctttgtggttttaatagctggtgaaatctgaactatgaaaatgaccactaattcaggtgattggttttcaccgttcctccaagccctggggtacctggggctctctgtcccggtgagtgagagggagccccagagagtcctttgcccatcttcaatcagagaagccctccttttttatatgtaggattagattttttttatgattttgtttggagataaaaggatacccctgccaaaagttgaaaagcttctcctctaggatgtgtgttgggggggagtgggggagggagggagtcggggagggaggaagggaagggtgggaggaaggaaaggagggaggcaggaaagaaggaagggaggaagaaggaaggagggaatgtagtgactttggtgggactgagccatggtggatcttctacttggcgagtatttcttgcctatatactagtcagagttctccagagaaacaggtaataggatgtgtaaagtctacttgggtttgtaagaccagcctttggttgaagaccttccttgggtcctagcagacagaaaccaggagagacagagacatctatatccggctacatagagaggttatctgtctaactctctgcctgttctctatctatatctgtctgtctgtctgtctgtctacctacctacctgtctctgtctgtctgtctgtctacctacctacctatctaatctacctacctacctacctatctgtctgatctacctacctacgtacctacctacttagaaattgagagatttactttgaggattgacccacatgattgtggggactagccaagtccaaaatctgcaggctggagatttagggagagctgatgttacagtttgagtctgaaggcagtctggaggcagaatttcttccttgagagagacccagtttttttctcacgaggccttcagctgattaaatgaggtgtatgtacccacagtatacaggttaatctactttattcagagtctactgatttaaatgttaaactcatttagaaaatcccttcatacatacatctaaactagtgttagatcaaatatctgggtactgtggctcatccaggctgacccataaaattaaccatcacacctgtgcaagcgcttttccctcctggatggtgtcctagggatgacagaggaggggaaagccaggtctctgcttcaaggagacaaaattatgcatacgaagaaattaagaatgctgctgtgtctgtggagtagccattcttttattcctttactttcttaacaaacttgcttttacttaaaaaaaaaaaaagaaattaagaacaagaccatttatatttaagtgccaacttatgaaatgtaaaaagggatttagaggtgacaaggcaagtgagggctggaggatttggagagatttcatggtgtagggactgaataggagcttccagaacatggaggtttcagataagtgaggacacagaagtcttcacaaccagagtgggcaccacaggacaattctacatctatctaggactctgagtttttgaagggtttccatatgcattgtttggtttgctgcttgcaacaaccctgttgttttaactgaaggtcttagggcctagggattccccagaggccacacaacttgccagtggcaggggaaggtcttactcttccacagccttctctgtctttctccctttatggagcataatgaaatgtacgtgcacacattcatgtagatttcattatgtccatgtagaattcattttgatttcaaatatgtttccttcccagagaaatcctgtgaaactatgacattgtttttctctctctccttctccaggtcttattttccttctttaccatcctgattaactctatttttgtttgttttctcttcttgcccgctcccagacacgaatgcagagtttgagtccagatcccaaagcccagtacacaagtatctacggagccctcaagaaaatcatgcggaccgaaggcttctggaggcccttgcgaggcgtcaacgtcatgatcatgggtgcagggccggcccatgccatgtattttgcctgctatgaaaacatgaaaaggactttaaatgacgttttccaccaccaaggaaacagccacctagccaacggtattttgaaagcgtttgtctggagttagaaagttctcttcttcaacacgtccctccccagggtgttcctccctgtgacccagccgcctcgacttcggcccgcttgctcacgaataaagaactcagagttgtgtgtgcaatgcacacccagacacacgcacgcacacacacgcgcgcgcacacacatgcttttttctgttcccctccgctttctgaagcctggggagaaatcagtgacagaggtgttttggttttattgttatgtgggttttcttttgtatttttttttgtttgttttgtttttaaacattcaaaagcaattaatgatcagacataggagaaaccctgaatagaaacaaaacttttgaatgctggattcaaaaaaaaaaaaaagttatctggacagcttctttgagactatttaaaaactggtacaacaggtctctacaacgccaagatctaactaagctttaaaaggtcaagaagttttatggctgacaaaggactcgcgcaacgcagaaggcctttcccaccttaagcttccggggatctgggaattttacccccattctcttctgtttgtctgagtctcatctctctgcaagcaagggctgaaatcattttgtttggttgttttgagggagagaggcggggtgggggggtgcaaatctgccagcagctcttacgtaaggcatgttttattggggagggctgagcttttattttctcctctccagtggggttggcttttattgtttcttgtttgggtttggaatggaaatatggatagcagcataaagtacttttattttgacaaaattcatttttttcaacaatggagacatagatttgacccacaataacttctccccctctctttttactctgctcaaaaagcatctctcctcccattacccaaccttggtcataagtgtgcctggctggtttgcagatatttgttctgctttgtaaaaattggccattagtgcatttattgagatgatctctaaagagctatgccctgacctacccctgattctatgacattggggcccttcttttgctgaaactgccttacgtaatggttttactccttgaaagagatttgacggaatccattttatgccaagtgctgccctgcactgtttctgcaatatgtggtgtatgctgtggtgatcttgctgggaatgattataagtgtgtgtgtggtgggggagtgggtattacatgcattgctgaagagtcatcctggtgttcctcattcctcccaccttcccgtggtcattttaattacggggcagtgtcaccgcaaagggaggaaactcaaagccgaaagcaaaattccaggcctgattctggcttttgaggttcctggttcttgaagccaggcctgacccgactctcagatggggtcagtcccgtcgctttgcagactgaccctggaaatctacaaaatgcagattttcctgatttcctcttctcttgcccagttttttttttttttttttttttttttttttaaagcctggattgtaaccagattttcttttttcccccttctcagctgtagatatgatatctcctttcagggccccagcttaagggcaaagtgagttaatgtgtagacaaaggcgagggacaagagagagttaacatctagacagtggaaaaagccatggtgtgtggtttctgggaaccaccaacacttgcaggtttagctttttcccagggttgactacaagaaagaaaaccatgtttttgcaagattaaaatgtggttgagtgtgcctaaattaaccatccccatttttatcatatttccaccatcacttcagggttttaagagtcagtgctcacctgggcggagctggtagtacattttgcttcttagaaagctaagtcctgggttccgtctgattttaggttccaggaacttcctgagaacacccgatcgcagagggtaattttctggagtttgttttgcagggatagctgggagtatggccaccctgctccacgatgcggtaatgaatccagcagaaggtaatgtttcatggtcccagggaggggcagtaggggatgtgcaaaggggcacaaaaaatggttgtgggagagtggagaggactgaaggtgggcagagcggctcctagtctccagtcagagcagacaggagaattgaattttttactacgttatcaaaggcctcaagaaaggacgtgaacataagagtttttggtattcctgtgctcggagctactcaaagtgtgttctacagaccagcagcatcagacatcttgaggggtgttggaaatgctaattctgaggctgggtgcagtggctcatgcctgtaatcccagcattttttgggaggccgaggtgggcagatcacttgaggtcaggagttcgagaccagcctggccaacatggagagacccccatctctactaaaaatacaaaaattagcctagtgtggtgtgtgcacctgtaatcccagctactggggtggccgaggtgggagaatcgcttgaacccagcaggcagaggttgcagtgcaccgagagtacgccactgtactccagcctgggccacagagccagactccatctcaaaaggaaaaaaaaaaaaaaaaaagggaaatgctaattctggccggcatggtggtttaaaactgtaatcccagcactttgggaggccaaggcaggcagatctcttgaacccaggagttcaagaccagcgtgggcagcataatgagaccccgtctctatgaaaaatacaaaaattagccaggtgtggtggtgcatgcctgtagtcccagctgttcggaaggctgaggtggaagaattgcttgagtttgggaggttgaggctgcagtgagtcgtgattgcaccactgcactcagccagggcgacagagcaagactgcctcaaaacagaaaagaaaacaaaggctaattctcaggctttacaccgaacctactggatcagaatccctggagctagggaccagaatctgtttattggtgattctgttgcatgcttttgcactattctaaaacctatgtgtgcatacacacacacacacacacacacacactcactctcttagcccttgttaacccttatcgatcctagacaaatgtatggggaacccatcagaggctattctttagggctagtgttcaatttgactgtttttaatatgaaagattatggatcacatttcaaacagatgtgaacgtggagagaataatacgatgtaccgcagtgtgtccatcactgttcttcagaaattcacattgggtcattttgttttagccatctctttccacattatcttctttttgttcttttaaatttcgggggtaatatgaagcaagcctcagctgggcagaccagagtctgttccctttttatatatcccggcgtcttagccgggtactcgtgtctgaatagtgagtaccttttgggcctggcactgggcaggccttcagctgggtcattctctacctggcgatggctttaggtgagttgtggagctcttttcacctttttgcctcatctgaaaatagttcctggccagaagggagaattggtgagaaaagtttcaacattttaagtctcatgctataagtttgcctgtcttttgtctttcaaggtgaagctattaaatttgttctcagctaccctccatgtcctagcagatagaggacttggtctgaccttcagggttgtgatggggcaggttgggaggtgggcggggagtctctgtggtctgggtgctgaggttgacccgatgggcaggtgaagaaaatcaccttctccattccccttgatttctttatcgtgtgccgcacgaggcatgctgaagggacacacacctttccccctttttatttacaaagtagagagctgagaaagacagctcatgttctgttttgttttgtacacattatctttctcaagagatgtgatgtccttaagtaaactgacctgccttcatggcttgtcctgtaatgaatgcgttcaagacagtgttttggggacaggaaagaggcattcttaggtaagcggtggtggggggtggggtggggtggagaggaaacccttctaggaagtagttcaatgaaaaacctaaaaatgcccaaataaacattcgcttacatattatatatcttgggcttctttttatgacagttcattcagggacccagtcagtaaacaggtagttaacttcgtgtaaccaagcaagggttttgtttatcttttttaaagtagaaaaaagtgaggctcaaactctctctttctccttgtcataactattggtttacagtctttatttgtttaaaagtaaagcacattgtatgtatttatttggcaatacatgaggccattaaaaccctgagcctaaggtaccacagttagtctcatttgcctcttgtcctgtgaactccacttagaatgtcattgaacttgggcagacataattctagtgtctgttccaaacgcactgtgtcacagaagctagaattaccattagaggcacaaacccctgagaatacacaagggggcacgcttccagtagatgtgttggggaaggaggagggcagaggggacaggggacaggattcagctttgtggtgggtcctgagggttcctaccaggggtagccaggatctgggaaacagatcagcgactctagtctgaagtggctgcctggttcgggggctgccttcagcaagattcaggcaggagagacggaaatagccaccttccaggcgtgagtcctggagataaaaatggattttaacctaggactgccgggagctggccctccgcggctgctcagactagggctgtgtgtgctggctctcgcctgtttccggtgtctaactggcttgtttctctttatggcttggcttcattccgacctggggtggggccacatccaacccactgcccactggctgtccgtctggcctgccccgcggttccaaccacagtggtgaagcagcgcttgcagatgtacaactcgcagcaccggtcagcaatcagctgcatccggacggtgtggaggaccgaggggttgggggccttctaccggagctacaccacgcagctgaccatgaacatccccttccagtccatccacttcatcacctatgagttcctgcaggagcaggtcaacccccaccggacctacaacccgcagtcccacatcatctcaggcgggctggccggggccctcgccgcggccgccacgacccccctggacgtctgtaagacccttctgaacactcaggagaacgtggccctctcgctggccaacatcagcggccggctgtcgggtatggccaatgccttccggacggtgtaccagctcaacggcctggccggctacttcaaaggcatccaggcgcgtgtcatctaccagatgccctccaccgccatttcttggtctgtctatgagttcttcaagtactttctcaccaagcgccagctggaaaatcgagctccatactaaaggaagggatcatagaatcttttcttaaagtcattctctgcctgcatccagccccttgccctctcctcacacgtagatcattttttttttgcagggtgctgcctatgggccctctgctccccaatgccttagagagaggaggggacggcacggccgctcaccggaaggctgtgtgcggggacatccgaggtggtggtggacaggaaggacttgggaaggggagcgagaaattgctttttctcttcctccctgggcagaatgtagcttttctgcttcactgtggcagcctcctccctggatccttagatcccagaggagggaagaaaatttgcagtgactgaaaacagt

SEQ ID NO: 15819 - DNA, 42799 bp, Homo sapiens
gacagccgagatggcggcggcggcaaggacgccaccgggtcggaggactacgagaacctgccgactagcgcctccgtgtccacccacatgacagcaggagcgatggccgggatcctggagcactcggtcatgtacccggtggactcggtgaaggtgaggcgcggggagacttcggggacgcaacgagcggagaaggagcgcgcgcgcgcatttgcatcccgcgcgccggcagcctcggggcagcgtcccgaaaccgagctctccccaggaccgcggctggccggggtcgccccaggagcagctgcgcgcagcctgggcgccgcgccttccgccgaccccgcgagggtgcccggtcctcgccccgcaccgcccgctgctccagccgcgtgcccggccccggctgctggcggcgctgaggcgggggaggcggagtggcgagcaccgctggcttcggcggcgactgggctcccgggggacgcgatcgctgaagctctgcacagtcttaccacgctggccgttcgggctggctggggccgcccacacgtgcgcggtttccgagggagctccccgcaggggaagccctcaccacgctggagctgagaaacgtgtggccctggcccggccgcgcgccctcgggacttggtgtgtggctgctgctccccgggttatttcgggaacttggggccggcaagtcttctctcgactagtggcagctctttaccggttcgacagcggcccgtgggatcccctttctgagggttcctgcacttcttcccccgactttgggtcgccgagccgccgggaggcaatgacgtttgccttctccttttgcttgcggggaggtgggtgggcttgtgccttacagcccttgctgtggattgtgtgagaggcactcagtttcctttaaaccctgtctgtcacttgccccggtagttttaactgcatttctgtaaagaggcagcgttactaggtgcgttttgcctggtagactgagacctgccctctgtcagcctgcccagaacaccccagggccaggatagagtagtgcaggaagtaatgccagtattgactgttacacgttgcacttttataggcataactcgcctaattcatgcaacagccctgggggttaacagatgaagaaactgaggcgcagagaggcgaaccgattaccttgcccaggctcctacaccacctcctatcctctggctgcagctgcagtgtgctttggaggattcggaggcctctctaggtggcaattattttgcaaggcaggtcccacagaggcacccccagcagctttatcttgttgctgatgctggtcctgcatgagcaggtatgaaggccagaaagtataactcagagggttttcccggctccggggagctcgcttggagccagcagtcagtgtctggacaggcagaagtccagtgaggaaagacatgggcttccaaggtgctgctggacctaagcctgagccatcacccatatgtccctccagtgtcccagtggggagttagaggaatggttctcatctccaggaaagacactggactgataccaggtggcatttgtatgggaaagaatccctcaaatgtaataaaattctccatgattgaagctgttgtctcaactgccctgggcagagtctggggaaagttaggagcagggaggtgttatctgagcaggccctagtcctactggtgtcttgagatgaatgttctattcgggaaccccacagtgagttcactttagagcatcattttagcttatttttaggattagaaataattagttgtgccttctgagcaccctttgacactctcaagaggcgtttctcacacgtttaaattgtgtgatctgtgtttagtttctccctgccccatacatgttgatatgttttggttcagatgtcacctgtatacttagtattactttccatagcagttttcacctgtggacaggttaacatggtgtgaatggtagaaggagccggtctggttttcctagacaagtctgtaaaacaaggcgtgggttagctaatcagtgaagtcttctaggttctgggattataactgacccttaggggcccttccatgctgaagtgtgcagggttggttttgaggctgccactgagtgccaaggtctgccaacatcagcacagttgtctgccaagcatgaggagtcaggggtgcatcctccatcatggaaaggcttgggggagaccacacctgtgttcctcttaagtattttggatgatggcgaagaccgggagtaactgagtcaagaaacccgggttgggcttcaagccctgctctcacttgcttcatgcctcgggcactgttctgtgccttagttttgtcactataaagtggggacagtggacctgctcagtccctctccacatttttaacccatgcctcgtttctctgaacacacaacacccatcgtcctcttttatgttacttgaaatatcaaaagaattattacagctgaaaacaaatctatgtaaatcggatcttgaaagagagaaagctttctccagttttgaaaggcgccatttttaactttgatcttgtaatgacaaataagaatgttgaatcggctggcttttttctatcctaggtaatgtggactgtggagctctgtgctggtcactttcaaccctgaacctgatgctacttattttgcagttctaagtgcaaagtcggcctggtggatgcttcccattataatattaaatttgcttcttcgtgaggtcacacctcacatccccagtgtcactttaataactagtgttttttacatggtgggccatgacccattagtggactctgcatttaaaaataaataaataaataaaagaagttattagtgagagtgtaaaaatacgggtgtgcctggcatgcagtgggagaaatgttgaaattctgtttgggttgtgtgtgtgtctctgagtgcattttacagacgtgtacaatgtacttctggctgggagttgtggtcaaacaaatatgaaaaccactgaacctgagaaaatatctctggagccccagcaggcaacactgagattatgaaatgggtatttggaagacctttggcaactttcctgctgcttcctgtgtcttcttctttcccttggtcctcccatggtgggatgtgagcactcattcatccataaagggccagtctactgggacctttggctgcccctgcgatgacagtgagcagcaaagtgatacccagggagggagtatagggtctctgcagggctctcaccaaatggtggcaatgacttactcctgtctaggcggggtctggtggcaggttttccatgagcctctttctggtgttccagagtggcaaggggcacttggggtggatacaagaacccctggtctgatcaggagagctcaagacttgaggagcatgccaggtgggtggaggaggaaattccaaccagattaggcacaccactcggagaccatgccgagtcccgcctggggaaagcaggggcagaaggaaacaggaaagatttgaagccgggggacttccgctgaccctttcacaacccttcttttgctttgctgttgggggaaaccctgcctgtgactctcctaggatgagccctccttcccaggttggtgcaccacggagcgttccctctaggagcctcctggctgaccttatggtgtgcacagccagcctgcccagctcagcagagcattacctcaacttctgacttctcctcttctgagttttctcctggctgcaggcagactggtaggaagggtgctggggggcagtgcaggcagctgccagagtcccctcccacccacttcattgctttccaaacaaagtgcagttcggtccatgccattcagcttcagaagggcgtgaaatcccaaattgctctagttcctgggacaaaactataatgatttttctctctcccttcttgtctcctctccctcacatccccctgctcccttcttttctctcctttgatgagaggtgattttcttaaaaggcgaatttggaacgaggaatcaaaaaaggggtatttgtgagctgcagtcctgttccttgtttcatgaacccccaggcagccatggcctgtacccctcaggcctaccctgaggagtgtgagaacctcatccacttttctctgccctaaattggggaggggcaggctggagcgtggtttggaggcgcgtgcccaagagtactgtgaacagcaaagggggcctcagctttttagtagggagaggtatttggggttgaatgggaggatttaatcagctgctttgcttaaactatacaggggtgtgcacctggggtgggggatgtgcgtgtcacctggaagggaggaatgtgcttcccaaaccttttcctggcttccacttgggcacgtttcagctgcatgtggccatctcattagagatgagttttgtcctgtcttgcagcagtgaccagtcttggggaatcagttccactttctctgttttttagtcttgggcttctgactctctctgacttcaggggtttccttcttctgactcatcggatgaactcacctgctggtgtggaagccttcagcatctttcttgaaccccagagctttttggctcttttcctgtctccactagtacggaaccttttcttgtcaaagaatttgtgtttttgtttttgtttttaatccgaaataccggctgtcatgtcccatccatgctggccacagacatacccctgtgatcatggtgttggctggaccatgccaggatgcatggctttgccactcccatgcccaccttgaatgttgtgtctgatgtttgtcataggaggggtatatccaatctctttctcttttttttctccctctctctctctttttttttgtttttttgagacagggtctcggtctgtcacccaggttggagagtagtggtgtgattgcagctcactgcagccttgacctcccagggcttgagtgatcctcccagctcagactcctgagtagctgggactacaggcacatgccaccatgcctggctaatttttttgtatttttttgtagagatgggggcctcaatttgttgcccagactggtcttgaactcctgggctcaagcgatcctcccaccttggccttccaaagtgctgggattacaggcatgaaccaccatgcccagcctctttctttttgttgaactggaaaccttccctaaagttccctcaaccttccctcaagttcctactgagatggatttcccacccttagagaactatcttggggttcaaattccagtctttgacttactggttgggcaggacacttagcttcttcatgtccttacttgtcaaatggggatcctgattttcttcctgctttctctttcctgacccagctttccattgcttctttcccacttctctcatttttccagtgggccttgtggaagttccttgttaacaagctcccttacatcttcccctctttaccgaatgtttctttcacttccccctcctgatggaaatccagctcctcttgctaagggttgggagcatggacccttgagtccaaatccctggaccgggtcccatttcccagttaggtgtgaccttgggcaagtttcttaacctttctgtgctatttccctatctgtaaaaagaagaagagatggtaccgatctcccagggtggttgtgaggagggttaagccctcgctgcacttcacatgcctggtacacgcacagaacagttgatactctctgatgtctgctctcatctttatcttcatcatcatcagcatgattgccatcactttctctcattccctgaggactctggcatctgatgcacagacttcacctccacagatcccgtcctcaccctgaggatggcccctcttcgtccccacccgactcaagtccaaatcactccattccttacacctctgagtcaatggccttcacctccatggtcccttgacctaactcagaatcttcctgagatcttaaatccagattattatagcctggaccccaagattgactgctgcagctgctggggcctttagtttctctgcctttggttcttccaaccctggcttgccccacctgggtcctggacagcccatctgtcccttgggcagcgaagcccttcaggggacattcacactgcctccaatgcgcatgctccctggcctcagctccacatgtctgggcagctgcttgcatccttcacgagggtcctgttgccccttagctccccaccctattgttgtcagcctcagcctggcatcttgcttccatgtcatagggaaaccaggacctcaatcaaacccatcttcctgtcactgtccttccaaactctcttgccttctacccccactataagggaacaggtgtcttcattcctttaaggtatatcaatgtggcagagaagggagatgtatacaaaccaccttgacaccaggatttgaatactggctgcacacctgggcacattacctaacctctctaagctcaggttccttctctgcaaagtggggatatgaatactgtattagtctgttttcaagctgctgataaagacatacctgagactgcgtaatttatacagaaagaggtttaatggacccacagttccacgtggctgggaaggcctcacaatcatggcagaaggcaaaaggcacatcttacatggtaacagacaagaaagaggacagaacccagtgaaaggggttttccccatataaaatcatcagatctcgtgagacttattcactaccatgagaacagtgtgggggaaactgcccccatgattcaattacctcccactgggtccctcccataacacgtgggaattatgggagccactattcaagatgagatttgagtggggacgcagccaaaccatatcaaataccaagagctattttatagggttgttgtaagaattaaatgaggcaacatatgtaaagttcttgccacagtgcgtggtgcgtacgttgtcaataaatggtgatggtgatgtcatttttgtcccctcactcttgagtgactcggttccaggatctttaggcttcctgctccattgagtttttctcaaaagtgtttctacagatccaagcccatcctgtcttaaataaaccccagacttctcaccttgacctcacatgcacccccaatgtttcttcccataaacaaactgttgcccctttttttcctccttaaaacaacacatgttctgaaagaactattgacactggtctctacttcctcactgccacccctgcttcctggcttttgcactgcccagccgcagcctcacagagacttctggctacccatcatcttcctggcccaccctgctgcctctgttcctgccaggggcacctccgagagggggttggccctgcgatcctcagttttcctctttgggcatggcttctcctcaggaatgtgcccttccacctcattttccccagcacacatgcctcagtttcctcctgggacctgatggctcccagatcactatcttgggcccagactttctggagctgaatctccagttgcctcggagcctcctcagactcagtgtggccagaatggtggtcctggcttcccctcgggcctgcccttctgcctccttctgcaccctgggatggtcatcagcttttctcccactgctgccctgtatgcagggaaggcctgcctgtggctgtatctgtagtacttcttgaatgtgtttccttctctccctccccacagctacttactgccttggttcagggacctggatgtctcctcttccttgagatcccagactgcccaagttaaaagtgagtttaggccgagctcagtggctcacgcctgtaatcccaataccttgagaggccgaggtgggaggatcacttgaggccaggagttggagaccagcctgggcaacatagcgagaccccataggtacaaaaaataaaaacattagcttggtatagtggtatgcgccagtggtctcagcttcttgggaggctgaggtgggggaattgcttgagcctgggaggtcgaggctgtagtgagctatgattggaccaccgcactccagcctgggcaacagagcaagaccctgtctcaaaaaaaaaaaaaaaaaaatgagattactctcccctgcctcacatttccctattgcccattgctgctttgtttttctccccagcagttgttacttcgtaacacacaccatcgtttatttatattgtttacatattttacttatatttatagtattatttgtattgtttatggtctctcttccctcatcagaatgtaggccccaagtgggcagggatgtatgctcttctgttcaccactgtattcccattgccagaaacacagtaggtgctcagtaagtatttgatggaggagcttctgcagttcattctgcacgtcagccatggctggtcctgctcttcagcctccaagcccagcagcttcctggtgggctgcagttttctcatcggaaatagagaagagtagcagtgccgattctgcctcccttgcaggtcgttttagtgcatctagttggaaaatacaggcaggtttgcagggaacacagttttcaaagtgtaaagctcagtgcaggtgctaggtcatggtgttttttgtcacactgggatcctgcgggagaggtaagtttagctgattggagtggaagatccagcccattcttcgtggtgcctgccgcagagcctgcaagcctgcagaaagacagggagtagccacgtctttctgtagttcacacctgtgtgtctccccacctgataatccctcagcacttctgtttgccttgcatgtaaagcccgacctttgcatggcaggcacacagactgaaactctttcctcctccagcctttcttggactcatccacagaatgacaaagaagtattctgtgaatattggttgaatgaaggaaggcacggctttttaaaaaagatgaaaaaaaaaaaagttatgaaaagctttaaaacttgctattggctgggcgtggtggctcacacctataatcccagcactttgggaggccgaggcgggcagatcacctgaggtcaggagtttgagaccagcctggccaacatggcaaaaccccgtctctactaaaaatacaaaaattagctgggcgtggtggtgggtgcctgtaatcccagctacttgggaggctgaggaaggagaatcacttgaacctgggaggcggaggttgcagtgagccgagatcgcgccattgcactccagcccggacaacagagcgagacttcatctcaaaaaaaaaaaaaaaaaaaaaaaaaaccagaaaaaaaaacttgccattaaacaaattccagttttgatttttgttttgcattggttttgaatccatgcatgttatggccacaaagaagactttcttggctccgttgtttgtcgtgtgtgtgtgtgtgtgtgtgtgtttgtgtgtgtgtgtagaacccagcaagcagcagctataccccgatgaggcaatgtcttcatttggccactcatgtcattccacgtttcctgagtgccctcttggctaggcactgtgctagacactgggctacaaaaataagaatgcctggtccccgttctcaaagtaagcgtgcttcctataattagaccctgagctaaggcgacagaaccagctccctttcaagacaagagtcgcctgtcttgacggactttcagatgggctggaagaacaaggtctggcgtgtatggactctgaactgctcaagctgctgccgtcttgcaggtctagagcctacagggtagcgtcattctagtttctttgctgggcactctggaatttgttctttctcctgcgagagacagtggtcctcagttgtgttccctccccaccatcctcaccctccctcccacggtggttagtcattctggaggctcaagttggctcacagaaggtgctcttgaaaacatcccccaccctcctcgtaaccccagacagtcaggaagggccgttgtcgggtactaagaggtgttatggtttcacattcatgctttctctctgaagagaaaacaaaacatgttgaaatagggagaaatcccagcagcagcttgcttgaagcaagggttgcataacaggtctaggaaacgtctggccgtgtgggtcaagttgagggactgcagccttgtgtcactgagggaacttcttccgggtccaccgagcctctggatccattagatccatccagagagccacttggaaggctctgggaccttgagttctggctggccacgtggtctgtgatggctgtcactggtgaaagagagaccctggctgatatttagccaacagtgtttattccctggcatgaccagaaagggtgcatttgagacactgctgtgggtgggggacccggaggagtgtttgtgtgtcagacttatgctggtgttgaggccctagaaaggtcaccaaactggggcggggtgtgggccccgtgaatttaagtcctggtcctgccattaaccagcttggaaaccttgggctaatcatttctctgggctagttttctccttgtgaatctagactagtgtcatctactttacctttttgacagggctgttgggaagcttaggtgagatagatttgtgaatggctcttgcaaaccttaacatgcaaagctaatgacagattgtatcagaggcaatgtgcttgattattagagctgtttaggttaacagcacaacctctgcagccagactgcctggagtggcacctggtcaagttcctgaaacctctctttgccttatttttctcatctataaaatggggctaataactttacccatttcagtgttgctgtgagaattaattgagatgatacacctagaatgttaaggcacatggcaaatgccccattaatatcagctcctcttgttatttctaaaagtattacttcaatgcctgggtatgtttatatattgctggtgcaattgttaattttatattatttttgtattgttagcttttatttggtcatttgatcctcttagctctcctttgaaggtgagaaaaggcaggtgttgtttctcatttcatatttgagaaaactgaacttcagaaaaattacatgccctagaactcgggcctttttctgctccagagctgaaagcgagagaagagaggaagggaattaggctggagcaagccagtaggatgttggatgcagactcagatgttaatggcagcagagcccttgagctggattctagaatatgagaaagggctgagattgatgatggggcccagctgcattgttgggatggaggaaccagagttgagtcgagggagtaactccaggaaatcatggcacccagaaagtgtggcacagaatgcagggctctaacgtatagttaggagttctttgggcaagtactccagcaagcaaggaagaaggatgatgacatatggttattgccacaggatatttttggctgcgtctggcttctctctctgaaacaaattgcagttgctgtgacaccttctcatttcagcagtgagtcgaagttgcactcaatatagtgttttgaattcggactagtcgtgaagattcctttccagatcatagtatatgtatataagtcacttactgggaagagcactacatcatagttccgtggtccactaaggctgcagttttcttatctgaaataaggaggggtaacggtgcccatcctgcctcccctggcaggtccgcttacgcatgtagtgagaaaatacaggcaggcttgcagggaacaccgctttaaaagtataaagctctctgtgcaggtgctaggtcatggtatttattatcacactgggatcctgtgggaggggtaaggttagctcattggaatggaaaatccaggctctcattccagcactaggactcagtgcagctgcctggccttgggcacttaacctctctccttacagtgtctcccatctgttgagccaagacagggtggctgtctgctgccgcccatttggctggctaatgaggaagagccagtgctgctcacagcatgctcatttcgtggtaatgtagacaggggatagtagtggctgcgtgtagcagaaaccagcagggtaggaccggatgagcccaccttcagggaggtgtacccagggctgttagtttgaggacgtctgtgggattttatatccttactcttattttccaagaaagtctgtccctttgagcaccaggcagatgagtctggggacgctgtgaggaggggtcccccaggagcaggaaggtgactaatgatcccggaagaatgactgtgtgtgtttgcagacgcctgggctcttccccagtttggcctttcccgtcactgttttcctcacttgcttaagaggagaaggaggtaacgcacacaagtgcctttgtctcagggtccccacggtgcccatcttgagggttttgcgggcgccttgcattgcctaaggcctggctttagaagcagaacatggagagagaggtttgcagcctgcaggaagctggccagccagacctgccgggcagcgggacccgcgggcagtgcctctgactcacggcacgtccttgatacgcagtgctcccctccccactttctctgccctcctgtggatcacgggtgtcctagggctgttgggagcctggattaaagttgctgagtggccggctgatgatcagatccagggagtcagaccagaggtggggacatcttttcaaaggcaagaagatgctgccagtgcgtgtatatacatatgagggtggaaggggtaaacccagggtgtgtctttaactgaagaatcaagaaagctgctttccttagtcacccgcctctgtggttcgtttgctaaacgttggcttgcgttagcctgattcacagtaatgtggctcccaaggaagattcacatggtatttgtgaaaatgtagcttcatcccctgcccttcattgaatgactgaattacagtcagcaccacataacgatgtttcggtcaactatggactccatatgtgatgagacagtgatcccatagattatagtggagctgaaaaattcctattacctaggggcatcacaacgcattgcatttcgcccgtgtttgggatgatgctggtgtaaacctactatgctgccagtcatgtaaaagtatagcacacacaattagtaggtaatgcttgcaaataataatgaaagactctgctactggtttatgtatttactatgctatactttttgtcattactttagagtgtactcctacttttttttttttttttttgagatggagtttcactcttgtcctgtaggctggagcgaagtggcgcgatctcggcttactgcaacctccacctcctgggttcaagcgattctcctgcctcagcttcccagagtagctgagattacaggcatgcaccgccacgcacggctaattttgtatttttggtagagacagggtttcaccatgttggccaggctggtcaccaactcctgacctcaggtgacccgccctcctcagcctcccagagtgttgggattacaggtgtgagccaccgcccctggccttttttttttttttttttttaagttaattgtaaaagagcctcaggcaggtccttcaggagggattccagaagaaggcattgcgatcacaggaggtgccagctgcattgggacaagatgtggaggtggaagacagtgatattgatgatcctgaccctctgtaagcctaggctaatgtgtatgtttaagaaaaaagtttaaaaagtaaaaaaataaaaaatgttaaaaggaaaagcttatagaataaggatatagagaaaaaatattttttgtagagctgtacaatgtgttttgtgttttaagccaagtgttattacaagagtcaaaaagtcaaaaaattgaaatttataaaacaaaaacattacagtaagctaaatgtaactaattaattttatttatttttttttttagagacagggtcttgccttgtcgcctaggctggagtgcagtgttgagatcatagtttactgcagcctcgaactcctgggtacaaggaatcctccctcctcagcctcctgagtagctgggattacaggtgcgcaccaccacacagctaatttttaaattggtgtagtgaaggagtttcgcaatgttggccaggtggtctcaagctcttggcctcaagcagtcctcctgcctcgacctcccaaagtgctaggattacaggtatgagtcaccacgcccaaccttgaaatttaatttattatggaagaaagcaaaagtttaaaaaataaatttagtgtagcctaagtgtacagtgtttttaaagtctacggtagtgcacaggaatgtcccaggccttcacatttactcaccaccactcacttaaactcacccagagcaacttccagttctgcaggctccattcatggtaaatgccctacacaggtgtaccattaaaaaaaatcttttggctggttgtgatggctcatgcctgtaatcccatctcctggcttcatgccattctccttccccagcttcccgagttgctgggactacaggcgcctgccaccacgcccagctaaattttgtatttttagtagagatggggtttcgctgtgttagccagtatggtctcgatctcctgaccttgttttgatctgcttgcctcggcctcccaagatgctgggattacaggcgtgagccactgcgcccagcaaaaaacgatgtggtattttcactgtactttttttttgttattgagacggagtttcacttttgttgcccaggctggaatgcagtggcagaatctcggctcaccgcaacctctgcctaccgggttcaagcaattctcctgcctcagcctcccgagtagatgggattacaggtgtgtgccaccacgcccggctaattttgtatttttagtagcgatggggtttcaccatgttggccaggctggtctcgaactcccaacctcaagtgatccacctgccctagcctcccaaagtgctgggattacagttgtgagtcaccgcgcccagccttcactgtacttttggtatatttagattcatttagataacaaataccatggtattccagttgcctgcagtattcagtacagtagcatgctgtacaggtttgtagcctaggagcaacacactatagcgtacagcctaggtgtgcggtagctatcccctctcaatttgtgtaagtacactctgtgatgttcacagaaggatgaagtcacctaacaatgcatatctcagaacatatccccgtcatttgcgatgcgtgactgtaattaaggaatggggcctatggggtatgactgtgggtgctgggcactaaggagacggaggcttgacacaacccaggcattccccatgggagcccctctgtggcaggaaggacagatctccaatgaatcattcctttcaggagtgatgagctcagtcttcagggatcctgcacctcacggggaggagttgggaaaggccccccgaggaaggaatatctcagtatctctatctagacctgaaggagatgtggatgttacaactaaactgtatgattctctgtgtccctgagaacatcacagcctatttccaaggtgcctggccatccccagggtgcctgcatgccactgacactctaatctggggttctgctctgagctgagaaagtgtctgtggtttggggtcatcaggtggcagctcttctcctctctgttctgaaatcttaattccctgtttgactgcctggtggctttcagagaagcccagcctcctcccaggtgggaactttcactgtcgaactaaggacccgaggagggtggaaacaggaggaagggaggctaagcggtcacatcagaggcatttctgctcatcgttggctcataataggtggcagtaggggctggtggagcagtggccaggtaagttgctaaaaataaaacatgctcatgtgacgtgtgcaggtttagggtttgcctgagtgagctttcctggtccaggtcacaacttgtagggcaaagagagacttgaggatggtgtaggcgacaactgtgccttccaaaggtcagagatggacctgggatcttgtagtaccagggcctgctctggaggctcagattcgtgtgtcacttcttgtctcttttgaaaggtaactggagagctggacactttcctgtcctctctctttccttgtagccttcctctctcagagatggcctgctatcaaatgccaggggcacagtcagctgggcttggtaaagggcctgagatgagagcttggggactttcccactggagtccatgatagtccagggtgtagacagaagctcttggatctcacagctttggaaaccgagtcctgtttctccaacaggccagtgcggtgacgggcacagacctgctgtcctctctatttgtgtgtccactgattccctggcacagggggtctttgttacaaaatctctttgctgggtgctttgaaggagcacgtgtgtgggcctttttcagggtggttagacaatgccaagctgtcactcagaagaaatggtcaggatagaagcatagaaaatgccctgtggaaatgtagatgagtgttctggctcacacctgtaatcccagctactcaggaggctgaggcagggggattgctggcggacagcagttcgagaccagccttggcaacggagcaagaccctaactctaaaaataaaaataaaaaaataggccgggcgcggtggctcatgcctgtaattccagcactttgtgaggccaagacgggtggatcacgaggtcagaagtttgagaccagcctggccaacatggtgaaaccccgtctcaactaaaaatacaaaaattagctgggtgtggtagcagatgcctataatctcagctacttgagaggctgaggcgggagaatcacttgaacccgggaggcagaggttgcattgagctgagatcatgccattgcactccaggccgggcaacaagagcaagactctgtctcaagaaaaaaaaaaaaattggttttgtgtggtggtgcacacctgtagtcccagctactcaggaggctgaggtgggaagattgcttgagcccaggagtttgaggttgcagtgagccgtgatcatgctactgcactctagcctgggtgacagagcaagatcctgtctctaaaaatattaaaatgaataaataaaagaacagaaaatgacctgtgtggggagaagggttatctgtgaaaggagttagaaacctcaagtgtacataagtaagactggagatctctctgttaatgaaattgtgcttaaaaatttttttttcttgaaccttggcttctcaggcaataactgaattttaaggtgtgtgtgtatatatatatataggtatatatatatataggtgtatatatatatatatatatatagtgtatatatatatatatatatatatatagtgtatatatatatagtgtatgtgtgtgtgtgtgtgtgtatatatatatatatttgggccaggaagggtgaagtgttaaattgccttacttagaaaattaaggtagatttgtatttagcccttagagcttcaaaaatatcagctcagaaatgacttttaattgtgcaggtgataaaatcacaagaaaaaaattcatctacaagttggaatgactcttagctacttatttgtttttaaatttttttttcaaattttggaaggaagtagagaaggagttagaactgtaatttgctattatgggggttggggtgcagtgcgtattagtacaatgttaggtggtggcaggttccgtttatccttggaattagcactgctccccccacaggcttctgggagttgggagcaggctggttggtgacgctttgcctggccttggataagaactcttgttttcaaattcccttgaggtctcttccaagaatcttttgcattttttctgataaatcaatcataaggaagtttctgaaattctctttcagaccctacaacccacaagttactgcaaagctgggcttctaccagaagtgagtgatttgaaattgaaaacagatttcggatctcacctgagtagctcgagtgtaagggagggactgggagagccacagagaacatttgtcaatccagaaccaaccattcatggtgttgcttgactggagggcagggaaggaaaggactagaagcaaggcgaaagcagatctttctgtagatacacacatataagtcttggatttgcattttagggtgaattgtaattagcttgagatgaccaggggcccaccaatcaagcaactctgggaaaaacacttgtctacatcttaagtttctttgtctataaaatgtcaagattgaactaacactacatgattctctcgggaactcaccagttctaaaatttccactccttcttttcacagggcagtgtaactttaactccctgtttcaactttgggtgtaaaatacaggctcacaagcacttttgctttgcagcggaagctaggaagaccctgctgtggaattttgcagaggggctgagcagtggtgggaaggaccagcggcccatgtaccatgttgggcccctgcattccaaggtgtctgcctagaaataaatgatagtttatttaacatacttgtaacttccaacgacaacacttcaagactgcaaatcatccatccgggcaattacagaaatgctgaacggccacagccccgccctggaatcaagggaagaagtgtggcagatgcttctggaaggctctgtttacagctctctgactccttcctgccagaacctttcacaagttcactaccaggaagctgagtcatccaggggtcagccggcatggccaaggtcaccccgcactgccagcagcacagatggggttagcccatcattccagaggagcatccgtgggaatgatggggttggggagctggggagcctccctgcagcatctccctgccatggtgttttgcatttcctgtagatttcgcagtgagaaacggtctcctcttatattcacttcatttcttctctctttctttctttcttttttttgagatggagtctgtctctgtcaccaggctggactgcagtggcgcgatctcggttcactgcaacctctgcctcccgggttcaagcgattctcctgcttcagcctcctgagtagctgggactacaggcatgtgccaccacgcccagctaattttttgtattctcagtagagatgggatttcaccatgttggtcaggatggtctcaatctcctgaccttgtgatccacccgccttggcctcccaaagtgctgggattacaggcgtgagccaccacgtccgggctttttttttttttttttttagacttgttgcccccccaggatggagtgcagtggcgcaatgtcggctcactgtaacctccacctcctgggttcaagcgatgctactgcctcagcctcccaagtagctgggattacaggcatacaccaccacacccggctgattttatagttttagtagacactgggtttctccatgttggtcaggctggtctcaaattcccgacctcaggtgatctgctcacctcagcctcctaaagtgctgggattacaggcatgagtcactgcgcctggccaaaggcaagagatgaggaccatatagatggaaacacagcattaagggtaaaacactctctctctgctctgtctggtgttcagggcccagcatgggctgtatgtcctacacttcgtttcaggctcatcttcaggtgacaccagccttctcggagcctctgtccacatcccacctgtcactacctctgccctaacttcaccttcagtggtcactgccaggacccctccccaaatctaaatgaggtccccctgcatttgccctcattgcaccttctacttttgcttcatggcatttagagtttggaattttttatcgataggatttttagtactctctctctcctctactagactataaactccttgaaggcaaagacgacacctgctccctcagttccagcagcccctaacactgcgctgacatttaggtagtagcagcgttttcttgcagaacgatcctgtagttttaccagctgagacttctgtggtctggggagtcactcatctctggtccctgcctcctcctctcacttttggaaacccttctggccagacggctttggtttaaattgtatgccggagctcttggttccagggagagggttttagcgtaaaaatctcactcatgatggaaggttcctgctattaccttttgcatccaatacaacttaaattgactcctccaaaagcttcggaagtaatttgtacctattgtctagcataaattcagcaagtgggtcccggaggctgaaagtcgagtcttgcggttgtttcctctggtgtttctccctgagacccttagaacggcaagcctggtgcatctggtgtcctgtcatctttctctgtgattgtcatcagtgtgaaaggtgaaaggtgtgtggagaaagaacatcccttcgagctgtggcttagagctgtgacttggcaccacgtggttagtcactatcaagttagaagcctttgtgggaaatctggctttggtaggatctgggaaatttggacccctcatttgccccctggcatctctaaattccagagcccagctttgatggggcttacatccccagctgttaacctgtggggtgggccccagactgtggccaggtgcattgcgctaggggagacagatccacagcaggcagaatttgaggaggacttaaaatacctgctttgggaggccaaggcgggcagatcccctgaggtcgggagtttgagaccagcctgaccaacatggagaaaccctgtctctactaaaaatacaaaattagttgggtgcggtggcacatgcctgtaatcccagctacttgggaggctgaggcaggagaatcgcttgaacccgggaggcggaggttgtggtgagccgagatcaagccactgcactccagcctgggcaacaagagcgaaattccgtttcaaaaaaaaaaaaaaaaaaaacacaaaaaaacaaaaacccgctttgttacctgcctgtgggtggaattgagttcatctctgaatccgtggtagtcatttattgagcacgtgttttagtgagcatggcatggcgctggctccgagatcacagtgctgccgccctccttcacgtttctctgacctttcatgggagtcacatgcagacgcatcacttggtataattatacgtggaggaatgagcaagaggaggctggcgacgggactgctttaaaaatcccttcttctgtggataataggctaatagcggggtgtgctttagaaggtgtggcctccgccaagggcgtgggaactgcatttgtagaagctgggaggaccacacctggcttgggagacggcatgggtttctgaggtgcctggctccctggcctgtccagtgtggacagcttacgcgcagctaggtgaaatgattgtgcagttgctgagggattgggtggcagagctggacagaatttaggtcttctaacttggaacagggctgtgtccatcttacctaggtgtacagtttggggagcactgctgtttggtctagtgagacacacttggtgtaaatatctgtgccctgtagtacccagattccaagggaccagagagcatgcccgcacccacgggctggcgggagcccaggtcctccagggctgctgtggagcatgggcttcttggtgcccagtcctatagctgaacttgggcggcctctggctgttgcccccagggctggtctccctatagttcagaggcgagccagctctcagcagcagggagggccttttccatagtatgaacttggccacaccagaccagtcagcagtgtcgggaatcttggccctcaaggtccctgcctagccctggcctggacttcagcactggtcaaaggtccccagagctgcccttggctctgagcaggtgagtgaacttcccagagcacttttgtctgggcctctgtgccagtgtaaactgataatagtgatttccctgccccacctctctgccagctatctaagttttctttgttacataatcaggattaatttaagcagcctaggccatccatttagaaatggttagtgaagaaaggtgaatggggaggggtcagagtcccttagggggccaccaggtgcgagtccccttgctctttggggccttggtttcccttctgtgagttggggcagctgaagggaagggctgctcaggtggtcctgccacatcccagtgttgtgtctagtgagtacaggtgagagtgctcccaaccagggcagatcctgctgctaggcagtgagtcaggaaggaattggtaaaaatgacgtcattgctaagaatgacgtcttttttgctgtttatccaaaggaaaaaaaaaaaagcagaaataaaagcagcaggcagctgtccaccagaccccatgcaaagggcttttccttgaatcctcacagagactttaggcagtaggtgccattaggagccccacttacagataagaaaacgggggcagagaactgaagtgagtcgcccaaggacacacattgaggaggaagcaacagagctaggatttagatacagaggggtctccaagcctgtccttccagctttgaggtcctgggcctatatattccatcagaaactgaaaggtgtgttggggggtacctagggtcaggatggggttttatttctgtcccttccttgtgatgctgcagggactgtgacctggagttcccaacaccagtgccctgtggctggtagcctcctcctgggactccaggatctattgtttgatttagccattttcttctgtagtccgatgggagggattcaattcaaacctgcaatactgttctttgggccatacaggccatttatcagcaagtagagaaaaacacccacaccttctagcaagattaagctagttctgtggttcttaatgataatttaagccattttgattaacctaggtggtggttttctccctaccaggtagggaatatactggagcctttctaaaaatagttccggtgaagataaacatttattgagtacctactgtactccactaggtgaatacaaggatttctcgttcatctcaggaagcatggttaggggattttacagacgagggaactgaagttcagggaagttaagttacttatccaagttcatatagctgaaaaatagaataggatttcgaccttgtggtaggtggaaaccggggttgtctttgtgctctcaggcatgtggctggcgtggggtagaagctctctatataatggttgagtgactggatgagcttcaaagctggtccctctggcttttcctgctaccccaggccacgtgcccagaaggaacgctgtcttacctgggaggtctttattgactgtttgacgcccttcccatcctatcccaaccccttccccatggcacctagtttccccaaccagaacgtacgttacttatgggcagagacggtctttgagcattgggtgggtggttgaacgcagtttctttgagattctgtgattgggattttcagcaaaatatggtagcaagttggtcagaggggcgagtctggcagtgggggagcccgggcaagtctaactgtttgctcactggcagaacaaagttggggaggttggaggggtaggggaactgaaagcaaaagaaagctcacagggagccccatcgtgcaaaaccgatgatggcagagctgccgggctgcagcgtggagcggggcgggagccttgtgtggagtctgtgaacatactctaggtgcctggatactcctcttatctccccacacatgggttgatgtgcatgtacggtgctttgatgtggactcttgtgttaaatttgttcttctgcgcagctttgtgacgcttcagtgagtgtgtctatatacaaaaggaaaacagttttggctgggtgcagtggctcacgcctgtaatcccagcactttgggaggccgaggtgggtggatcacctgaggtcaggagtttgagaccagcctggacaacatggtgaaacccagtctctaccaaaaaacacaaaaattagccatgtgtggtagcatgcgcctgtaatcccagctactcaggaggctgaggcaggagatggcttgaacccgggggctggaagttgcagtgagccaagttcacgccattgcactccagtctgggcaacagagtgagactccgtctcaaaaaagaaaaaaacaaaaaacaaaaaaaaaaccaacaattttgaggatgaggcatttcttccttacttatgagtgggatgtttatgggccggtgacattgacaaggctggcagagtcaaggggaggccctgggtagtctagcttactagcagtgaattcagttctctcttgaaagcaccgtgactgttggaatatttcagccttagcctttgaatactgacggagtgccaggctttcgtctgtcaagatgcccctctgtgacctcagctggttaatgtctcaagcgcttctttaggagacagaatgggttggtattgaaccaaccactattgcccagtcttgtgatgaccagggttgtggaacagataagttgtgtgacctccacgggtcagggctgttgactttgcctgtaagttacactcttgcagctgggcatagacacagtcctcaggggttttgtggacattaacaagtaaggatttaggtgactctgacatagggtcttccccaaggtcaggcacagaggaggtggcatccatgggacttagcatgttgtagaaacagagcatattgggacaaaagggaagttgaagatcacctgggatcctttagcgtccatccctttgtgagagataggatagcctagttgttaacagcatgactctggccgaccgcctggcttctttctagtcttccttctgtactttgtgaccttgaggcaagtcatttggtctctgtgcctcagtttcccaatttgtggaatggggataactggttgctaatattgctgtttttattgttataattattttgtaaatagaagggttgaaggttcagggaagcaagttgattgacctgaggccatacaatgtatcagtgccagatgcaggatgagaaagaactgtgactcaggccctgtccctcttaccagggcagggcaggacagggaagctgggcaggagagactggcagctcagttccctctccagtccagggtagtcccttccctttctgtctcgcagtgaggtcaccagttgcactcatgaaatcttagtcctgttatctggcatctttggaatttgccccacctgtagggcagagataacttaatcctttttggtgggccacatatgggatattctgggtgtgttctgggtacactgggcatgggccaggcacagacccttccatccattggaggcttttctagagaaggggtggagaccagattgggttcctagggtcgggggatgtgggaatggcaccctctgaactacaggcaaggctgggagctgctgccagtgggcggagagggaaatctaactggtatgtgatgttagtggtggcctggcaagcagctgtagctttggagagagcgaccagcctgtccaggggcctggtagggaaggcttctgttgcacggcctgttgctttctctcagatactggagagcccatctgtcttgcttactgcatggcttttcatagctcccatcatattgctgttgggtgcgattcatagccatggaagacacctgatcataaagtaaattccacacactccagcaaggtattcagggccttgcatggtctagccccaccctacctttcttccagcaaacaataattgatcatctaaggtggcagcttctctcctaagtctgaggctgcttctctaccctcacctgactgctgtcttctctgcacaccagaccttccggccacaggtcctcattccccagatgcaccagcatgttcacatcctcctgcagcgggaattgttttcttcctctccatgccaaatttgtctttttctttcccagtcaaagtaacatatgtacatagtcacaaaatgaaatagtgtagaagagattgtagtgacagctctaattcttacagcttgacatactcttcctttttctaggtggctgttcaaatggcttccttccagccaccttctccaggttggatgtgatctggactctggatctctaccctatagcacatcctgctgtgacctattccaaggagaaggggggtttggtgctggggcttctctcctaggaggctgaggaacttggttattgctatcttagcagaattgttattttctaccaaatgtgcaatgaaaactcttcactgagtcttttgcccctagcaatagcagtgcttcctgaagccccagtagaccctgaaggtttcaggactgtgtctggagagcatcagtgacaggtggcaggaatcctctgtggtccacttcagaggcggcagatgaccaggaggtcagactgtggctggtcttttcagaaggacaaacgtgacccttctgaaaactgggaccattcggggacattggtggaaagacagaggagcctttatggtttgttctcacacatatgaatccactttctcccccctccaacatcagggtgacctgaacgctgaaggaagtctaggccttcctgtaggtgaggcagggaaagccacgtagacctgatttagttgaagtgttttccaccaggtctcaactcttcattttgtcttggtatagcttttctggctgactttctagcaagctggttgggctctttgcttgttccaaaatggtagttttcaccagagacttttcagatgagcaggaagcttttttcagaatgtatgttcttctaactctgcttgagtcccccgccatgtattctgataggcatttgttttcccaccccatcccccacttttttgaagtgggggcaatgactacttttaggggaatcatttttctgttgctggtttcaaaacattaagagcaccaattttttttttttttttgcaacagagtctttctcaggctgaagtgcggtgacatgatcatagctcactgcagcctcagtctcctgggctcaagtgatcctctcaccttagcctcccaagtagctaagaccactggcacccaccatgcctggctaatttttttaaaaaattactttctgaagagatggggtcttgctatgttgtccagactgggcttgaattcctggcagcaagtgatccacctgccttggccttccaaagtgctgggattacaggtgtgagccactgcacccagctcaaattttccttttcattaaaaacatacatatatgtatatgtatgtatatacatatgtatatatgcatgtgtatatatatgtgtgtatatgtatatatgtgtgtatatatgtgtgtgtgtgtatgtatatgtattatatgtatattctctttgtgtatttatttttgccagtttgggagatgttagaaaaagacacgatttggaaacttcaacttagggataaagttagttatactctgagagctgcagttaaaggattatttgtgctgctctgctcttgcctgcgacgtgtgggaatgatgctgagtgatgtcctcctgcttattttgcgtgatttttttttgagacagattctcgctctgtcacccaggctggagtgcaatggtgcgatcttggctcactgcaacctccacctcctgagttcgagcgactctcctgcctcagcctcctgagtagctgggattacaggcgtgtgccactacacctggctaatttttatatttttagtagagatgggattttgccatgttggccaggctggtctcgaacccctgacctcaggtaatctgcccgcctcggcctcccaaagtgctgggattacaggtgtgagccgccacacttggccaattttgcatgatttttacatggcttttcaaagggccagggtgggactatccaaagccctgttaagagtccctcttctgccaaggagcctaggaagggagcaggtttgagtgaggaaggctggtggttttggacggggaacgggtggttttggacgggtagtgccaacggtttttgtgtgcgtggtgctccttgatgtggtctgggtttctgcatttgtagtgtgtgccttctaaggatgctggaaggtgagacagggctttccaaggcctagatggggtttgtggctttacttaggaagacagtcctttccataaagcgtggtgccaaatgcttttcctcctgggcctcctgctgtgatttgtggcgtggagtttcagtgagggagggctctgcaggaaccagctccttggtctgatcctttctggacaattgtggatgggagttggcttcttggtgtcttgagagtgtcctcagcagaccccagtgaagcaggagcatagagctctggatgggctcatggtggacatgggagagctgctggccagggggctgcagggtgaggcttggaaaacagggagggggctgggcttggccccgcattttactgtggtttatttagtgaatgtcagtgctagctggggacagttgacagacaagagaaaacactggtttgattttgaattctgaagcagacattgggcagcagaggctaacatttggcatttatcctaaactttcgaggtgcccgagccttatttcctttctctgggagaaagtctggaacagagacggtgcggagcagcctctagggctcagccctgggcccccctggagttgtgctgctcatggtatcacagtgcttgtttgtttcctgtttgtatccccattgcacctggctcaaggtaggtgtaaggcaaatgctttagaatgagccagtgagtagatttcacatgatcgtctcctcagtcctagaaatgccacgtgaacttcgaacatggaaagttttttatttttgagagattggagaggtgggagttacaggctgtctccaggtcaggcagggagtcagtggctgagtttctgatgctacagatggctggcttgggtggcatgacctctgcaggacccctagaagggcctgaggcccactaccaggctcagcttgcccccttctcttttcttttttggtcctaggcctggatcagaggctccttacccacaggatcttggacaagtcattttccttcttgggcctcagtttcccatctgaaaaggcaggggctgggctggatgtggtctccctagggccattgttgcttctgttacatgatcccgccagctcacctgggacagaacgtgcattttccactctccctcctccccgcagtgagagaacgggccagtgagacaggcctttcctgttttgtcatcttaggggagaattggtgtcaggggctgacccttcactttgttctagctttgctaggagtttgtggagacagtggatgcagatacagacagagttcatatcactgggagtttcactgtcctggagcagatctggagctggaggggacttgctcaggtcacactgggagtggcagtgtcaggccagagacccttgtctcttgattccccgggcaggacacgtttctccatcctgcaggcaggtgcagaggaggaatgcttattcataggcagcacgtgagggctcctctcagctgcttatttggcaccctctttcccctccaggggccagccacacaaccacctgcctccggcctgctccccacacagttgccagaggggtctttctgactctctctgacacctggatgttcttggcacttgctgcttcaagggcataggttcccattggctacggctgtgttttcacacgtgtgtttggtcaggtgtctctggttattaaatgagacaaggcttgcattgctaaagacagaggtttaggaagtgccttggaaaaccaagtgaaacaggtttctttccggaaggatttcccagaggctttagtatggtaatgtgcttatgcatttccaagaggggagaactaaaatgcaaacgtggaaactgattttaccgaacaggaggagactagaagctaggtcttgggcaggaactgaaacctggacaggaaaagaaatttgtgaaattctctgtctccggttgtgtgtgtgtgtgtgcgtgtgtgtgcgcgcgcgcgtgtgtgtgtttatttttaatctctgccctgtctctgcatcctgattcattcatttcctttttcctcctctccaccctcacttccttttcttgtatttttaaaaattgtagtaaaatatacataacaaaatttctcatcttacccatttttaagcatacagtccagcggcattaagtacattcatactattacacaaccatcagtgtcatgcatccacagaactctcctcatcttgcaaaactcaaactcctgtacccataaaacaagaactctccgtcctgttccctcctcaccccagcccctggctacccccattccactttttgtctacaaatttgactactctaggcacctcatatcagtggaatcatacagtatttgtctttttgtgactggctcctttcacttagcatgctgttgtcaagaactatctatgttgtagcctgtgtcagaattttctttccttttttaaggctgaataatattccactgtatggatatattacatcgtgtttatcccttcatctggtgatggacacttgagttgcttccactcactcccagatgttttttcccctctctgatcctcaaggaatagaaaatgcccagccttcatttttacattttacaggtagtggagctttaaaaaagagagtactttgggaggcacagataggagcatcacttgagcccaagagtttgagaccagcctgagcaacatagtaagacccagtctctacaaaaatcagctgggtgtggtggtgcgcacctgtagtctgagctactcaggaggctgaggtgggaggattgcttgagcccaggaggctcaggctgcagtgagctatgatcgtgccactgcactctagcctaggtgataggtgagaccctgtcttaaaaaaataaaaataaaaaataaaaaagagactaaattgattattgtctctctggctgtggccacttctgcctgccttcctagccgcctgccttctgcctctcttgcctctcctgaggctgctgcagggttgatccctccttgcctcttccttacactccttcgaggcaccctggtggttcgtttcctcctcctgttatcatacactttccttgtttttccccattgttttttctcctctgtatcctggtgccaacctcagtgggtgctccctgcaggcaggtggaagaaatgatggtgctgcaggatgaatgaggctctggccccaaacttggctgctgtgactgcagtggtcccagcgggggcctgaccaggcccatctctgcgcttctgggccacttgcctctgtctggggcttgtgtcattaactaagacctgcccttgagtaaaccaccctgaggacagagaagtccactgaggtgcggtgactgaggcagaactcaatcttttagaggtttattctatcagggttgaggatgcaccggggaaaagaaacacaagttatagtaggatctgtgttctgtgctttttccaaagagggctctggtaacgtcagtatttaaaggggaaagagcaagcaggagggagagaagaaaaataaaagaaggaagggtaggcattaggcaagtggtaccattcttgtgaggctctgattagcacttagtgaatctgcattttacatgtgaaaagaagggagttggggaaagtgaatcatggtcttgcactcagtaaatctacgttttacataagataaagtaagcttatgaaattagagctgtctgtttgggaacaaaaagaaggtcagtttttgcatgactcacttcccaagcttaactttctttttctttgacatagtgagtttagggccctgaggttttatttttctttcacagcacaaagatacccagttgacctttttttttcataacagaatgatgcattttggttcagtagtgtttcctccaactgctctacccctaatttaaaaaggggagggggtgagaaatcagtcccaaatgtccctgtaagttttggtgtgatgccagcctccaactggctgacatgagcagttttgtaaaggagagaccctcttgatggcttcacgtatatcatggggtgggatggggacagtcattattgacagccagcctgtgccaagtgtttcccagcagctctctgggcgattattccagccaaggatggccatgccctaaggttaaggaacctgcttgaggtcccagagctggaattgagattgacaacctcaggctgggtggctgtacagcctgggcactctctgtgccccctgccctcactcagccactccctccataggtcaccaggggtaattccctactgcccaggcagagggctggggctggaaggggtctagatggtcacttagtggttccccaagctgagtcctgatcaaaatcatctggggaattttaaaaagaaaaagaagacttgaatcagtgtgtgctagggtggtgtctatggatgggtattttcaaacatttcccgggtaactctgatcttcagcccctgctctgatcctccctttcattttccagtccaggacactggggaccggagagatgagatgccgtgaccaaggtcactgggttgtagccagagccagcatcaggtccaaagtgcgatctcagtagccagttctccatgctctgtgtttgttcagactgccagccctgctcaatggggctctggaacttaaggaaggcctttgaccataggctgggcttgcaaaaccttggtaggaccctgcccttggctggaaacctcagggctccagccagggctcatccccaagaagatacactgccattctccaaagtgtgggggcctctcccctgaagggcgctgcctggagccacctcttgttcacaggcccatgttaggccccctgggacaggttgccttggctccatatgtggttctgcagatcacacccaggcttgagaaatgcggtgacacgtgaactttgcattgatgtgaaaaggtccaaattaaaggtgatggcaagcacagctaagtccaagaaagtgtggctcctatttaggggtggtgggctaagagacaagacacagtaccctttcaccccggtgggtattctaagttgggttagtttgttcatcaattcattcattcaacaaatatttattgggttcccaataaatcatcttactggtccttggagatctgctgtgaacaagacaaacacaaccccacctctgtggcctgcacaaccctggaaggtcacacactagaaccctatcacttggcctctccatgaatcaccgtcatgtagcccctcgacaggggactcttgtgttattactgacaatattgatggttttagacacatattatcccatttaattttcccaaccattctctcaagtggggaaactcaaacttagaaagtttaatgaccttgcccagggtcacaccatgagtgatggcatctgaattcagccccagttctctctgattccaaagctggggttcttgacagccacattgtaccacctggtacccttgctttttgtcaggggcaagtataagaagaaggcaggtgacacgtgaagctttatttgctctaaaacttgagcgatttcatatgtcctaaaggaggagttttgcctcttccttcccagcatgaacacttggcatggtgtgtacatcttcattcgtttggtctggccaacagccactcgggagctgaatgaggtgttgtgaccatgacctgggtattctcttggttcagataccttcttggttggcacattcactttctcgtccttcccttggtctttcttgcttataatatatcccttttttaatttttaattttttttaagacagggttttgttctgtcacccaggctggagtgcagtggcacaaacatagctcactgcagcctcaaactcctgggctcaagggattctcccacctcagcctcccaaatagccaaggctacagaggtgtgccgccatgcctggctaatttcttatttttttgttgaaatgaggtctcagtatattgcccaggttggtctcaaactcctggcctcaagcaatcctcctgtcttggcctcccaaagcgccaggattacaggtgtgagccatcacacctagcctaatgtatcatcttattaaatcagatcaaatcctttttgaaaagacttaaaattgaaatcactttaaaaaacgaaaggatgcagggctaccctccctgggaccctggggcccaggtgtcttggcagctgccttgggctgggccagaagatgtttttgccagtctgtggtaggaaaaagggtgcagagtagcgagtttttaataaagctaaactggccgggtgcagtggctcacgcctgtaatcccagcactttgggaagccgaagcaagtggatctcgaggtcacgagtttgagaccagcctggccaacatagtgaaacccaatctctactaaaaatataaaaaattagctgggcgtggtggagggcgcctgtaatcccagctactcaggaggctgaggcaggagaatcgcttgaacgtggcaggcggaggttgcagcgagccgagattgtgccactgcactccagcctgggcaacagtgtgagactccgtgtcaaagaaaaaaataaaaataaagctaaatctaatttaaagtaccattttataatcagaggtagtcttccttacttttttttaagcattaaaaatgccctttcttttacaaaatcatgtttgtggtggagggcagtggtgattgttgcttatattgttattgtttttgcgtcctttctgggcaaaataaaaagtttgccttggtgtgtccatttcctttgtggttttaatagctggtgaaatctgaactatgaaaatgaccactaattcaggtgattggttttcaccgttcctccaagccctggggtacctggggctctctgtcccggtgagtgagagggagccccagagagtcctttgcccatcttcaatcagagaagccctccttttttatatgtaggattagattttttttatgattttgtttggagataaaaggatacccctgccaaaagttgaaaagcttctcctctaggatgtgtgttgggggggagtgggggagggagggagtcggggagggaggaagggaagggtgggaggaaggaaaggagggaggcaggaaagaaggaagggaggaagaaggaaggagggaatgtagtgactttggtgggactgagccatggtggatcttctacttggcgagtatttcttgcctatatactagtcagagttctccagagaaacaggtaataggatgtgtaaagtctacttgggtttgtaagaccagcctttggttgaagaccttccttgggtcctagcagacagaaaccaggagagacagagacatctatatccggctacatagagaggttatctgtctaactctctgcctgttctctatctatatctgtctgtctgtctgtctgtctacctacctacctgtctctgtctgtctgtctgtctacctacctacctatctaatctacctacctacctacctatctgtctgatctacctacctacgtacctacctacttagaaattgagagatttactttgaggattgacccacatgattgtggggactagccaagtccaaaatctgcaggctggagatttagggagagctgatgttacagtttgagtctgaaggcagtctggaggcagaatttcttccttgagagagacccagtttttttctcacgaggccttcagctgattaaatgaggtgtatgtacccacagtatacaggttaatctactttattcagagtctactgatttaaatgttaaactcatttagaaaatcccttcatacatacatctaaactagtgttagatcaaatatctgggtactgtggctcatccaggctgacccataaaattaaccatcacacctgtgcaagcgcttttccctcctggatggtgtcctagggatgacagaggaggggaaagccaggtctctgcttcaaggagacaaaattatgcatacgaagaaattaagaatgctgctgtgtctgtggagtagccattcttttattcctttactttcttaacaaacttgcttttacttaaaaaaaaaaaaagaaattaagaacaagaccatttatatttaagtgccaacttatgaaatgtaaaaagggatttagaggtgacaaggcaagtgagggctggaggatttggagagatttcatggtgtagggactgaataggagcttccagaacatggaggtttcagataagtgaggacacagaagtcttcacaaccagagtgggcaccacaggacaattctacatctatctaggactctgagtttttgaagggtttccatatgcattgtttggtttgctgcttgcaacaaccctgttgttttaactgaaggtcttagggcctagggattccccagaggccacacaacttgccagtggcaggggaaggtcttactcttccacagccttctctgtctttctccctttatggagcataatgaaatgtacgtgcacacattcatgtagatttcattatgtccatgtagaattcattttgatttcaaatatgtttccttcccagagaaatcctgtgaaactatgacattgtttttctctctctccttctccaggtcttattttccttctttaccatcctgattaactctatttttgtttgttttctcttcttgcccgctcccagacacgaatgcagagtttgagtccagatcccaaagcccagtacacaagtatctacggagccctcaagaaaatcatgcggaccgaaggcttctggaggcccttgcgaggcgtcaacgtcatgatcatgggtgcagggccggcccatgccatgtattttgcctgctatgaaaacatgaaaaggactttaaatgacgttttccaccaccaaggaaacagccacctagccaacggtattttgaaagcgtttgtctggagttagaaagttctcttcttcaacacgtccctccccagggtgttcctccctgtgacccagccgcctcgacttcggcccgcttgctcacgaataaagaactcagagttgtgtgtgcaatgcacacccagacacacgcacgcacacacacgcgcgcgcacacacatgcttttttctgttcccctccgctttctgaagcctggggagaaatcagtgacagaggtgttttggttttattgttatgtgggttttcttttgtatttttttttgtttgttttgtttttaaacattcaaaagcaattaatgatcagacataggagaaaccctgaatagaaacaaaacttttgaatgctggattcaaaaaaaaaaaaaagttatctggacagcttctttgagactatttaaaaactggtacaacaggtctctacaacgccaagatctaactaagctttaaaaggtcaagaagttttatggctgacaaaggactcgcgcaacgcagaaggcctttcccaccttaagcttccggggatctgggaattttacccccattctcttctgtttgtctgagtctcatctctctgcaagcaagggctgaaatcattttgtttggttgttttgagggagagaggcggggtgggggggtgcaaatctgccagcagctcttacgtaaggcatgttttattggggagggctgagcttttattttctcctctccagtggggttggcttttattgtttcttgtttgggtttggaatggaaatatggatagcagcataaagtacttttattttgacaaaattcatttttttcaacaatggagacatagatttgacccacaataacttctccccctctctttttactctgctcaaaaagcatctctcctcccattacccaaccttggtcataagtgtgcctggctggtttgcagatatttgttctgctttgtaaaaattggccattagtgcatttattgagatgatctctaaagagctatgccctgacctacccctgattctatgacattggggcccttcttttgctgaaactgccttacgtaatggttttactccttgaaagagatttgacggaatccattttatgccaagtgctgccctgcactgtttctgcaatatgtggtgtatgctgtggtgatcttgctgggaatgattataagtgtgtgtgtggtgggggagtgggtattacatgcattgctgaagagtcatcctggtgttcctcattcctcccaccttcccgtggtcattttaattacggggcagtgtcaccgcaaagggaggaaactcaaagccgaaagcaaaattccaggcctgattctggcttttgaggttcctggttcttgaagccaggcctgacccgactctcagatggggtcagtcccgtcgctttgcagactgaccctggaaatctacaaaatgcagattttcctgatttcctcttctcttgcccagttttttttttttttttttttttttttttttaaagcctggattgtaaccagattttcttttttcccccttctcagctgtagatatgatatctcctttcagggccccagcttaagggcaaagtgagttaatgtgtagacaaaggcgagggacaagagagagttaacatctagacagtggaaaaagccatggtgtgtggtttctgggaaccaccaacacttgcaggtttagctttttcccagggttgactacaagaaagaaaaccatgtttttgcaagattaaaatgtggttgagtgtgcctaaattaaccatccccatttttatcatatttccaccatcacttcagggttttaagagtcagtgctcacctgggcggagctggtagtacattttgcttcttagaaagctaagtcctgggttccgtctgattttaggttccaggaacttcctgagaacacccgatcgcagagggtaattttctggagtttgttttgcagggatagctgggagtatggccaccctgctccacgatgcggtaatgaatccagcagaaggtaatgtttcatggtcccagggaggggcagtaggggatgtgcaaaggggcacaaaaaatggttgtgggagagtggagaggactgaaggtgggcagagcggctcctagtctccagtcagagcagacaggagaattgaattttttactacgttatcaaaggcctcaagaaaggacgtgaacataagagtttttggtattcctgtgctcggagctactcaaagtgtgttctacagaccagcagcatcagacatcttgaggggtgttggaaatgctaattctgaggctgggtgcagtggctcatgcctgtaatcccagcattttttgggaggccgaggtgggcagatcacttgaggtcaggagttcgagaccagcctggccaacatggagagacccccatctctactaaaaatacaaaaattagcctagtgtggtgtgtgcacctgtaatcccagctactggggtggccgaggtgggagaatcgcttgaacccagcaggcagaggttgcagtgcaccgagagtacgccactgtactccagcctgggccacagagccagactccatctcaaaaggaaaaaaaaaaaaaaaaaagggaaatgctaattctggccggcatggtggtttaaaactgtaatcccagcactttgggaggccaaggcaggcagatctcttgaacccaggagttcaagaccagcgtgggcagcataatgagaccccgtctctatgaaaaatacaaaaattagccaggtgtggtggtgcatgcctgtagtcccagctgttcggaaggctgaggtggaagaattgcttgagtttgggaggttgaggctgcagtgagtcgtgattgcaccactgcactcagccagggcgacagagcaagactgcctcaaaacagaaaagaaaacaaaggctaattctcaggctttacaccgaacctactggatcagaatccctggagctagggaccagaatctgtttattggtgattctgttgcatgcttttgcactattctaaaacctatgtgtgcatacacacacacacacacacacacacactcactctcttagcccttgttaacccttatcgatcctagacaaatgtatggggaacccatcagaggctattctttagggctagtgttcaatttgactgtttttaatatgaaagattatggatcacatttcaaacagatgtgaacgtggagagaataatacgatgtaccgcagtgtgtccatcactgttcttcagaaattcacattgggtcattttgttttagccatctctttccacattatcttctttttgttcttttaaatttcgggggtaatatgaagcaagcctcagctgggcagaccagagtctgttccctttttatatatcccggcgtcttagccgggtactcgtgtctgaatagtgagtaccttttgggcctggcactgggcaggccttcagctgggtcattctctacctggcgatggctttaggtgagttgtggagctcttttcacctttttgcctcatctgaaaatagttcctggccagaagggagaattggtgagaaaagtttcaacattttaagtctcatgctataagtttgcctgtcttttgtctttcaaggtgaagctattaaatttgttctcagctaccctccatgtcctagcagatagaggacttggtctgaccttcagggttgtgatggggcaggttgggaggtgggcggggagtctctgtggtctgggtgctgaggttgacccgatgggcaggtgaagaaaatcaccttctccattccccttgatttctttatcgtgtgccgcacgaggcatgctgaagggacacacacctttccccctttttatttacaaagtagagagctgagaaagacagctcatgttctgttttgttttgtacacattatctttctcaagagatgtgatgtccttaagtaaactgacctgccttcatggcttgtcctgtaatgaatgcgttcaagacagtgttttggggacaggaaagaggcattcttaggtaagcggtggtggggggtggggtggggtggagaggaaacccttctaggaagtagttcaatgaaaaacctaaaaatgcccaaataaacattcgcttacatattatatatcttgggcttctttttatgacagttcattcagggacccagtcagtaaacaggtagttaacttcgtgtaaccaagcaagggttttgtttatcttttttaaagtagaaaaaagtgaggctcaaactctctctttctccttgtcataactattggtttacagtctttatttgtttaaaagtaaagcacattgtatgtatttatttggcaatacatgaggccattaaaaccctgagcctaaggtaccacagttagtctcatttgcctcttgtcctgtgaactccacttagaatgtcattgaacttgggcagacataattctagtgtctgttccaaacgcactgtgtcacagaagctagaattaccattagaggcacaaacccctgagaatacacaagggggcacgcttccagtagatgtgttggggaaggaggagggcagaggggacaggggacaggattcagctttgtggtgggtcctgagggttcctaccaggggtagccaggatctgggaaacagatcagcgactctagtctgaagtggctgcctggttcgggggctgccttcagcaagattcaggcaggagagacggaaatagccaccttccaggcgtgagtcctggagataaaaatggattttaacctaggactgccgggagctggccctccgcggctgctcagactagggctgtgtgtgctggctctcgcctgtttccggtgtctaactggcttgtttctctttatggcttggcttcattccgacctggggtggggccacatccaacccactgcccactggctgtccgtctggcctgccccgcggttccaaccacagtggtgaagcagcgcttgcagatgtacaactcgcagcaccggtcagcaatcagctgcatccggacggtgtggaggaccgaggggttgggggccttctaccggagctacaccacgcagctgaccatgaacatccccttccagtccatccacttcatcacctatgagttcctgcaggagcaggtcaacccccaccggacctacaacccgcagtcccacatcatctcaggcgggctggccggggccctcgccgcggccgccacgacccccctggacgtctgtaagacccttctgaacactcaggagaacgtggccctctcgctggccaacatcagcggccggctgtcgggtatggccaatgccttccggacggtgtaccagctcaacggcctggccggctacttcaaaggcatccaggcgcgtgtcatctaccagatgccctccaccgccatttcttggtctgtctatgagttcttcaagtactttctcaccaagcgccagctggaaaatcgagctccatactaaagg

SEQ ID NO: 15820 - DNA, 87326 bp, Homo sapiens
tttgactgagcaccgaggggcagttggcagcttcacctcagagctgcaggaaggaacggggcagtgaaaatcgaatcgggtgtgatcctaggccaagctcatggcccagcagggccagcaggggcagatggcaagtggagacagcaatctcaacttcaggtgggtcatcgtctcctttcccgtctgtccttcatctctggtagggttccctttcatacttgttatttaatgtctacccagcttcactctacaggtatacaatagaattcagttacaaataaataacgaggcaatcagattttttaaattgcagggattggctgttggagaaactcaaggatgccgtgactcacatcatcttcctattctcttacatctgcaaatggctggactggagctgtttgaacatcatgcctgttctgaggctttgtgtaggattggatgattccccgtgacctctgaaccctctcttctcccccaggcctcctttatccccactccaaaagacaactctgtctaaaaaggatctttttagaagaattaaaatccaaacgcctgtctgttgtcacactttccaggctgtgtagttggggaccggttctgctctgagcccatctatgtggctcttagccctagaatcacttcaggatctctgaatacttggtaggaggaagtgaaagcagatgagacccaacaaaaaaggcaagcaggtagagagtgagtgctgcttctgctttttttattcttctgttctggtattttttacatatctggtcagagaagcctggaaatcatctttaaaaaatgtaagacaatgagaccagtctgaccaacgtggagaaaccctgtctttactaaaaatacaaaattagctgggtgtcatggtgtatgcctgtaattccagctactcaggaggctgaggcaggataatcgcttgaaccagggaggcagaggttttggcgagccaagatcacaccattacactttagcctgggcaacaagagtgaaattccatctcaaaaaaaaaaaaaaaaaaagacaagtacatcaatacggtcatttcttcttatctgtggattctgtatccatggatctaaccaaccatgaatgcaaaatattttctaaaaattaaaaacataaataacaacaataaaaagtaatataaaaatttaaaatacagtataactatttgtatagcatttacattgtattaggtattataagtctagagatgatttaaaatatacaggaggatgtgcataggttatatgtaaatactacaccttttatatcagggacttgagcatccatggattttggtatccatggagggtcctggaaccaattccccctggataccaagggatgactgtacattcttgataaaaatgaaaatgtgtggaatgtaaaaatgtatggaaacttgtctaattgggactctgtgctaaggctacttctggcgctggtacagccccaagaaagcaaaagctattgctattatcagcagtagtggtggcaccagactggttttcagtgcccagtgccaccactcccagacaggcatccctgtcatctctctttcacttgctctctagtgaagggaagatgagccagcggagctcaaagtccagccagcccatggtcaccaagcaggaagaagacggcactgagaggtgacaatgggctaatgctaacctcaaagaatgagttaggaagtgttgcctctgctcttatttttggaggaaattggggaggatgatgtcatttcttccttaaatatctggtaggattagctagtgataccatctgggcctagtactttcctttctggagggctattaattatcgattcaaatttctttaatagatgtaggcctattcagacaacctatctcttgtgcaagttttggttagtttgcctcttaaagaatttgttcatttcatctgtgaccaaatttgtaggtgtagagtccatagttttcctttattacctttccattgtccatggaattcgtagtgatgacccttctttcattctgatgatttccgtcttctctatttttttctttgttaggctggctagaggtttattaattaactctttgaaaagaaaatcagcttttggtttcattaagtttctcgaatgttttcctgtttcaatttttttaacttccactttaattttaattttttttcctgcttgcatcaggcttaaattgctccttttttctctagtttcctcagatgaaagcttagattattgacttagatctttcttcttttctattgtatgcatttaatactatacatttccttctaagtgctgcttttgttgcatcccattcattttaataagttgttttccttttcatttacttcaaaatatttttaaaattcttttaggacttcttatttgaccctagaactcttttggttaatctggaaatattttggaattttccagctatttttctgttactgatttctagtttatggtctgagaacaaacttttaggatttctattcttttaaatttgttaaggtatgttttatggcccaaaatgaagtacatcttggcaaatattctatgtgagcttaaaaagtacatgcattctgctattgttaaatggagtaccgtataagtgtcagttagaccaagctgattgctattgctcatcaggtcaactacacccttactgatttttctgcctgtgtgatatgtcaattaataaaaaagaagtgttgaagccttcaataatagtagtgaatttgtctatttctctttatagttctatcagtttttgcctcatacattttgccattagtttgttagttgcatacacattaaggattgtgtaccttcttggagaattgacccttttatcataatgtaatgtccctctttaatccctgacaattttccttgttctgaagcttctttgtctgaaattgatatagctactataccttttctttgattagtgttggcatggtatatcttgctccatccctttatgtttaacctatctgtatttttatatttacaatgactttcttatagacaacatatagtcgggtgttttgtgttttttatgtactctgttgatctcttgtcttttaattggtgttttagaccattggcattaaagtgattattaatatagttagattaatatctaccacatttgtaaatgtttcattgtacctatcgtttttatcttttcttccttttttcctgccttttctggtttaattgagcattttatgcttctattttctctcccttcttagcatatcaattatacttcctttaaaacatttttagtggttccctgaagtttgtaatatatatttacagcgaatcatgcccattttaaattacactatatcacttcatgagtagagaatacaccatgcaactgaatgtcccaaattctgccctcctgttctttttaacattgtgaaatgactgacaatgttaaaaagaacaggagggcttccagtcattccatttatttatgtcccataaccactcaatatgttgttgattctattaatttgaataaatggcttcattttaggttaacttggagtaggaaaaatgaaaacattttattatatctgcatttatttcttctctggtgctctttctttctctatgtaaatctgagtttctggcccacatcatttttccctttgcatgaagaaattctttttttttttttttttttttttttttttgagatggagtctcactctgttgcccaggctggagtacagtggtgcaatctcggctctctgcacactccgcctcctgggttcacgccattctcctgcctcagcctcctgagtagctgggactacaggcgcccaccaccacgcctggctaattttttgtatttttagtagagacgggatttcaccatgttagccaggatggtcaagaaattcttttaacattttcacatggagtaggctttctggcaaagaatttcctcagtttttgtttgtttgagaaaatctttatttctactttacttggaaggttaatttcacaggatatggaagcctacataggctttttttttctttcatcactttaaatatttctttccactttctttgcttgcatggtttttaatgagaaatctgatgtaattttatccttgttctttcacaggtaggggttttttgttttttttccctaccccctggcttttttcaatattttctctgtctttcgtattctgcagtttgaatataaaattgtaattgccaaactagactcttcttgtccattgcccagaaaagccacacattgagaatagtaggagttgcaggagagagagaatttaataatcgcagggccagccaagcgggagatgtttctgaaatccatctccccaagaattcagagactaggctttttaaaggatagttaggcagacagggggctggggaacagggaagtgctgattgcttaggttgggaatgaaatcacagggggttgaagctgtgttcttgtgctgagtcatttcctgggtaggggtcacaggacctggttaccaatcctgtggtattagctgttccattagaatgcaaggtctgaaaaatacctcaaaccccagtcttaggttttacaatactgaagttatctataggagcaattgcggtggttatggatcatgtgacctccagctacatgactcctgaaccataattctaatcttgtatccaatttgttagttttacaaaagtggttttggtcccagagcaaggagggggtaagttttgggaagggattgttataatctttgttttaaagttaaactataaactaaattcttctcattgttagcttggcatacacccaggaatgagcaaggacagcttgtgaggttagaagcaagatggagtcagttaatttagattcctctcactgtcatgatttttgcaaaggtggtttcaatatgtctaagtctagatcatttgatatttatgcagcttggtgtttgatgagtttcctgaatctgtggtttgttgtctgtcattacttttggaaaattcttggctatcactacttgaatatttcttctgctctattttctctttcttctccttctcgtattccaattacatatttgtcacactttctgaaattattccagcattcttggatattgtgttctgttttgttttttcctttttttttcctctttgcatttctatttgagaagtttcttttgacatatcttcaattcactgattctttccttggccatgtccaggctactgatgaactcatcaaaggtattcttcatttctgttacattgtttttcatttctagcatttcatttttcattatgtctttgagttgtcatctttctgctcacttaaccatctgttcatgcgtattgtgtgcttttttctttagagcccttaacatattaactaaccatagttattttaaatttctgtctaaaaacttgaaaatccatcatatctgagtctggttttgatgattactttgtctcttcacactgtgttacttcttgccttttggcatgtcttataattttttttttaagtcagacatgataagtcaggtaataggaactgaggcaaataagccttcaatgtgaggttttatattaatctgggtaggaaatgggccatatctaatgtttgttctagctgtaggtggcagaggtgtcaaattcctctagcgttcttgtttttctttcccctgctttctctgggtttctctgagaactcctttttaaatagtctgtttcttgtagttcttccagctgtaatctgctcttattatacaggaaccctgttgatggaatggtaacgtgtcagagggggaagtggtctataatcttatgattacatctcgatcttttaatggaactgcaccttgggctattacttttaaaagaatttctccctccacccttttttttcaatttttttgagatggagtcttgctttgttgcccaggctatagtgcagtggcgtggtctcggctcactgcaacttctgcctcctaggttcaagtgattctcctgcctctgcctcctgagtagcagagattacaggtgcctgccaccatgcccagctaattttcttttgtgtttttagtagagacggggtttcaccatgttggccaggctggtctcaaactcctggctttgtgatccacccgtctcagtctcccaaaatgctgggattacaggtgtgagccaccgtgcccagcctcacctccaccctttttagaagtgacaagatggccagaaggggctagattttggtagtcacccttcccctagaatggttaaagcattttccctggagagcaggcccttgtcatggagaatgctttggctttttaaaaacttttcttttccctcttcttgccagaaggataaagagatttttcttggggtttgtggaggtaaaatccataaaaggttgggggcctgccctgagatgatgacccccaggagtttctcatgctcatgctcctccacactcagcctccagcaattcatcaaacataccaggctatgacttcagtgcctgctgcctcagatagttgatctcggctaattctctggatttgcctgtatctccagattttggggcagtttgccttgtgactttggttatttgagagatagaagaaaagttgttaattcatagtttgttcagcagggttgttgttgttgttgtgaggatgggagcgatgacttccaatgtctttgcgtgttgaagctgaaaccagaggtctagtgaacttttacatttttgaagtttagacttttttcttaagacaaactttctttttgttttaaattttggttttattatagtattatcttatagccagagcatgtaacctgttcaatttctcttcattattatttattgaaattacttcagggccaaatacctggtatgatcttgtgtgtttaacacagtgttattaaaaatcaattttgccagtttttaaaacttacattttgtgtatctttgttcttttatttttatctacttgagaagctaaggactggaagtaagatgttttttaacagccttgaaagatttccccattagtaatctttaatcttactttttaaatgtgagtattgagaattttaccttctttctcatttgtatttgcttaatgaaacttatccatcttttgactgttaacatttttaatgttattttatctctgttatgtctcttgtagttagattctattttgaccatttataatttaagatggtagcttaatctgttttaaatatcttgttgcttatggattttttatttttatattttatgcctctttattttctataagaaaaagagcatgtttttctttctcattattttgtaaagtttgtagcctcattttgactctatttgttacacttgggtttctaattaattctttaatgtatatttctctaactgagaccatcaaatttataactatatcatttgaatttgtatttgaaataagttacttaactcaattttttacttgtcctcactcaatttaaaaaactttaccaagatatcgcaccactgcactccagcctgggtgacagagcgagattccgtctcaaaacaaaacaaaaaaaacattaaaatagaatctaaagtttaagattgaaattactataattttattatatgcagtatatatcctctctttttagaacagtgcttctcaagtatttgggttcaggatatttttatatttttaaaaattatcgagaaccccaaagaactggcttttgtttattgggttatatctgttgctatttacgatattagaaattaaaactttgaacacttaaaatatgtatttattcatttagaaataatagtagtgaatttattacccgtgaatatgtgatgtgtttttatgaaaaataataaaacttttcaaaatagaaataaattagccagaggattagcattgctttacatttttatacgtcttttaaatataagtagaaggcagctagaccctcctatctgcttctgcattcaatccgttgtgacatcacaggccatttagcctctgaaaaatttcattgtatattcatgagagaatgagaaagataaagggaaaataatatgttattatgtgaagagttttacttggtgacacctgaaagggtcttgcacaatcctagggggtccctaaccccactttgagaattactgttctaagataatttatacatttgagacatcagtattgtaactggttttaatgatgcttccagttcctctacaataaggctttactgatactgatttcttgattctgttaatgtagtacatcatcaaataattcgtcctacacagtgtcagtaaaaatggagtagggtgatctataggaacaaacaattcccaaatctcaacgggtcaccagccctctgcacagaggaccctcatcctggactctgtctctggctgaggagcagccaccccatctgaaatgacagtcactgtggtagaggaacagagagcatgcctaaccaggtgctgcctctgagctcttctgccagagtgatacccattgctccaagggaggtacaatcttaccttggcccagaagaaaagaacattgaaaaatgtgtgaccaacacagaaggtgcatgagcaaaatattctttgagtccttgtctatctaagtattgattctgccctcatacgtgaatcattgaataaggtatacatttttccattttaatttttttggacccattctcaagaactgaatgggtatacactttttttagtagtttcctcttacctctaggtttataggtttgcatcattgctttagacatttagggtttcaaattcacttatttttccctttagggcttttccccatatgttctgggaaattctccctcctttatcttataaaaattttcattcactttttaaaaatttcacaatcattttgaatttccaaggtcgttttattttctggttgtttcttttctgcatggaatttttggtacaatatattctctttctgtgtgataatatttgttgtttagaaattcttttttgttccctgaaacatctgtatttccgctagggtaattttttgccttttgcttatcttggttttactccttaatgttgtaggtttccacaaatgctgtggtctgttgtagtctgttcatgcttaccagcaagatgctgaaaagtaaacttgaaactccatttaatgagatgggcttgcaaacttgtgggcttcactgagcaaataccaaatccctgaaggtaaaggccttttctctgagtcatttatatttttcttaagaggaaacctccagtcttctgcctgattgtgggtgttctgtgtcgtagagcaaactgtttttaattttgcctttggaacaatctctcgattttcatctctgcatctccttctcaaccaccactgcatctctgggaggctgcaggacacgctggatccttttctgacctcaggaagcatcctccaccttcaatagcaatgagtacccctcagaccactttttctctttcatacttaggttaaaatttctcatctaattcctttctcttcatcattgtaactttaattcctttactgtcattttaggagatattctagtgaaagaggagaaaaacagttgtcattaatcaacgattttaaaccagaaggctttttcttttttaaaagaattcaatggataaatggtgcatgtctggagaatgggaaattttagtgatcctctattctatcctgatgcatgtttaaggaatggaaagtcccaatgaccatttcctggtgggataaaaaaaatcctggaagtcttcataccgtttagaaatacagataaatttgttaaggcctattagcaaggggaacaatttagcaagtaggaatcagaactacaaacttttgtgattaaaaattagtttcccaggcacagccttaatgtctgaaatccagaggtctccaagtttagacagattaatgtgtcctagttttgcatatccacacaaatctccatgttggaccagagaaagagtgattttcttgtgactgtttttttttttttttttttttttttgagatggagtcttgcctctgtcactcaggctggagtgcagtggcacgatctcagctcactgcaagctccgcctcctgggttcacgccattctcctgtctcagcctctcgagtagctgggactacaggcacctgccaccatgcccggctaattttttgtatttttagtagagacaggtttcaccatgttagccaggatggtctcgatctcctgaccttgtgatccgcctgtctcggcctcccaaagtgctgggattacaggcgtgagccaccgcgcccggccttcttgtgtattcttaatcaaaccttaccagatgagagtctttgaaccaattttatgatgcagaatgccaccctccttttgcagttacagatggaggagatacatctcctttacatctcctgagatttcctctctttgttgttaactaagaagacttgcagttcagtgttaggttctgtaatatctcagccagatttttatttctttctctgtaagttaaagttctccagagaaacagaaccaataggatgtgtatatacagagaaagagatttgttataaggaattggctcttgcaattatgaaggctggcaagtccaaaatctgtagtgtgggcctgctgtttggagacccaggagagctgatggtgcagctccagtctgaatgcagtctactagaggattctttctttcttggggacactagtcttttggttctattcaggctttcaattggttgggcaagccccacccacattatggaaggcaatctgccctactccaaattcaccaatgtaaatgttaatcttatccaaaaacaccctcaaagttggcatataaaattaattaccacagtatcatgtcaattcctataaagattttgacatcttttaattgcatattttccctagagagttcaggtgaaggtctctttataatagtttgattggaacagggtgagcctttttacttctatgtacaggtctttcttaagttcactgttttcatcttttccaccttgatttttcccaaaataaataaattccattcattctggtctccctacaagaatgcttattttatacatgttggctctccattggccatccttcatgtctaaaatcttctaaccaccacaaacctcttggaaactcagtgtctacttccacgttgtatctttgtttcttaggatggtcgcagagatccagaacgtagagggtcagaacctgcaggagcaggtttgccctgagcccattttcaggttcttcagagaaaacaaggtggagattgcaagtgcaataacaaggccatttcctttccttatgggcctccgagaccgctccttcatctccgagcagatgtatgaagtaagtaagaatttccaaatgatgataaaccaggtccatactcaattatgccaaacttcaagatgcaatgagcaggctaaagggcctcctgtgagtggggaccttcaccattctgtaggttaggaggtgacaggagaagcaggcatcacagaaaacctcccttcttctgtagtaaatgttgggggagggccacagtgagggaggtggggcaggagagagaatgggaatgctgtatgggtgcagatcatcctaggtacttgtaaacaatctactaatggtagccataattaaaataaataagtgacctaggcagcattttattccaaagcctacttatttgaaacacttgaaactgagatttttttgaaactcacagtgaagttgtgtcattttaggttacatttggaagtggatgcttgctactgtctctccaaatcattgtttgatctttggacatttctagagccctagaatgcaagttaatgttagcagtggatgcccttagggatactgaggacaaggcttcttcttgtctttgtgaattttctgtgccctttggccaggagtcatagtgggggctggttgattggtttcctggagctcgtcaggccaggccaatcctagtagtggttattgtccatgcaacagaacagccttgttaaggccactcctgaaataacctggccaggctctaaagccatacacaacattcaactttgaacccacacttattatttaaaattactctctccccttaagtgtacaacaatgtcagagagtcaggttcaaaaaattagagtgtatttttatggtggaggacatttaagaagtcatccaaatatacgcaaaattctaacatttcacaagagaacagatgttctatctacaacctaaaagtcttttgtaacccataaatctctagctacataattctccatttaatatttttaagcattttcaagaagcttttagaaacctggtcccagtgacaagagtgatgtattgtgtactcagtgaactggagaagacatttggctggtcacatctggaagcattgttcagcaggattaacctgatggcctatcctgatttaaacgagatttacagaagcttccagaatggtaactatagctctcaacagctttgggggattcaagcccatttcattcattgattcattcattcactcttcattcatatttgacaaatatttgactgagtgactattacatgccaagcccagggggaatataatgatgaaaaaacacacatgtcccatgtccttatggagtttacatacagtgggagtgacagacgttaaccaagtaatcctgcaaatggttgctcagccaggacttgattttgatgctgtaaaacatagggttgaagtctctatttttttgaaggaatacatgagtgatgtcttttcatgggaaaggaggaagccttctctgatatttgcagatatgttcaaagataaaacaattttctttgtattagaaaatttatcatccagtgcagtcctgtgtcaacttgtttctccaaacaaagactggagaagtcacgaagagagcctagcacatactggtacactgaggaggagctgcatgtgaaagctatgaagacagaaaagggggttggtgggggcctttccgaaccatgtggttgaattgcagactgtgggaggcagggtgtgagagctgactctggagaaagaagttgaagtggattctggaaggcttgacaccctgtgctaaggaatctggagtttaatttttggaaaataaagaaggaataaagggcatttaaacgggaaaagtaaaagaagtcagtatgaagaatgggatgtgttgatttgtgaatactataccttgattcaaaaaagaggtatcttgttttcatattatgatacatccaagtcagagaaaggtctagaggaagtcaaatactgtgcatgcctcctttggtatccatgagggattggtttcaggaatacccaccactctcagtcctgaatgcttaagtcccttatataaaatggcgtagtatttgtgtataacctatgcacattgcaccagtatactttaaatcatctctagattacaatacctaatacaatgtaaatgctatgtaaatagttgttaaattgtatttttcatttgattatttttaatttttgtattgttattttatttatttatttattgagatggagttcactctgtcacccaggctggagtgcagtggtgtgatcttggctactgcaacctccacctcctgggttcaagtgattttcctgcctcagcctcctgagtatctgggattacagtcacccaccaccacacccggttaattcttttgtatttttagtagagacagggtttcgccatgttggcaaggctggtcttgaacccccgacctcaggtgatctgcctgccttggcttccccaaatgctgggattacagacatgagccaccatgcctggcctgttattatctttaacttttgtcccacgtttttaatctgagggtgggtgaatccacagatcccaagccaactgtacctaggcacaaattttgagtcaatatttgtattttaaccagggtgttccaggctgtggcaatgaagggaatgatgttacttctactgcccacatctcaggggctctgattctgtctgtggactgtggggatcctcctggccccagcatccacatctcatatgttagtatctggcacttcctgtgtttgggtgacaggtacctgaggctcacgactgcccactgcctcagactatgagtagaaatgtgagaaatgggcagaagtagaatgaattgtaaaaagattgaaaaaagaaaaaataaacctctacttatactacacaacatccacaaaaaaataattcaagttggatcacaaatctagaagttaagactacaagtataaagctgctaaaagagaaaacataagacagtgtgtttgcaaactgagagtaggcagtaatttgctatacaggacacaaaaaaacatggatcataaaagaaaaacttggtaagttagatgtcaacaaattaaaaactatgcatccaaagtcaccattaagaaaaggaaaaaacaagccatagactgggagacaatattttgcaatacacatatctaacaaaggattgtactcacaaaatatgaagaactcctataaatgaataataaaaggacacatcaccaattcaaaaaatggacaaacgatttgaacagacatttcaagacaggagatataaaatgtccagcaagaatataaagtgtatgacattattaatcatgagggaaatgcaaattaaagttatagtgagatatcattcactcactagaattgctaaaattaaaaagactgacaataccaagtgctgatgagaatatggaacaattggacctcccatcccttgctggtaggaatgtaaaatgataacgaccactttgggaaagtgcctggcaatttcctataaagttaaatctaacctatgatcttggcagtttcactcctaggtatttacatgagagaaatgaaaatatgttcatgcaaagatttgtttaagaatgtttatggcagccttattcataataactaaaatctggaaccaacccaaatgctcatcaacggagggtagataaactatgactaatttatagagtataatactattcagcaataaaaagaatgaactgttatcacatagagcaacatggataaatctcaaaaacattatgttgagcaaaataagcaagttgtaagagtacatactgcatgatcctatttatataagtacaagtacagacaatacagacaagtacagtgccagaaaggaaggcgccattgctggtgataggaaccagaacagtggtgtcttaagcacaaagcaattttctgggatggtggaaatgttctgaatcttgactgggatgttggtttcacaatgatttacacttaagatatgtgcctctcaatgaaaaaaaggggaacaaggctctgttggacctcgggggtgggagatcctggggcttggacatcaagttcatcttgagcacactgaggtctctcctctggtcactgtctgagtttggtaattttcacattgttttcctcagtatgctatgaacactcacctctccaaatgaataatgtaaacgatttagaagatagacccagattactaccatatggtaaacaaggtaactatcatttagctgatcaatgcccttattaaagttttgcttccttgccttcatggaggcaaatcttgtatttcctctcctgtcttagccctctgttatctcccagtcctcctcccctcacacagccatgtacctgcccttatctgccaacagatgtgagagaaccaatgaaaaaggagatctgatctcttgaatagatggagtctccattggtggagaatataagaagagaaaatgggaaaggtagacagagaataatacaggacaaattacatgaatggattccatcttctaaaggaacataaaagtcctaccctccgaggttgagataaggggattatttttaattaatttcatagaactattaagagaaactcagaaataacctaagccatatcagattcaggtgagagatattccttacggagatgaccagttaggggtctctagtactgtggtcacagtccaagaggggagtttggatatggagagagaggggagcctgaaagatagaattgcgcagggagacaaaactgaaatagtgttggcagatagaagatcaaagtgaaatgggagaaacagaaatggaaagagaggaagtataagacacagcagagaaaaggtaaaccgaaacatctgccaaggatcagaggtaaaaatggagagagaagtatatggaaaaggaaagatgagaggaaaataaataccaagaaatggggaaagtagagaggtacagaggcaactatgtagataaagagttaagaaaaaaagggtgtaaaacacttgagagtgaaaagtggataaaagggagagagaaacagactgggacagtgtaggtttgaggtaagagcactggatatccataactttacaagggtttattccattaaccgtaagttttcagaatgaactgttcccacatcaaagtggcacttgcatgatactcagatttcaatagatctctcccagaatagtccaatgattcccaagcacaaatctccactctaaattatctttagagtacatttattcatggacctgaggacctttactcaagggtcagatagacatctacacttgatttttttcaagaaccttaaacttggtactttgagaactgaaagccacatcttcattgctcaagttagatcgaactcctctgcagcactctttctctcagagacggatcactattatcccatggtttttcaagttggaaacctagtcaagtcatcatggatgactcctcccttgccctcaaatacatgccagttatgcagccaatgtaatcatttcatcttcaggttgcccctggcctgtccatctttgcatccccaagaccaggtctctggtccagatctccatcaccctcatgattctcagggcaacatcctttgctcatctcctccctctaatcttgcttccatcaaatgtgttatttgcacttcaactagatgggatattttaaagtgcacatcagattgtatcattttcctacttacctccttaatacactaaggattaaataaatgggtttttaagtagcatccaaaggcatccacaatgagccacctgcttacttctccagcttaatccctgcctcctgaaatattacttcaaggtggaataaaatttcccccaataatttcaattgttaaatctctctttcaaactgagcctttccctatgttttctctatgctgccttatttagaattgttttcctgtcccactatcctccatttacccttctccaatccagctaaatcctacttagaatatatgatcaaagggaggtctttctttagagaaagctagaaaggcacaattgggagaccaaggatgggagagaaagagcagtatcagagaaagcaagagaaaaaatttgcaggagcagagaagagagaaatgcatctaggaaagagaggctccaagaaacatccgcagaaaaaaacagaggcagagattgaggaaatgtacagaaacaggtggaaagacatgagtgagaaaatgggaaagagaacaaggtataaggaaaggaagactcccccacagtggatgaattattctcagcctctggtgaaggttactgaaggactgaatcctcaggtcaggttgtttggggagaggggaccttccagattatcaggttttcttagttttctcattatttgttttcttgttttgatggctttttgaccataaatcaagacatctaagggatttcattcctttcggcagagaacagcaatgcctgtcatgaaatggatgatatagcagtgcctcaggaagccttgagctcctcgccaaggtgtgagccaggtaaggaaggagtgacttgctctccctgacctgcagggtgtcaggaggtggaattcagagctggtgtttcctaatgcattttactctgagtacatgccacaggcaaaagatccattttgtccttggatcctataattctgctaaattttcctaagtgtatgttatagtagaaatatgctagagaaggatgatgtctttcatgtctactaataataaaaacttgattatacctacccaccacttactttctctagagaataaaaacgattattgtttgttactattattattttgtcccttactatagaaagccttcaaaagaaacatgttccatcagaccaactactcgaaaaactaaatgataatttttgccaaatattttccattgtgttactatcttatctagttattgttcaaagaattttggcaaacaagatgtcattttatctccacagcttatgaattttgatggataaacttttgcttatttgtattttatagctaaataaagtagaagtagaagcatagcaatgtgtaaggtcttttaccaggtcaaattagtcaagcaagaacatgacccacatccctgctgactcactgcggtgatggttgtgtgaatttggcagagatcagggtagccagggtcatggattggagttcacacaggagacccaaggaggcctgcaggttcttaggggagtgggccagggcctggtgcaaggagactcttattcagcaaaagcatttccatggccagagcagggaaaagcagagagaaacggtaagattggaatctgccatgtgggatgcaagaaatccagaagaagagaaccagaaagaaaaatggagacacaagtaggaaaatgtgatggagggcattgaagagcaacagaaaagaaaaagagagggaatcccagggagtcaaggagatggacggtgcttcatggcgtagaagcaagagtgtgtggtaaccaaaaagtgagaaggagaaaggaggtagcagagagatgatcagaaggaaaacaggcagagcaaggctgtggcggggctcaggcgaggtccttggagcaatagtgtttttttgcaaggagaagctcacttgagtgctgaacaccaggattcagcaggagcatcctgaggtctgtgctctcatcactgtgccttgtttatttccaggtttctcttcagagtcttgtgagcagttagctctcccaaaggctggtggaggagatgctgaagatgcacccagcctactaccaggtgggggaggtaattatgatttaaatgaccaattatctcattaaattagttggcctatctctatgcaaccaacacttccttctctctccaccaccaaccctgtaacacacttttgttcagcctgtggttgttttccccaggtgtgtgggaggcaagaggtaaaggacggctaagtcctttagtggaggggctcctgggcagagagcttaagggtacagagtaataaaaattactctgattggaggcaccaaatggtgttgcctaagtgggcccaattttatctacatgaatattgaatctaaatcctaccaggatggggtttgagaaaagagagagaattttaaacttacttgccagggattatttaggaataatgaaatactgtatatagaagagacaaagtggaagtgacaaagttagaagaatgaatagggatataacggggcaaagaggtaacaaacatcacgaaggaagaaagagacagaaatgcaaagaaatggtagaagtcagggagaggaagtcaagtcaaagagatcctggagttggtttatggtgcagatgcagcaatgtgtaaagacagggttagagggagaaaaaagaaggagagagagggagagaggggaaaggggcctgacaaggtgctagaagaagtagagccacttttgtttggtgcaaagatacctttattcccagggagcagttctacacccgaatattagagctcagcatggatccaggtaggtgtccaggtcactgccaattgtctgtcatgttcctctttcactctgcagtgtcctgtaaacttgctatacaaatagatgaaggagaatcagaagaaatgcccaagttactgccttatgatacagaaggtaattaggatttaaattaaagctttatttttctgtcaacatacaaaaacacctactctttcatctcccttcccattcccccatctattcatgtattcatccatatatccatccatccatccattcatccatccatccatatatccatccatccatctgtatattcatctgtccatccatccatccagccatccatcaatccatgcatccctccccacatacagacagagacagtctatgtccagcttcttcctgctttccttaagaggcacaagtagcaaaagaaggatgagctcagactggttggggctttcctgcatataggacatagggaaagagagagagaaagaaaaatatagtttgaatcgttaaataaagagagatctgagtgattgccagttttacctcaatagttgtgggatccaaatattaccacgttgggtaacatttgggtaatattaccacattgggtaacatttgggtaatattaccacattgggttataaggaaggggagataattttcaacttattttctcgaggttatgccaacagcatggatataatgagtatattgcaatatagaaaactcagtgaaagactgttgaaatgaacttcacaaagggaagggtccctgcccctttgttaatggcaaaagatgaggcctttgatactatggcagaaaaataagacagaatatacagaaagactgaagtttaaatttttagatttaaattttggattgaaaaattaggaacagaaagctaattagagagaacagatagaggcatggaaatgagcaccatggaagaaaggagataagcttgattattaaatatggcacaggaattaaaaggtggagaaaatactgtgagaggaacagagagaagaaaaatgctcgaagacagagacagtggaggagaggcacaaaagttgtacacagagaaaaagagaaaggagaataagtgaagttagcagagagtgaaaactgcttgcaagagatggggaacaatatgggacattgtagggatggagggaagattcactagacagaaataacttctggcccaagaatgagacatgttagcagcgagttttcacattatggtgtccccagcctatcaaaatggcacctgtaatgtcctcagaggcagtcgacctccccctgaggctttcatgtctctcccatctataacttaatgatttcaaaacacatatgtccagatttatcttctaagttcattcatctgagtacctgaatacgttcatgaagatatctgaaagacctctccatttggatgtttttcaggaacctcaatacaagacacctccaagagtacataccatctttcctgacacagatctgactcctctcccagtgttccctatctcaggatgaaacactattactccattcttgaagcagaaacctaggagccactcatgactcaccccacctccctcaacttaaacaccccatcaaccatccagtagacttttagtgagttctacatatctcacctgtccatttccttccaccccaacacaaaaactctggtaagatctctctcttggactggagcaacagcctctagactcacatctttcctctgatcttgtacctctcacatccattctttccaactcaaacaactctttcaaaaattgaagttggcttatcttacatttctactttaaatcaataactacttggggtcataaggattaaatctattttttcccccagggctccagcttcatgtctgcctctcctgcaattacttcaaggtttatatacaaattttctagtcattgtcattttctgatgactctttctcatctgagctttcctaaaggcttagccctgtgcttgaaaaagtcaccttgtttcactacaatctccatcatgctcactaatctagtgaaattatatggaaattacatacactctcagagatgccttttttgatccctagttctagaaagcaacgggatgatagatgcggcaaggacatacagcacagcaccaggggagaaacagggagaggaggaaggcaggaacagtcccagaaaaagaaaccaagacaaggagaagtaccaagagagtccagagggaagagacaaaggtaggaacagaagaagcagagacatgtgtcaagggtgaaaatgagagtgccaacatggggtgggagaccaggtgggcaaggtttctgacagtctctatcagattactggattgcacaagagcttcttttaccctcacaaaatctttaacatcgatatgcaaacagctgtatgtctatcttacagactgagaaataaagcacagaaatgcaagcaggatattatcacaaaggcaaagtagaaaaggaagagtgggcaccagtgtcctggatgtgtcactgggtgatggttgtgcaaggccagctgggggttcagggccaggtcacagggtcagaatagaaagaagtccaaggagttctgcaggttcccggaggagtggaccagggatcaatgtaaggctttaaggaaaaaaaatgctaatgggagggaagggaaatcatggaaacacagcatggaaatagagcctgccctttggaataggagagggatctagaataagagctaaagaaataatagaaaagggatatggtatcactgaaaaagaaaaaagacatagaaacaggagacaagagaagccagttggagagaagatcagacaatccaagcgctgctcagctaggagggaattatgtggaggcagaacggtgaggaggacactgagaattacagagaaggagaaagaggagctgcaacaaggtggagaaaaggcggaacaagacaggggtggctctcagcatttgcccatcttggatggcatgaacacactgaggcctgtgtccaagtcaccctctgtggtctgtcaatttcttgtttatctgcagagacctttgatctaaaaactccccaagtcactaatgaaggagaaccagagaaggggctctgtctactaccaggtgaaggagaaggtaattatgatttaagtttttaaatatttgagtacatctttgttttctagttggcatggaaaaaaagtttccctttctcccatcctacccttcccttcttcacattcgcatacatacagatggaattatgtcaattttctgttgtgcctttttgaaaactgtgagagagacaaaggatcaaggtgagctgagcccctgagtggggaccatatttctgcatggggaatgtagggagaacgaatataccagaggtaggctggggcgccagagaagtgcgtgggtgatgttattaaacacacattaaacctaaataacagcagattatggcaactgacgcaggggagaatgttttcagcctacttccagaaggatctggagcacagacatgttttgtgaaagaccgaaggcttgcaactgaggaaagtcatgcaggagacccttgggatggtgctgacaagggaaggacctgtggtgctatagcccctgcgtgaacagaagatcttttccaacctggaagaagataactttgagaatgaggaaaatatataaaataagggacattttaccagcatctaggagcataagataaaacccaaagaaacagaaaaggagaaagtagaagacacatagaaaggtgataacctcaaggagaaaagttagagaaaattgtacaaatggtagcaaatacaataacaacagcaatatgggaaggaagcacagaagaaattatgcagagaaagaaacagatcaaaataattaaagaacccatgaagagtgaaaactgttgtccaaggaaaggggcaggtcgagggcctatggagctgaagtcagtcactagatagaagcagctcccagcaaagggcacctctatcaatagtgagttttccaatccaggcccccctaggtagacagtggcacagaagcatactcagagagtaagagtactctttccccagtctcatctgctcaggtagtggaatgattctcatgtacatgtctgcgatgcagacctgctttccaagctcttccatccatgtgcctgaagatatttatcccaggaccctgccccttgcaatgtctttcaggaactacacacatccaaaagggaaaccaacacctcctccgaacctagaaactcccctttctccagggtttactctgtcagtaaagggatgaatatcctgtttgctcttctactcatcagactctttttctctgctttagcacaattgttctctgctttagcacaattggcaattgcaagatgtcaatcagatcattttcttttccccttagacgcggtgatctttgctgcacaggattagatgaattatccttcctgtggatttctgtggcttccacccttcatgggtccccagcccatatcatctgtcccatctctactaatggcatcaattgtttcaggagctgcaatgatctgatctttcttttatatgtgggcccttgagccacatttcccctgtactctgtattgttgccttggcccactcttctcctgatccctttccttatctggttcatttccaccatcccaaggatgcctttcctgatgcccagtatgagaaagggggtgacaaggaaataaatgagatggggaaagccaataaaaagcagagtcaggggtgcaagagaaaaaggcaggagcagagaatggagcagaaacacatggaaacaaagagaagcacctggagccactggcagcaggaaagcagggcaaaggcagaagaaatgtgcctaggaaagggggagggggagaaggagagagaattaggagtccaggcagcaagtgagctgatggatggttctcagccttggtgacagcaactggagtgcatccacttacaggccaggtgaacccacctacagaacccacctacaggccaggagggcctgggtgatggacagccccacctaggagatacttcagcttcccacgtcttcactaagttttctcttcataatttcttgagggatttcttttctttctgcagagggcagtgatgactgttcagaaatgtgtgatggagaagagccccaggaagcctctagctccctagcaagatgtgggtcaggtaaagaaggggaggatttctggccctgggctgcagagtgtcaggaggttgaatttggagcttgtgtttcctgattgtctttcctccaagtatacttcacagtgaaagaatgcaattaaatctgagatttttcacattttctatacatggatatttgagaaatgcagggaggaatcttgatatagaagtctgtgtttaacggaatgggttttattgtttgaacatatgtgtttagataatcacgtggtagttggattatgtcaaggcaaggcaatgtgttctccccttcatattctcatgcctattaatactgaagcattaaaatattttactgaataagatctcctgataccctcacaaaaccttaagatggggccagacaaactgggtaatcctattttacagatgaagaaataaaggtcagaatatgctaggaggaaaaaatgctctttgcctttatttttcttcactatcaatagtattacttgaatttaaaattctattctcactcactttttctatgggaatgaaaaagcttatcatccctctgctggtagatactttttatcattttattacaaacttgacaaagccttcaaagaaatggtatcctaccctctaattgacagaattcagatgatctctttatgagactaaatgctatttttgaccaatactcttcattatgttattggatcatgcagtatgtttttagaggactctgataagtgttacatttttaccctcagaaacctcaagatttaggcagggaaagtgctgttattgttgttttgaggagccagaaacacagacgtacatgtgacaccggtgtttgttaagacccaagaaggagggaaatgcggagaccagtgtcctggatgactccttacaggctttcagttctgtgaggcgggcatgggttagggtggggtcccatagactgagtccaatgtggatgcccaaagggtttttaggaatctgagagactctacctgggtttaatggaaagagacttttattaacaagtaaagcaagcttaaggagaggagtggaaaaattattgagagttagaaagtatgtaaatataatccatgatacgagataggagatatccagaaaaatagagccaggaaagatacacagagatagaatgtgcatagcagatgtagcatatcactgaaggagaaagagacagatattcagggagagatgtttggaagagaaagtccacagagccaaagagaaggacagttgccttcatagagtagcattctatgaaggtgtatgaagatataagtgtataccttcatgtgccttaataggcatagagtggggcaaggacataaagcacaggaccagggatgcaagagggaaatgagggaggcaggagcagtcccagaaaaagaaaccaagacaaggagaagtaccaagagagtccagcggcaagagacagaggtagaaacagaagaagcagagacatgtgtcaagcatgaaaatgagagtgccaacatggggtgggagaccaggtgggcaaggtttctgacagtctctatcagattactgggttgcacaagagctccttttaccctcacaaactcttaaacatctgtatgcaaacagctaaacgtctattttagactgagaaataaagcacagaaatgcaagcaggatattatcgcaaaggcaaagtagaaaaggaagagtgggcaccagtgtcctggatgtgtcactgggtgatggttgtgcaaggccagctgggggttcagggccgggtcacagggtcagaatagaaagaagcccaaggagttctgcaggttccctgaggagtgaaccagggatcaatgtaaggctttaaggaaaagaaaaatgctaccgggagggaagggagatcgtggaaacacagcatggaaatagagcctgctctatgggataggatggatctagaataagagctaaagaaataatagaaaagagatacaatatcactaaaaaagaaaaaagacatagaaacaggaggcaggagaggccagttggagagaagatcagacaatccaagcgctgctcagctaggagggaactatgtggaggcagaacggtgaggaggacactgagaattagagagaaggagaaagaggagatgtaacaagatggagaaaaggcggaacaagacaggggtggctcttagcattttcccatcttggatggcgtgaatgcactgaggtctgtgtccaagtcaccctctgtggtctgtcagtttcttgtttatctgcagagacctttgatctaaagactccccaagtcactaatgaaggagaaccagagaaggagctcagtctactaccaggtgaaggagaaggtaattatgatgtacatttttaggtatttgagtacatctttgttttccagttggcatgggaaaaaagcttccctttctcccatcctacccttctcttcttcacattcgcatacatacagatggaattatgtcaattttctgttgggctttttttgtaaattgtgagagacaaaggatcaagctaaggtgagcccctgagtggagaccatatccctgcatggagcatgtagggagatacaatatgccagaggtaggctgggggcaccagagaagaagttcctgggtgatgttattaaaaacacatgaaaccgaaatatcagcaggttatggtaattgaggcagggagattgttttcagcctactttcagaagtatcaggaacacagacgtaagttttgtgaatgattgaatgcttgcaattgagaaaagtcatgtggaagacccttgggatggagctgacaagcaaagcgtatgcagttttacagcccctgcgtaaacggaagaacttttccaacctgggagaagagaactttgagagtgaggaaaatatataaaatcgtggacattttacaggcatctaagaggttaaggtaaaacccaaagaaacagagacagaaaaggagaaagtgaaagacaaagtagaaagaggataatctcgataagaaataagaggcagagagaaaagttaagagaaaattatacaaatggaggcaaatacaaatgacaacaatgttggaaggaagcacagattaaactatgcagagaaagagatcaaaataattaaagtacccatgaagagtgcaaactatgtcggaggaaaggagcgggttgagggcctgtagagctgaagtcagagttactagacagcagcaacatccagcaaacggcacctctatcaatagtgagttttctgattaaggtccttctaggtagagagtgacacagaagcatactcagagggtaagaattctttctctccccgcagcctcatctgctcaggtagtggaatcattgtcaagcatttaatatctgtctgttaggcaggcctcccttccaagctcttccatctgtgtgcctgaagacttttatcttgggaccttctttattgcaatgtctttcaggaactgaacacctcacagtggaaaccagcacctcccctgaacttagaaactcctctttctccagggtttgctgtctcagtaaagggatgaatgtcctgtttgctcttctactcatcagactcattttttctgctttagcacaattgttatttgcaagatatcaatcagatcatcttcctttccccttagatgtggtgatctttgttgcacaggattagaagagttatccttcctgtggatttctgtggcttccacccttcatggggccccagcccatatcatctgtctcatctctactaatggcatcaatcatttcaggagctgcaatgatctgatctttcttttatatgtgggcccttgagccacacttcccctgtactatgtgttgttgccttggcccactctgctcctgatccccttccttatctggttcatttccactatcccaggaatgcctttcctgatacccagtatgaaaaagggggtgacaaggaaataaacaagatggggaaagctagtaaagagcagagtcaggggtgcaagagaaaaggatagaaacagagaaggggggcagaaacgcatggaaacaaagagaagcacctggagccactggcagcaggaaagcagggcagaggcctgagtctaatgtggaaagggggagggggagaaggagagagaattaggagtccaggcagcaagtgagctgatggatggttctcagccttggtggcagcaactggagtgtgtccacctacaggccaggtgaacccacagggcagaccaggaggacctgggtgggggacagccctacctgagagatacttcagctttccacatcttcactaagttttctcttcatgattttttgttggttgtatactgagacctctgagggatttccttcctttctgcagagggcagtgatgactgttcggaaatgtgtgatggagaagagcgccaggaagcctctagctccctagcaagacgtgggtcaggtaaggacggggggggggatttctggccctgggctgcagagtgtcaggaggttgaatttggagctcgtgtttcctgattgactttcctctgcatatacctcacagtgaaaggatctaattaatcctgagatttttcacattttctgtacatgaatcttttgtgaaatgcagggaggaatctttatacagaagtccatgtttaacagaatgggatttattgtttgaacatatgtgttcaggcagtctagtggtagtcaaaatatgccaaggcaaggcaatgtgttccctcctttatattctcatgcctttcaatactacagtattaaaatattttaccaaataagatctctcgataccctcacaaaaccttaagatgggggcaggcaaactgagtaatcctattttataggtgaagaaataaaggtcagaaatacggtaggaagaagcaatgctcttttgcctttattttttctagctatcaatactattatttgaatttatataaaatttctattctcaggaacaattttacactgttggtgggactgtaaactagttcaaccattgtggaagtcagtgtggtgattcctcagggatctagaactagaaataccatttgactcagccatcccattactgggtatatacccaaaggattataaatcatgctgctataaagacacatgcacacgtatgtttattgtggcactattcacaatagcaaagacttggaaccaacccaaatgtccaacaatgatagactggattaagaaaatgtggcacatatacaccatggaatactatgcagccataaaaaatgatgagtccatgtcctttgtagggacatggatgaagctggaaaccatcattctcagcaaactatcacaaggacaaaaaaccaaacactgcatgttctcactcataggtgggaattgaacaatgagaacacttggacacaagaagggggatatcacacaccagggcctattgtggggtgggggaggggggagggatagcattaggagatatacctaacgtaaatgatgagttaatgggtgcagcacaccaacacagcacatgtatacatatgtaacaaacctgcacgttgtgcacatgtaccctaaaacttaaagtataataaaaaaaatttctattctcactccctctatggaaataaaaaagggtatcattcctctgctggtagatacttttttatgattttttcacaaacttgacaaagccttcagtgtaatggtattctaccatctaattggcagaacttagatcaactatttgtgagactaaatggtatttttgaccagtactttccattatgtcattggatcatgcagtggtttttcagagtactctgataggtgttataattttactcacaaaaacctcaagacttagatagggaaggtgctgttattgctgttttaaggagccagaaacacagaaatgcatgtgacacgggtgtttgataagacccaagaaaaaagaaagagcagagaccagtgtcctggatgactccttacaggctttcagttctatgaggtgggcatgggttggggtggggtctcatagtctgagtccaatgtggatgcccaaagggtttttaggaatccaagagactctaccagggttcaatggaaagagacttttatctaacaaataaagaaagattagggagagataaggaaacattatcaagagttggaaaatacttgaatgtaatctacgatacgagataggagatatccagaaaaatagagccagaaaagagaaacagagaggcaatatgaaaagtatatgtagcacatcactgaaggaggaagagacagtaagggagaggagatgttaagaagagaaagtccagaaagccgaaaagaaccatagatgccgtcatagagtaataaaaagatatcactagtagaaggggctatcacttaggctgggtgcagtgggtcacccctgtaatcccagcaatttgggaggccaaggcaggtggatcacttgaggtcaggagttcaaggccagccgggccaacatggcaaaaccccatctctactaaaaatacaaaaattagctggttgtggtcgagcacacctgtagtcccagctactcgggaggctgaaacaagagagttgcttgaacccgggatgtggaggttgcagtcagctgagatcacatcactgcactccagcctggtgacagagcaagattccatctcagaagaaaaaaagaaaaaataaggggccaccacttaatatcaaacgaaaggctgaatttattgttcagttaagggatagttgtgcttgtgggtcagtttctctgaacagagaacgtttgtggaagtgtggatctcggtgactggcggccttcaaaagtgagatttgttagtggttagctgacctttagtgaaagcagggtcactggagtgtggctgttactgactgtctgactttcagaagcatggggaagtcaatggttggctggctttcagaggcctgtgtactggccagaagctattgttgattaattgggatgattctggttgttattgaccatatggccaaacaataatgagttttcctagaagtgtagcaactttcaattatcagtttcccctttaggaaatctctcatctaaagctgcaggaggcaccatcaagtattttccccatccaagatgtcttttctggaagaggaccctggaaacaaaatcctaggattccccttcactgagtaggagttatagagttgctagattgagagtgttatccttgcaaaggatgacataagaaaaagtaatgatgttttacaatacgttaatggaatggcagacaactgttgaaagtttttaattagcagcagaattgtgctgcttgcaatactatcctatttattcccttttgctccaagaatactcaccagccacccttgtggctgcagcgtttatcccaagtaaatttgccatgaaatatcttgcttttattattattttcacatcactctaatatattgactttggaaacaaaagacattcttctaattatagcattctggttttagtagtggtatttccatttacaaaatacagtaattgttgatcactgaaaatgtcaaatcctggaaaacgtggctttcccacatgtgctgttaacattgttactgaacaattgttggccgaagattcatttgatgaatcatatatttttaaaatagatgattctgatatggttctgtttagaaataactccaagaacagtttatatattttattttcacattgaaaatcaatcatgtttgcttcagcctcaaagaatgtgtttacgtaaaattaaatgagtgcagcaagctgcacttttttttttttctaaacgggaacagagttaaagttgatccaagtacaaaatctccagaaccatggactaatgcagtcacctgcaattgctttgaggcaactaggatgagatgtggctactagcaatggctctttgatgtctgtcacgttttgaagtgatacccctagagcatggcctgtttgtttatttatttatttatttatttttatttttccgtaagttattggggtacaggttgtatctggttacatgggtaagttctttagtggtgatttgtgagattttggtgcacccatcacctgagcagtatacgctgcaccatatttgtagtcttctatccctcgcacccctcccactcttccctccaagtccccaaagtccattgcatcattcttacacctttgcgtcctcatagcttagctcccacgtatcagtgagaacatacagtgtttggttttcctttcctgagttacttcacttaggatgatagtctccaagccgggcacggtggctcacgcctgtagtcccagcactttgggaggctgagatggatggatcacctgaggtcaggagtttgagaccaacctggccaacatggcaaaaccccgcctccgctaaaaaaaaaaaaatacaaaaattagtcaggcatggtagtgtgtgcctgtaatcccagctactagcaggggctgaggcaggagaattgcttgaacccgggaggtggaggtggtaatgagctgagatcacaccactgcactccagcctgggtgacagaacgagactccatctcaaaaaaaaaaatagtctccaatctcatccaggtcactgcaaatgctgttaattcattcctttttatggctgcgtagtattccatcatatatatatatatatatatatataccacatacatacatatataccacagtttctttatccacttgttaattggtgggcatttgggttggttccacaattttgcaattgtgaattgtactgctataaacatgcatgtgcaagtatctttttcgaataatgacttcttttcctctggatagatacccagtagtgggattgctggatcaaatggtagttctatttttagttctttaaggaatctctacactgttttccatagcagctgtactagtttacattcccatcagcagtgtagaagtgttccctattcactgcatccatgccagcatctactgtttttgattttttgattatggccattcttaaggagtgaggtggtatcgcattgtggttttgatttgcatttccctgatcattggtgatgttgagcaattttttcatatgttcattggccatttgtatatcttcttttacgaactgtctattcatgtccttagcccactttttgatgggattgtttgtttttttcttactgatttgtttaagttcattgtagattatggatattagtcttttgtcagatgtatagattgtgaagattttctcccactctgtgggttgtctgtttactctgctgactgttccttttgctgtgcaaaagctcttaggtttaattaagtcccagctatttatctttgtttttctttcatttgcttttgggttcttggtcatgaaggccttgcctaagccaatgtttagaagggtttttctgatgttatcttccagaatttttatagtttcaggccttagatttaagtccttgatccatcttgagttgatttttgtataaggtgagagatgaggatccagtttcattctcctacatgtggcttgccaattatcccagcaccatttgttgaatagggtgtcctttccccactttatggtttgtttgctttgtcaaagatcagttggctgtaagtatttgggtttacttctgggttctctgttctgtttcattggtctacgtctatttttgtaccagtaccactctgttttggtgactatggccttatagtatagtttgaaatcatgtcgtgtgatgcctccagatttgttctttttgcttagtcttgctttggctttgtgggctcctttttggttccatatgaattttagaggtgttttttctaattctgtgaagaagatggtggtattttgatggggattgcattgaatttgtgattgcttttggcggtatgatcattttcacaatattgattctacccatccatgaagcatgggatgtattttcatttgttcaggttgtctatgatttctttcagcaatgttttgtagttttccttgtagaggtctttcgactccctggttaggtatattcctaagtttttgttgttgttgttgttgttgttttgcagctattgtaaaaggggttgagttcttgatttgattctctgcttggtcactgttggtatatagaaaagctactgatttgtgtacattaatcgtgtatccagaaagtttgctgaattcttttatcagttctaggagctttctgggggagtccttagggttttcaaggtatacagtcatatcatcagcaaacagtgagaatttgacttcctatttaccaatttggatgctctttatttctttctcttgtctgattgctctggctaggacttccagtactatgttgaagaggagtggcgagagtgggcatccttgtcttgtttcagttctcagagggaaagctttcaacatttccccattcagtattatgttggctatgggtttgtcataggtggcttttattaccttaaggtatgtctcttgtatgctgattttgctgagagttttaatcataaggagatgctggattttgttgaatgctttttctgcatctattgaaatgatcatgtgatttttgtttttaattctgtttatgtggtgtatcatatttattgacttgcatatgttaagccatccctgcatccctggtatgaaacctacttcatcgtcgtggattatctttttgatatgttgttggattcagttggcaagtattttgttaaggattttagcatctatgttcatcaaggataccagtctgtagttttcttttttggctatgtcctttcctggtgttggtattagggtgatgctggcttcacagaatgaattagggagggttccttctttctctatcttgtggaatagtgtcaaaaggattggtaccaattctttgactgtctggtagcattctgctgtgaatccgtctgatcctgaacttttttttgttggtaatgtttaaattaccatttcagtcttgctgcttgttactggtctgttcaaggtatctaattcttcctgatttacactaggagggttgtatttttgcaggaatttatccatctcttctatgttttctagtttatgtacataaaggtattcatagtaaccttgaatgatcttttgtatttcactggtgtcagttgtagtatttcctgtttcatttctcagtgacgttattcgggttttctctcctcttggttaatcttgccaatggtctatccattttatttaccttttcgaagaaccagcttttgtttcatttatcgtttgtattttttttatttcaatttcatttagttctgctctgatctttgttatttcctttcttctgctgggtttgggtttggttttggtttgttcttgtttctctagttccttcagatgtgaccttagattgtcagtttgtgctctttcagtctttctgatgtaggtgttcagggccatgaactttcctcttagcaccgcctttgctctatcccagaggttttgattgtcattcagtttgaagaattactgtcattcagcttgaataattttttaatttccatcttgatttcgtttttgacccaatgctcattcaggagcaggttatttaattttcatgtatttgcatggttttggaggtgccttttggagttgatttccagtcttattctactgtggtctgagagagtgcttgatataattccaattttcttaaatttattgaggctcgttttatggcctatcatatggtctatcttggagaaagttccatgcactgttaaatagaatgtatattctgtggttgttggatgaaatgttctatatatatctgttaaatccatttgttccaaggtatagtttaaacccattgtttcattgttgactttctttcttgatgacctgtctagtgctgtcagtggagtattgaagttctccactattattgtgttgctgtctatctcatttcttaggtctattagtaattattttataaatttgggagccccaatgttaggtgcatatatgtttagaattgtcgtattttcctgttggacaaggctttttaccgttgtataatgtccctctgtgtctcttttaactgctgttgccttaaagtttgttttgtctaatataagaatagctacccctgcttgcttttggtgtccttttgcaagaaatgcctgtttccacccctttactttaagtttatgcgagtccttatgtgctaggtgagtctcctgaaggcagcagatggttggtgagttcttatcggttctgtggttctgtatcttttaagtggagcatttaggccatttacattcaatgttagtattaaaatgtgaggtaccattgcattcattgtgctttttgttgcctgtgtactttttgtttttattttttaacttgtattttatttttgttttataggtcctgtgtgatttatgctttaaagaggttccgttttgatgtgtttctaggatttgtttcaatattgagagctccttttagcagttcttgtagtggtggcttggtaatggcgaattctctcagcatttgtttgtctgaaaaagactgtatctttccttcgtatatgatgcttagttttgctggatacagaagtcttgtctgataattgttttgtttgaagaggctgaagatagggccccagtccctcctgtcttatatggtttctgccaagaaatctgctgttaatctgataggttctcctttggaggttacctggtgcttctgtctcacagctctaaagattctttccttcgtcttaaatttggttaacctgatgacaatgtgcctaggcgaagatctttttatgatgaatttccctggtgttctttgtgcttcttgtatttggatgtctaggtctctagcaaggccagggaagttttctttgattattcccccaaatatgttttccaagcttttagaattctcttcttcctcaggaacaccgattattcttaggtttggtcatttaacataatcccagacttcttggaggctttgttcatattttcttattctttttactttatctttgttggattgggttaattcaaagaccttgtctttgagctctgaatttctttcttctactttttcaattctattgctgaggttttccagagcatttcacatttctaaaagtgtgtccaaagtttcctgaattttttattgattttctttaagctatctatttgcttgaatatttctcccttcacttcttgtatcatattttggatttccttgcattgggctttgcctttctctggtccctccctgattagcttaataactaccctcctgaattcttttttgggtaaatcagggatttcttcttggttcggatccattgctggtgaactagtgtgatttttggggtgtgttaaagagccttgttttgtcatattaccagggttggttttctggttccttctcatttgggtaggctctgtcagagggagggtctagggctgaaggttgttgttcagattcttttgtcccataggatgttcccttgatgtactattctcctcctttttctatggatgtggcttcctgtgagccaaactgcagtaattgttgtctcttttctgggtctagtgacccagtgagtctaccaggctccaggctggtactcggggttgtctgcacagagtcctgtgatgtgaaccatctatgggtctctcagctgtggataccagtgcctgttctgctggaggtgaagggggtgcaatggactccatgggggtcctttggtggtttaatgttctatttttgtgctggttggcctcttgccaggaggtggcactttccagagagcatcagctgtggtattatggggaggaaccggtgatgggccagccctagaattcctaaggttatatgccctttgtcttcagctgccagggtggataaggaagagccgtcaggtgggggaggggctaggcatgtctgagctaagactctcgttggacatgtcttgctgcagctgctgtgggggatgggggtgagattcccatgtcactggagttgtgtacctgggaggattatggctgcctctgctgagtcatgcaggttgtcagggaaatgggggaaagctggcagtcacaggtctcacccagctcccatgcaaaccaaagggccagactcactcccaccatgccccgccccaacagcccccagaccatttccaggcttgaaaacctgccccaggctatctgcctcccagctgcagaagaaaaaggcttggttcttccccacctgtggagtctgcacaccggatttgcgccctcacaagagttctgtccaggaggcgtctcaccctgttcaaattgttacaaagttcagctagagattggcttctccctgtgtagttttaccccctgctcctctcccattgggtccctgtggtgccaggcaggaatggccttctaggggacccagccacctcccaggccctttccgctgcttccccctacacctgtatttccctcatctcttcagattgactcagctccaggtaaagtcggaaacttctcccacaaacagaccttcagcttctccagtgggggtgtgtgttcgggagaggagggtctccttttcccacttctgcagttggggcactctcagttttacgggggggggcggtctcctgggtcctgcaggtgcaatctgcttccttcagagggtcatgttgcctaggctggtcacgaaccatggcctattttttatgtacgtataaaagaaaaggattatgataaaggagaaagggagacaggagacctgtctcctgataatgtgataatagaagattcagtgtgggtgactgatgaaggagtattttaaaatcgtgaagatctgttccatttctgtgttccatgagaatggccccaagatatttgggtcaaatgtagggaggcctggtatttcagaaaagattgacccccattgtcttcaagactcagttaatcctagaaatcctcttatctttccttcagtcattggtcttgggaaactctgaagacattgtaacatttctttatataatattatttcctcagccaatagattatgtctgagaaaatagcctagtttttgttttgtttcattttgtttgttttacaaacttggagtttttccttagaagttttatgtccatttttgcccaactcaatgaatagattaagaaatgtctagatctatagagtataatagaggtgacctatgcatcagatcagagaagatgcaggtatgagctttgtatcccttaggccgtatttaaaacttggaagaagatggttgtgttcgtttttcattgctgcatgacaaataaccacaaatgtaatggcttactacaatacccacttgttatctcacagtcctgccagcagaagtgtgggtgggctcaacttagttctctgcttagagtctccttaggctgaaattaagatgtcagcccagctgaagtcttggctgaaggctctgagaatcttgcaatcgagctcacccaggttgttgacataatccagttcctcgtggttgttgaaccgaggtcacagctttgttgctggttgttggtcacggaccactctcagctcctggaagccaatcatattccttaatacattgcccctccatcttgaagccagcaatcttgtgtggaatccttctcacactttgaatctctgacttcctcttctgctgctggctagagaaaactccctgctcttaaaaggctcataaggttaaaccagatccactctattagtctctcttaaggacagctctgccatatcacataaggtaattatggaagtaatatctcattatgttcacagtcctcaggattagggaaagaaatatttgggggccatcttagaattctgcctatcgtcaaggaaattcctagaaaataactgtccagataagccactgattttcccaagcaaataatatttatctttatcaagtgagacattaaacaaagctgaacataaatatattaaaaattttggctttaggtgagactgaagagattgtagtaatctggttaggaggtacagggaagtgaggtatacctattttgtttattgcttgcagacctcaaatcatccgtagtgtaggtatactaatggtcaggtcaactatacatagatcatgtgtcagagaattttccaggacttctaaaattagtccttcttctgaacctttaatctggtagttctatttgcagaatagatccctacctattacatttatagaggttttgttgaaaacagtgttcctcagataatggtctgaaagtaatagattactggttgagatgtggaaacattcagtgatttttttctcttcttttatagacctacttgtcaaatgtgttacttactttggacatgacaaaacctccccattgcaagccagagtcattttagggaaaattttgccagttattaagaaaagtacaagagttagaatcatgatgaaagtatacagaggaagtgaacattttgtcggggagattatggctttggcaaagacaatcccgtgacaaacagcaaagaggccactatatttcagtataagtgtgaatggtgtgttccacatgaatgaagcagaaactgaaaaggggacatatgattaattacatgattgtagttgactccagattacatactaaacaaaatgattttctttcacaaattgacaagacactaggtgccctcatgaaggttttgatgagggacccaagaaaaaatgtgaccgaacatctttgcacagtttggctactgtctaatggacccacatccattagttttaggggctggcttgaattgaggacttatcagaccttgaccaccagctgtttgctttggatcactgtcttctaacattcagaaagcacaggaaaatcaggaacaagcacacatgaaataagactttttgtttttttggtggggttttgctatgttgcccaggatagtctagaattcctgagctcaagccatctgcctgtaatatgacctattaacaggcataagccaccatgcctggcagagataagactttttaaaaatagacagaagaggccgggtgtggtggctcatgcctataatcccagcactttgggaggccgagatgagtggatcacctgaggtcaggagttcgagaccagcctggccaacatggagaaatcccctctctactaaaattacaaaaattagccaggcgtggtggcaggcacctgtaatcccagctactttgggaggctgagacaggagaatctcttgaacccaggaggcggaggttgcagtgagccgagattacgcggttgcactccagcctgggcgacaagagtgaaactctgtctaaaaaaaaaaaaaaagacaaaagaaaggtaacagtagatgaagtagtgaaacaagtaaataagtaaataagcacattaattgagaaaatgtttgctaagtggtgtacttccaactgaaaatatctaattgtatctaattgtatacccatgtttaaataagataaattcagaactaggagctcagtgaaacaagtcagagttcgagttgttgttgagaaagattcacttggcagtaggtcagaaaaatgacctgagctggacacagtggcctgagattcatgcctgtggttccaagggtcccacaggacactccccagcaagaatcttcaagataatctcggcaggaactccaatttttgaagggctaggctactactcataatctgaaactaaaagctgatttattcctagctaagcaaggcacctagtgggaggaggccctgtgcttgtaagacacagtctctatagaaaaggaaactgcagttttatagagagttttaggaagcatattgtgtagggactccagaccttcagaaacaggagtgtttatgagtaatttagcatttggccatcaatgcaggctttgtggagggggtgttgctgactggctgggcttcagatatgtagaactgccagtaatgggctcgctttcagaaatgtgactggggatataagtagtcagtggccaattgggatgagtttaaatagttgcttttcactattgtcaaagaacagtagtattttctggaatgataagagtttccttgctttattctcaggactacaagtacaaaaataaaagtagagaaaaggaggatgaggtgcataacatggggagagcgtggctctgttatgtgtcaaatgtgattattggagcaggtatatttttttccagagaacagttcatcttagctcagaatatcagtgtgcagtatagcagcactggaaactcttctgtggtcattgtctcaggatccttggacaataattttcttgtttctcattagtgtctagtgaactagaaaatcacccaatgaatgaagaaggagaatcagaagagcttgcttctagcctgctatatgataatgtaccaggtaattatgacttaaaaatagtgaaaacagaaacagagttctgataaagagaaaaaggaggagaaaaaatagacttaaaggaagagtcaaatataaggaggagcagtgaaaggagaagatttcagaggaaaaagtaaagaagggggagcaacaagggtgcagaaaatagagtcactgggtcaaactgaaagtcttcatgaatcacaattttggcccaggagcggagcaatcagcatatgaaaatgagaagtgttcctgtgtcatgtgtttctcagaagaggtgccaggaagcccagaagcaaggacggaaagtgatcaagcgtgtggcacaatgggtaaggctgtctgagggccgtgggatgggggtggctcagtgggccccacagacccccagtagggtggaggtaggtgctccagtctgtccagaattctattctccgcatttgcttgacctgagcctttggggagctgcagggaggcaagagatcgttataaagtactatttaagaggatggactctgttgattagacatagatgatgtcatagaagtatactctttgcaatggcacttatcttgtgtattgcattagtatattaagttacacccaatcttccatgaagcccaggataccccagtgaacttctgctggtagataatagtgtcactttgctacaacttagaaaggccacactcaaaagacaactaatcccggtacttaattgtcaggaggaaagactgcaggtctactcttcttagcccaacacgtatttttgatagaagacccagggcccatcctagactcctagttctcagttcggtgggtttttggttcccctagaagaaagagaggaatgattatccaagcatctgtataaactcaagccttctgtagtatacattgtcctaaaatctataacttttatttattaatttctgtttcctcaccaccacttgttattttccagatactgtggatattgcaaacaactccactttgggaaaacccaagaggaaaagaagtaagaataaataagaatttatttgcttttggtattacaaatacgtttttaatgccagagttttaattttgtcattgttactatttctgttattatttgtaatactgtggtagacagaaggatgacctccctaagatgtctacctcctaatccctggacctgtaatctgctatcttacatgacaaaagggactttacagatacaattaagctagagaccttgaaatggggagatgatcctgggttatggggtgggcacaatctaatcttgtaggccttaaagagtggaaaacttttcctggctgtggagaaaggaagatgtgactatggaagaatcatcagaaatatgtcatgttgcaggctttgaagatggaagaagggaccaaggaatatgggtgacctctaggagctgaaaagacaaggaaatagcttgtcctttccagctcccagaaaggaattactttagccagtgagacccatgtcacacttctcactgacataactggaagaaaatacatttgtgttgttttaaaccactaaattggtggtaatttgttatggcagcaattaagagtaatacagattttggtacttagaagtagggtgtggctattaacatattcctgaaagtgttggcatgcctttgggattgggcaatggacagaggctggaagaattttagattatgatcggaaaagcctatattgccttgagtagtccttagtagaaacatggatgctaaagactgtgctagtgaggactgagaaggaagtgaagaacatgggagagaaagcctatattgcgttagagaaaacctggatcatcatgagcagactgttagtaaaaatatggaggttaactgtgttactggtgagcactcagaaggacataagaaagatgtggaaagggcctccttattatatagtggtctgtcctgtactcatgtgaaaagcagaactttctggatctatagctaaggagatttccaaacacagtgatcatggtgtgttgtggtgtcttttgctaattatagtaaaatgcaagagggaagaggtatattgaaggaagagctgctaaacgaaaaagaatcaagtcttgatgatttagaaaattcccagcctatccaggtcaaaaaacatgataaaatgaggagattcactgtcagggacgtgtgcttggtagaaacaacaaagactttttgccagttccctgggaagtagtgaaaggtcagattatacattcacaaaaaaagttatttgaagagacgtagcatgtgactcataagtccctcagccatctcagcagaagtcaaaaatagatgtgcgttgctacaaaaagaataaaatacctaggaatacagctaattagggaggtgaaagatctctacaaggagaactaaaaaccactgttcaaagaaatgacagatgacacaaacaaatggaaaaacattccatgttcatggataggaagaatcaatatcattttaaaatggtcatactgcccaaagcaatttataaattcaatgctattgccattaagctaccattgacattcctcacataactagaaaatacgattttagaattcacatggaaccaaaaaagagcctgaatagcaaaggcaatcctaagcaaaaagaacaaagctggagatatcatgctacccaatttcaagccatactacagggctacattaactgatatggtttggctgtgtccccactcaaatctcatcttgaattgtatctcccacaattcccaagtattgtgggagggacccagtggcaggtaattgaatcataggggccggtttttcctgtgctattctcataatagtgaatatgtcttcatgagatctaatagttttataagggggagtttccctgcacaagctctctctctttgcctgccatcatccatgtaagacgtgacttgctcctccttgtcttccaccatgattgtgaggcttccccagccacatggaactgtaagtccattaaactctttttcctgtataaattacccagtcttgggtgtgtctttatcaacagtatgaaaacagactaatacagtaaccaaatcaagatggtactggtacaagaacagacacatagcccagtggaacagaaaagagaacccagaaataagaccaaacacctacaactaactgatctttgacaaacctgacaaaaacaagcaatgggaaaaggattccttattcagtaaatggtactgggataatcagctagccatatacagaaaattgaaactggaccccttccttacaccatatacaaaaattatctcaagacagattaaagaattaaatgtaaaacccaaaactataaaaaccctggaagatgacctaggcaataccattcaggacataggcatgggcaaagagttcatgacaaagatgccaaaagcaattgcaataaaagcaaaaattgaaaaatgggatctaattaaactaaagagtttctgcacagcaaaagaagctatcatcagagtaaacagacaacttacagaatgggagaaaatttttgcaaactatgcatctgacaaagatctaacatccagcatctgtaaggtacttaaacaaatttacaagaaaaacaaacagccccattaaaaagtgggcaaaggatatcaacagataacttttcaagagaagacatacatgcagccagcaatcatatgaaacaaagctcaacatcactgatgattagagaaatgcaaatcaaaaccaaaatgagataccatctcacaccagtcagaatgactattattaaaaggtctaaaaacaacagatactgacgaggttgtggagaaaaaggaatgcttatacacactgttgctgggagtgtaaactagttcaactattgtggaagacagtgtggcaattcctcaaagacctaaagacagaaataccatttgacccagcaatcctattactgagtatatacccaaaggaatataaatcattctattataaagacatatgcacatgtatgcttatctcagcactgttcacagtagcaaagacatggaatcaacctaaatgtccagcaatgatagactggataaagaaaatgtggttcatgtacaccatggagtactgtgcagccataaaaaaagaataagatcatgtgctttgcagggacatggatggagctggagagtattatccttagcaaactaatgcaggaacagaaaactgaacaccacatgttctcacttataagtggtaacgaaatgatgagaacacatgaacacctagaggagaacaacacacactgaagcctatcagaaggttcagaaggtgaagggttggaggagggagaggatcaggaaaaataactaataagtatgaggcttaatacctggatgatgaaataatctgtataacaaacacccatgacacatgtttagctttgtaacaaacctgcacatatatccttgaacttaaagtataaaaaaaaaaaaaaatagatgtgtgaattcctaggaaagatctgtagggaagcttcatgtctaatggaggaaatcagaaatccccatgatatatgcaggagatccataagactcttgagggttttgtaccaagagaaacaaagatttccatgtcctatctcctagaacctataatctgttactttacatggcagaagggactttgaagatgtaattaagttaaggatcttgagataagatcacatgggccactaaagtcagagaacatatccttctgtcgagagagggatgtgtgactatggaagaatggtcagagagaatagagctggatgtggagatggatgcaggggtccatcaactaaagaatgtgggcagccttccgaagctggaaaaggctcctctgtggcctccagaaaggagcaaagccctgcagacaccttgattgattttagccctgttaggtgcatgtcagatttccaaccctcagaattatgagaccacaaatctgtgatttttttgtcactaaatttatggtaatttattacagcagcaataccttttgtaagacaaaaaaaaaatttcaccctatacggttatattcaatcttctaaactaacaatttatattttttcaaattacttacacctttatgctttttttttctgattttaaaatacttgttccctgtaaactttgctgtacatatttctatatttttttctatgctttgttagcacatttagaattatgtgatatatctaaatgaatacatttaaactgttacatttctttttaaatcaatataacatgcactggatattataaacatttaatatcttgccaacttaactgtaaaaaaaagttttatttcattcctgttttaacttacattgctttcatttttggtgcagttgagcattcttcatttgttattggccatttttgtttcttctcctacgagtgcctggaacttatattttgccagtgtgttgtctttttttccccatgctttaggacaacaggaatacttatatatgatatatactaagggttgactacgtgtgttgtcatatttgatgttattcttttacgtttctttgtggtataggcacatctcgtttgattgcacttcactttattgtactttgaggatattgtgagttttacaaattaaatgtttgtgacaaccctgtgtcaaaaaaagtctgttggtgccctttttccaacagcatgtgctcactttgtgtctctgtcacattttggtaattctcgcaatatttcaaattttattattattcttcttcctgttatggtagtatgaacagtggtaacaatgatctttgatgttactattctaactgtctatggcaccacacactgtgttcgtataagatggcaaacctaataaatgttgtgtgtgtttcaactgcttcactgaccagctgttcccctgtctctctccctctctttgactttcctctttcctgagacaaaaaaatatggaaattaagtcaattaataatcctacaatggcctctaagggctcaagttaaaggaagcgtcacatgtgtctcactttaaataaaaagctagaaatggtgaggcttagttaggaagccatgtcaaaagctgagaggctgaaaactaggcctgttgcagcaaacaatcagccaagttatgaagtgctactccagtgaacatacgaataataagaaagtagaacagtcttatcgctgatatggagaaagtatgagtggtctggatagaagatccaaccagccacaacattcccttaagccaagccttaatccagagtgaggcctaaactctcctcaattctatgaaggctgaaagatgtgagaagctgcataagaaaagtttgtggctagctgatgttggttcctgaggttgaaggaaagaagctgtctcataacattaaagtgcaaggcgaagctgcaaatgctgatgtaaaagctgcagaaggttgtccagaagatctagccaagatcctagatgaagatggctacactaaacaacagttttacagtgtagactaaacggccttttattggaagaagatgccatctagaactgtcatagctagagaggagaagtcaatgcctggtttcaaagctccacagaacaggctgagtctcttgttagaagctaaggcagcaggtgactttcccttgaagccaatactcattcaccattctgaaaatcctagggcccttaagaattattctaagtctactctgcctatgctgtataagtaaaataaagcccagatcatagaacatctgtttacaacatggtttactgagtattttaaacccactgttgagacatactcctcagaaaaaaagattcctttcaaaatattactgttcattgacagtgcacctagtcatccaggagctctgatggagatgtacaaggtgattagcattatttccatgcctgctaacacaacgtccattctgcagcccatggatcaaaaagtaatttcaacttgcaagtcttaatatttaagaaacacatgttgtaatgctatagctgtctctatacataatgattcttctgatgaatcttggcaaagtcaattggaaaccttctggaaaggattcaccattttacatgccataataacattcatgatatatgagaggaggtcaaaatatcaacattaacaggaatttagaagaagttgattacaatcctcgtggatgactttgaagtgttcaacacatcagtgaagaagtaattgcaagtgtggcagaaatagccaagagaaccagaattagaagtggagcctgaagatgtgattgaattgctgcaatctcatgataaaccttgagtggacaaggagttgcttcttaagaatgagcaaagaaagcagtttcttgagatggaatttatacctggtgaaaatgctgtgaacattgttgaaatgacaacaaaggatttagaatatattagttgataaagcagcagcaagatttgagaggatctaccgtgataaaatgctactcaatagcattgcatgctacagagaaatctttcaggaagagccaatcaatttagcaaacttcattactgtcttattttaagaaatttccacagacacctcagccttcatcagtcaccaccctagtcagtcagtagccaccaacatccaggcaggactttccaccagcaaagagattatgacttactgaaggctcaagtgatcatgagcattacatttagcaataaagtatgtttaagatatgttcattttattttagacacaatgctattgcacacttaatataccacagtatagtgtaaacataactttcatatgcactgggaaaccaaaacatttgtgtgatttaccttattgcaatattcactttattgcagtggtctgaaaccaagtatttctaagatatgcctgtatctttatcccaaagaagcttgaaatttttatctgatcaaatctgtcagccttttcatttatggtttccaggttttatgtaaaatttgcaaatatattgtccacctcataatttagaaacatgtttacttacttctagaatatttggaatactttttaatgtttaaatctataacacacatggaattcatttattggtatatgatgtgagatggtaattaagagatataacactggtagtttttttcttcatgattcaaaatactattttatgtatgttttccagtatatacagaactgtgtcttatcacatttctttatccattcatctgttgatagagacttaggttgtttctatgtcttaactactgtgaattatgctgcaatgaacatgtggatgcagatacctctttaagatattggtctcatttcctataaattcataccccaaagtgagatttctggattgtatgtatttctgtttttaactttttgaggaacctccatactgttttccataatggctgtaccaatttacattcccacttagagcatacaagagttccttttccccacaacctcaccaacacttgttatctcctgcctttttgctaatagctatcctaataggtgtgaggtgatgtttcattatggttttgagttacaattctctcatgattagtaatgttgattgctttttttataatccattggccattatatgtcttctttgggaaaacatttattaagatcctttgcccatttttaaatcagattatgacatgcttttgttttgttttgtttttttgctattgagttatgtgagttccttatatatatttaggtagtaacccttatcaaatacatggtttgcaaatgttttctcctattccgtaggttgccttttcatttttacaattatttcatttgctgtacaaaagctttttagagtgatgtaggtccacttgtttatttttgcttttgttcctgtgcttctggtgtcatatctaaagaataattgcccagactaacctcaaggagcttttcctctgttttcttctaggaattttatggttttatatttgacatttaagcctttaatctattttgagttaatttttgtatatggtgtaagccaagcgtctaatttcattcttttgcttgtggatattcagttttcttaggaccatttattgaagagactgtcttttctccattatttattcttggcacccttgtcaagattaaatgccccttcttgacatctgtattcagcatagtgatgtaagtcctagtcagagcaagtaagaaagaaagaaaaggcatccaaattggaaagaagttaaattgtctctgtttgcaggtgacatgatcttctatgtagaaaaccctatagactccatcaaaaaactgttggaactaacaaatgaattagtaaggttgcagaattcaaagatcagttgtgtttctatgcactaacaatgaactatccaaaaaataaattaagaaaacaatcccatttacaatagcaacaaaaagaataaaataggaaccaagttaacaagaggtgaaatatttgcacactgaaaactatgacattgatgaaagaaattgaaaaatatacaaataaatggaaagatatctcatgttcatgaactggaagaatagtgttaaaatgtccatattacccaaagtgatctgaagagtcaatgaaatctctatcaaaatttaaatgacatttttcacagaaataggtaaaaggaatcctaaaatttgtattgaatcataaaagactccaaatagtcaaagtaattttgaaaaaaaaggaaacaaactggaggcatcatactgtctgattttaaactatgttacaaagcaagagtaatcaaaaccatatggtactgtcataaaaacagacataaaccaatgcaattgaatagggaacccagaaataaacactcatgcatgtatgttcaagtaatctttgataaggacaacaattacagaattttctttatgtagatgttccacgcatccacttttcttatctgctttattgagctgtaatttgcataaaacaaattcatcaccttaaggtataacctaatttgttttaacaaatgtgtgcagttatataaatacctccacaatcatgacatgtatcattttcatcaccccaaagtccacttgcattcttctctccattctctggttctcgacaacagctgatctgttttttgctagtttgttttttaaaagatggggcctcactgtgtgttccaggatgaccttaaactcctgggctcaagtaatcctcctgcctcagactcccaaataagtgggaatacaggcatataccacccctaaaccaaggtgtttttttttttaatttgcaacctaatgtgtggtcaatatttgtaaatgttttctgccccttgagaataatgtacatttgaactatttgttaggctctggcttcactccatatatatcttttttatcaagcacaactttcttgtttaaatttgtgtccatagtaatttaaattttatttgctccatcagatttgcatacaaatgtgttaaattcttgcacatggttgtatatttgccaattcctctttatcttgttgctttactttaaatattttgaggctatttatgatttgtaactttttaatggatgtttttcttttatcattatacagcattctgctttatccctgttaatgcttttgccgtaaaatctcttttgccaagtactaacattgttacacaaacttttatgattttttaaaaatattttccactcactttatgtgatgcccttttgttcagttttcttttatgtctcttgtaactgcacttaacttttgtagttttgtctgatattcctagcttcttaataggtaaatttcaatttgtttacatttattgagtttccagatgtatacggacctatatcttctgtggtattgttgaccattctctatttgtatctttcgtgtctccttcctgctttttaatggattggtataaaactatatattctcccctttctccctgctggtttggaaattaaagataaaatttctgtaagcttttaaattatgccccaatcccaaaagatgacaaggatcttatcatggtttcactacaaactgaacaccccatctctaccattttggctattgtttaatattttatttttaactataaattttgaaactattatcatttttacagttgatatttacttaatttaaaaaaatattttgtatactcaccattgttctttttctttggtttcactttttgtctagctgaagtaaattctttgttttttctagtgagtgatctctaagtggtaaactctgtaagtgttgggtgtacaactttttctttactttgatagaactttttagctacattaaaaattccaggtcgataatttatttcttctcagtatagtaaggtgattactatattatttcctggaatctatggtgtggctaataacaattattctcttattgtaactaactgtaacttcttggtaaatattctgtcctttctctctaaaagcttttattccccaaaatttaatcacgaaaattttaagcatacagaagacttgggagaattgtacactaaacatcaatatactttcacatagattcacaattaacattgtatcattcctgctttatcacttttctattcatctatgcatttctctatccactcactaaccggtggtcaagtttgaaacatttcaaggctgcagacgttagcactattccccctcaactacgtcagaatgtatatcattaagtagagttcaatgtatgtttagagttcttttgttaagataaaatttacaatgaaatgcacaagtattaagtgtaccatttgatgagttcttataactgcatttttctgcaccatcaaaattcttatcaagatacagaacatgatcatcaccctggaaaggttccttacgccctttctggtgtatctccacccactatccatcagggcaatcactactcttctttttaactatgataatttggcttttaaaaaactttatataaataaggttttatagcatattctctttagagtgggatttatttcacacagcatgtttttgagattcatccatattgttggatgtctcagtagtttgttctttttcattgctaagtagtgtacattatctggatataccaaattttgtttataattctcctattgatggacacctcgagttttttaagtttttgctattatgaaaactctgctgagtacattcttgtaggagtcttcctgttttttcgtatctcctgcataaatacctagaaacaaaattgccgggatatagagtagatgcatcagttctttcccccaggacccatgaaaaggatggtgcagagcaagcccaggtggatgctgcactcataggtgtgtgcagcagcagaagaatgcttcactgaggaaacctatgggattataaggggaccaatagcaaacctgcccaaaccttacctctgagggagacattatctttttagctggaatttaagcaattctcctctggggatattaagcaaatctcctctggggatcttaagcaaatctcttctggaggcatctcctctggaaaatttctaaggagggagatgttctctactttatactggtcagggatacatttgccctataatctggaggctacatgatctctagcttccaaggccgctttggtattcaaatatccttgaagtgatactctgaggcacgtagaaatgccatggagaatggcctcccagcaaattcaccccacatttttgcttctggcaaatttccccatgaagacaccaccccatcagccactctgattattcggacccatgggtccacatccattcaatttttttcctgcaacatttaacaaatcttgacccagtgcagcggctcactcatgttatcccagtactttgggaggccaatacaggaggatcacttgaggtcaggagttcaaaaaccagcctggacaacatagtgagaccccgtatctacacacacacacgtacccacacacatttcataaactgtaaacgatctaggtcccttatgagcacctctaaggtacaagtccttatgtgagggaggcaagttagtgcctggctttcatacaagaagcacaatcccaagggcacacgtggtgctcccagaagggaagtgtatacaattgttgggcttccctgagtgggatgtacattagtaagggagaaggtgaacagtgtctcttacgtggctcctggctggctgtaagccttggggttcccagttctgtttatccttgatttgtttgtgtgtggctggggagagggtgggcatatgggggactgcttgaggacagtctgtccaatctgtcctatttgtccatgtcaccaaccaggtggcagtcccccctaacaaatgactgagaatagtggtggagactatgtctagagggttctgtgtgggacctcagaagctgggcccagcccctgccatctcatggctggtgcagagaggctgactcagcattctcagaggcgggagcgctggagtagtgtgttttccttctggacaaagcatccttgggttcttctgaaagacagatatcaccaatgctcctgttttctcccatacctctttagatgtctggatttttgctcttgcttcactgctgcaaaatctgctataccattccagtggctgtaccttcatcttttgccctaattatctccttttctcacttagactttccatctacaaaattagatagaagtagaggaaaagcattttataaaatgtgcctggagttaaatctgaatccctaggcactttgaaggccatagccaccaggctggtaggggaaagaatgaggcatcatccctaggaatgaccagggtcacaacagaatcctgaattttcaagataggtctacagaacactcgcaatccccaccacttttgtcctggtcactatccaggaaggagatgatccctttctggagattgctcccttcaatgagcctactgccctcccatagtgtgcggacaggaggagatgagggacagtcagaaaatcagtgcactgtggagtcacttttctgataaagggcacgtcagactgcaaatggcccagatggccagtttgaggacactgatgagtttctggggtcaccatagcgttcctggagtcagctgctctgcagcctgaaggagggctgacagtgtggaggcagtgctgagattatttaaggaaactatatagaaattctataatgattatgtaattacataatgaaaactctccatatcagagttcagaatatctcccaatttccaacacagaatattatccataacaccatcaacctcaaggaggatgtcctctcattgcacatttgaatttacacaacaaacacttgaaaaagcaacatgaaacagcagttatcattcactttaaggtgccagcaagagttaattttccattaaaaattttgttcaaaggaacgtcatctcctgtagtctctcccaagcccatggcccaaggctcatgcagaggtaaaatataactctgtactcaacctccacgctgctacactgatcataaagtattttgccccattcctgcggaccaaagtatgaaaaaaaatctttaatactattggcatataaaactcagagaattatatttatacctctgcataattaactttattctctttggtttgaaggaaaaaagagggggcatggctggagcagaatgagaatgagaaggcaggaaaacagccaacaaaatggtaagcaggcaaagtgaagtagttacagcttttgagtttattagggcactgtccattgtattctggaaggcctgcagttccccagagccagagttctatacctcctgtatccattaggatgtagactaacaggctgtgacaaagaggcctgagaatgcaatggcttcaacaaaatggtttctaatgcatgtaatagtccagaggcccacagttaatagggaggtgttatcatcctcagtatgactttctttcctagctcaaagtatttttattaatttggaaagacattcctaagagggctaaatgaagaaatcagggtgtatgtgtatgtgtgcacaatagtaaacatacatatatgtataaccatattttatgtgaaattcatacttgtgaagtatatttttatgtatcctgatatacacatatgtaattatttatctgtacatataaaaagacataaatatagaaaaatagatggcagttcattcataaaaatatatgcagtggttacatttggtcagtgtaatagaggtgatgtttatatatttttatctgtggtttttaaatgtatgtgtatatattaaaatattataaatcttcaacatttttaatgaaaaagtgttattcaaaaagtaacatatgcaaaaagaaaagactaggagaatatttttgcacaaatcatcatctggagatagccatcctcatctgtggctatctccaatggtgatgtttcatatcattttattttctgaatttcctgtaaatatatttattctttataatcaggcccctgaaattttcaaaatttattttagccatggtctgaggacttccattcttctagacgatgaaggctaagtctcattttctaaatgattgtcaattttgaatcagtggatctaaatagtaagattttagagtcctattgaaagttattaatttttaccaatcttgccagttgatgtggcttcctggttggtggatgtgacagctttgtttggaaagaaaaaaaagtggctgcgtgcattttaagaatggctgttttcaaattgaaaatttgtttggactcaatcattataacattttcatttaagtctgaatcattataacattctcatttaagtctgtgtgtatgtagacaaattctaagagacttcaatgtgcaattaaatcctgtgtgtaacttaaaagtcgacactcccaaaagcaaaaaatgctctggacacctgctcgaggggatccagaatgagacccaggactccctcacttgcgtttgttcctgcctgacagctgttgttctgcccagttctattaatacattttcccctgcctatccccagataatagcaaagccgacggccaggtggtctccagtgaaaagaaggcgaacgtgaatctgaaagacctttccaagattaggggtaagataaagtttgtccgctttccctttgccctacaggtcaatacaaattttactgaggtattgacgagcctagatccaccttaattgtttactcatcaagcttagtcaattggagagcagtgaaatctaaaagagcaaactcattataagcaggggttgtaagttgattgtattcatatcatagatcttatctgcccagtttctaaaatagttttcctctgtgttttatctcattttcctggaaattcctttgcctcaaatcattgttttattaaaatggctggacctggtaaattgtaagccgaatacaggtttattctctcactgccctttcaagtcctcctcctagatgagttctttcctgtcttgagcaagctctgtcgctttcttgttcccttttaaaaacagtaagagtctcatttcagtagttgggacctttctgacctagtattaaactacaatgtcttccccagtttaaagcaccttcgcttcttcagcctaggcaagccttagtctggaacacatatagttgggggtgacatggtcagtgtcttctcttattctgtcttggccctacccccactccatagctgttggcttggtcccatccaggattggggaggtgagagagatgggtgagatcagagtgtggaagtgtcttgcctgacaggtgcagccgtgaaatgacattgcaagtggttgatgcacaatcactagctctttcttccatgagatgctttcatcaagtccactgcaagggaaggggaggggtcaggcatcacagcttgacttattttgaaagaaatagagctttacttctacaacctggatgtgagtgaagggctgaacctggcataatcagttccaccaactctttctaaggttacatatgtggcctggtgcattgtcctaggatgcgggtgctcaactcaacctacttgcttgggactttctcaattttcccaatgaaactctcatttccaagccataggtccactttgggtctgattggtcctttttactttggtggcctaatatgctcatgatatgcttagaacttatagtacttaggaatgcataggctggaaaatatttcctcatgggcctacatgaccctgatcagcacccccagatggtggtcattggatggtggacatccagcacaagaaggaaggaacattttgctttcctgccttggaaaataaaacacatttggacaatagtaaacattgagatgcccattcacagccaattaacatgcacttgggagaatatcatcggctgcagtgtctgccatgtcaatccttaattactatttggaatgaaggctgcggaaatctcaattctacccattcctcatggttaaccttcttctgattagtttcttagatcctaatatttattttgtccaaagccatgtggacaaagccctggtcacatttactattactttcagcacgagggtacaaatatcttcccccaatgtgacatgtgcagcatacatctcacctatgggacacctaatagggtttcccttaagtcacagaactgtcatttatttgtgtctctgctgagagaaactgaaacgccttcacttaattttgtagttttgtctcaattttctctgaatattttagtttctgtaatgacggtaatcatcattttgatcttgcaaagattaaataaattaatggatatgtaagtgtttaatgtgtattatatgtcatatatatttcaaatatatatgtttggaatgaaatatgaaatgaaccttcaaaatatggaatgaagcatttatacttttgcttgagatatacgtgaaatactgatttcaattagtttttttcctaacataagaataggaaaatgaaatataaagtgaacctaacattagctatctaattcttcataccttaaaggctagggtttaaatctttttatttatacattaaacaggcttttggaaagttacatttaaatggaatttttgaaaagctgtaatatgtgtaatacagctgctcataaatgactgtgattatattattctactttctcagggagaaagagaggcaaacctggaacccgcttcactcagagtgacagagctgcacagaaaagagtccgatcaagaggtaaaaaagaaaacaggaatgaactttcaataactaaacatctaatttcctgtgcggtacactgtactttcagtaataaacccatttccttaattgttttatgaagctgtactaactagtgagaaatgtatcctatttagtcattttccaaaatgtgtcaaggaaagaaggaagtaagttggtgatggatctacaaccagatcccaggggcccaggggccactaaagtgctactttcactgaaatgataaatttcaaggctggagatagttcattgccgtataaagggtataacccataagtgatttaactgaccttcctctgactactcagaaagccacaggttgcacactaagggtgaaaaagagttgtggttagagatctgtgtcctaagactttctttttctttgtgtgggcttaggctgatcatttgactttctttgtctcagttttctcatctggaaagcaagagcatgaattaggccaactatctttctttctttctttctttctttctttctttctttctttctttctttctttctttctttctttctttttttattctttaagttctgagatacacgtgtagaatgtgcaggttctacaacccatcatctacattaggtatttctcctaatgctatccttcccctaacccccaaatcccgacaggccccggtgtgtgatgttctgtccctgtgtccatgtgtccttattgttcgacttccacttatgagtgagagcatgtgatgtttggttttctgttcctgtgttagtttgcccagaatgatggtttccagcttcatccatgtccctgtaaaggacaggaactcattctttttcatggctgcatagtatttcatggtgtatatgtgccacattttctttatccagtctatcattgatggacatttgggctggttcctagtctttgctattgtgaacactgctgcaataaacacacgtgtgtgtgtctttatagtagactgatttataatcctttgggtatatatccagtaatgggactgctgggtcaaatggtatttctggttctagatccttgaggaatcgccacactgtcttccataacggttgaactaatttacactgcaaccaacagtgttaaagcttacctatttctccacatcctcttcagcatctgttgtttcctgactttttaatgattgccattctaactggcgtgagatggtatctcattgtggttttgatttgcatttctctaatgaccagtgatgatgagcttttattcatgtttgttggccagataagtgtcttcttttaagaagtgtctgttcatatcctttgcccactttttgatggggttgtttttttcttgtaaatttgttttaagtttcttgtagattctggatattagccctttgtcagatagatagactgcaaaaattttctttcattctgtaggtaggccaaccatctttcttattagtccatcctggtcctaatagtctgcctttctaaaaatttgtctcaggaccaaggacagctcccccgtttatcatgacttctgttgcccaggctggagtgcagtggtgtgatctcactgcagactccacctcccaggatccagcaattctcctgacttagcctcccaagtagctgggattacaggtgggcaccaccatacctggctaatttttgtatttttggtagagatggagtttcgccatgttggccaggctggtctcgaactcctgacgtcaagtgatccacctgccttgccctcccaaagtgctgagattacaggtgtgagccaccacgcctggccctacacctttggttggaagggaaggattcactgctcaccctcctggagttcctttgaagacctttcacccccttctctgtgaaatcaggtctccagtcccccacctgcaaccccatataattttcagattattctagagctccctgagctcttctcttagctacggggaaagcagacaggacagagaaatgaactaaaggagagaacaaaaatagaaggcagacatcatctccattaggttatcccatcattaccctctccctgcttgccccgtcagtgctcaaatggggagactgaatatgatctctggagtcatctaaggctacccacctgcagcaaaacagcatagctggagagcttctgtcagaacagtgacagcaactgtgtttcattgtcatataagaatcagtggagcttacgagattaggagttaaaccagttttactgaagtctaatttctctgctaaagcattctattttgtatgaaatttgaaaggtgaaattggggtagacattctgtaattatgtatcaaaaatgccacttggaagaaagactttgaaactctagagggttttggaatagaatttcctaagtatccctcgtgtctttataggaattacctcagtagggaggggggacgtgcctttgcaaagtgagacagaatgaagaaatcctctctttcagcttcaagaaagcacaaagatgaaactgtggattttaaggctcctttgcttccagtgacctgtggtggggtgaagggaattttacataagaagaaattgcagcaaggtaggttttatggtcttctttaatttgcagctcctatctgaaggcatcacaagtagtggggaattatcatgtgaattacacatcattcaaggagtttggtcccagtttggcttgagggaaggaggaagggatttctaagatgacgtttacagactttaagaaatcgcaaccaccagatgctcacttgcacatggaatgtccagagggtgcccaaagaaccaaagagaaggcaggaacatcaattcacagatgaaaaatgtcacgtattttactttgaatcagacagaaaaatgaagaggccctcaacctcgaccttcatattctctctcccttctggagtgccatcaccagggcagggtgcttggtatagggagatgatcacagaatttgggatcagaaagcctgagttccagcctttgctgtttcaggagtgactgttccattctgagtagagaagggaacctttctgaacctgaaatgtctcatccaagagagggaacaataatgaaaaacctgcctcatgatgtagctgtgagaattaatttgcatattgatgtaaaatatgtaaatttacatgtttttactgtaaattataaaactttgccaaaaaatgtctattagaatggccatcatctcagaccaatcttaatatgactctttggatgtcaattaacagaaatgtttgcattgtgactatttctaaacagctttactgagatatagttcacatatcatacaactcaccacttagagtgtacaaatcaacttttttttgtatagtcacagaattgtacagccatcattatcctctaattttggaacaatttgttccccactgaaagaaaagcccatgtcaattagcagtcagtgcctattcccacctaagcagccactaatctattttctgctctataagtttgcctactgtaggctttctagaagtggaatcctataatacatgccctttcctgactgccttcattcactaattgtgatattttcaaagttcatccacaatgaatgtattagtatttcatttcttttattgacaaataatatatgtcattgtatagatataccacactttgtttataaactcatcatttggaactatttccactctttggctattataaataatgctgttctgaacatttgtgtaacaagttttgtgtgaacatatttcagttcttttgggtatatagtcaagagaggaatgactacatcgtatggtaattctatgtttaatttattgaggaatcaccaaagtgtttccacagtggctgcactattctgtattcctaccagcaatgtatgaaggctccaatttctctacatgctcaccaactttgttatcgtctgtctgtctttttttattacagtcatactgtcatcctagtgggtatgacatggtatctcattttggttttggtttgtgtttccttaatggctaatggtgttgagcatgtgactatcttttacatataaattaaattttttatcagataacatttcacaattagttttttaatatcagctacctgtgattgcagggatatgaaaatttctgtttaataatgccactagactgcataaaacatgttataattgagagtgcagatgttgcgggagtgaccccctgagccacagggcacccatctgagaccgtagccccaagttgaggattctgcctccaacattgccctcacagccatctggagactcaggcctggcctctacttccaaatttgaatagcaagttggagtcctctcatctttcagaatcacttgcttttccttctgtaagtgcttttgaaatgcttaaaaggttgctcttgatgataaccatcactctcctcatggatgaaggtcaaagaaatgtgcacccccaccaggaaatatccttagaggggattttcaggctggatttggggcctctgtagtctgagagggaaggccagactctcctgctattgatctgcatcacaaattgggtggctctagatccagtgtggtgagtggccatagtctgtgcgctgggaaaaaagagggctcaggatcaagttaccctggtcttacaggaatcttggtgaagtgtatacagactgaggatggaaaatggttcacccccacggaatttgaaatcaaaggaggccatgcaagatcaaagaactggaggctgagtgtgcgctgtggcgggtggcccctacgatggctgatggaggtattccaatgacaaggggccaggcctgtgttccttcttgttccctaataatgaggagactgtttattcaccaaatatttgttaggttatagctaaagccttgatgccagtgggtttatcctctcactcaggagagagggaccccacattcataaccacactacagtgcaacacattgacgttgtaccaggggctccgtcaggatagactcagcagcttggaggaggaaagggtcattctgactagggtgcatgcagacagctttgtgcactgaaagaaagaagggagttgacagtcaagcagtggaagaagacacttcagagaaagaatggcataaaagccagaatgccatgaaaaccagaaccatggcaaaagtagctctgtggatttaggtagcacaggttgtgtgcaattaggtataatttaacaattggggcaggttgtgcagggctttaatgccaggctaaggagtttaaacctgtaattgagataacaaggattcagtgaaatcttctaggattggaaatgacatttaaaacaatattttattttatttatttatttttaggagacagtctcactctgttgcccaagcaggagtgcagtggctcaatctcggctcactgcaacctccacctcccagattcaagtgattcttgtgcctcagcctctcgagtagctggaactacggttgtgcaccaccatgccaggctaatttttgtatttttagtagaaatggggttttgtcacgttggccaggctgatctcgaattcctggcgtcaagcgggaggcctcctcggcctcccaaaatgctggggttacaggcgacagccaccccgccccgccataaaacagtattttagacagccacggggctttccccctagcaaacctatactcaatctagaatgctcagttcaagtgttaccccttcctgaatgttcattgattgacctgtcatgggccattgaccaggccttcccagggctcctgagccctctactaaggcctttcattcactgttttatatttattattttgtgagtgctttttgtccgtagactcctttaggttgtcccatcttcatgtgcccaagattgatcagaattactgatacccagtagcaggcaatgtgtgtgctgcttggatagctctggtgtaaggactccagctggagtggcactggtgggactggaagagaggtgataggtggtatgagattgtgaaggaaaacctcttaggacttaggaaagaagcacaagagaagggaaaatggtcctgaagatgcttttctggcttctattgattgaagtctagaagaagcacaggtgaagacagggagatggtttctcattagacaccttggatttgagctggcagtggaacactcaggtagaaatatttgggaggaggttggaaatgccagactcacaaaacggaaacacaggctgaccatatacctgaatctttttgtctttcagaatggatttctgcctgatcctccaagaatacgttacaggaaaaaaaaggtgattattacatagctttatacagcttcttgtcacataactgatttagcatgcacaaaatcttattttatggggtctgaaattgggtaggaataattaagctttcaccttcttcactactcaccttaaaatactttttgcatgtattccttcagagtcgctaatttgaacactaaatgtatataaagctaggtcctgtttggattcaaccatttcatatgaagatgataaggagccatcagaatatacgtcctgggagtgttttagcaatagatgcagatgtcttaagagtgtccaagttggaaagtcaagcatggtcatgggatacataaaaatatttcatagtaaggtgagaggatcaccttcaactcaaaattcagatttttttcattgaagttactattttctaactttagtgaaataggatggagcagatatttgctcacatccatttgagacatgcatgaaaccatatatcatttaatgaaatcggcaacaaaaagaatatttcttttctgatccttcacattctctttcaccttccaaaaaaatgtacacacagacacacagaatgtcttctcaaggtgaaattatttcctgttaccacaatggtgccactgaggaggaagatctccagaggcaaatgtattttataggaggggctgaccaggaaaatcttttatgttgatgccacctctttggctctaccagagggactgtgcagacctgctttttatctgtgaaagtgatttttccctctcttgaagaatgcaacaaacaaataggttaagtgcagtgtatattcaggacaaggtgatggtttttccaagactgggtatgaatgagaacctgaggagggggaagagaaaaatgtcatccttatgcacttcaggtagaaatacgcattcaagacattcacagacttctaaaacagctcacacatagctagccactaagcttcatattccactgggaacctgagatgcaggcctttacattatctgatatactggctgatttgaattttcagccactgagacatttcatccactgggtttcccgaagggaaactatgatgtcacctattcagtgactacactaaagaccagcatctctacctttcaccgggtgccaagagtaactgagtctggatgacccaaatgagctggcaatttccgactaaccgactctccctctattctggggtgcaaaacttagcagcgacaaggtgcagttgcctctatatgttgtgtctcctcatgggggagaacagaaggtcccttaagtggcagatccaggatccattatgaactccatgggtcctctgtgcctctcagagcttctcttacttgcagagccatttggctttaggaaatttcagtgtcactatgagtgccacatgatagcatctctgctcatgacaagggccacatagaccttttggtggcacctgagatattgtaaagcaatctgatatactcacccagaataattgttgtatgctaatgtttgcttaagagcctccagtgatttctaagtgaatcaacattcatttattcacccactcaacatataattatcaagcacacactaaatgccaatggacattacagaagattgacctcaaaaattatttcaggccaaacatggtcacttgagcctataatgccagcattttgagaggctgagatgggagaatcattggagcccaggaatttgagaccaacctgagcaacatagtgagataccatctctaccaaaaaaaaaaaaaaattacccagacattgtggtgtacacctgtagtcccacctactcaggagactgaggtgggaagatcacttgagcctgaaaggtcaaagctgtactgggctgtgatttcatcatagcactccagcctaggtgactgagtgagactctgtctcaaaaaataaaaaaagttttaaatttattgtcaacatggatgaattacaaatggggtggggtgggagattctagaccagttggagaggcattcagtgacaaggtcatctctcaggtgcttgtcctttgaatcacacttgtttatggcctctgtgccctgggctacagacaaaagctgaggctgcttgtatcccagaagggaaggatgccaagtcatgccatggatatccaaaagcaatctaaataaatgtagtgggttacctcttaaaagtcagtcaacctggcatcttcttgtgatttggatagaagggagagggagagagtttcaggaaaaagagctgcagcacagaggaccttggaggcattttatcaccagggctgtgtccctaggggagctgcagaaagcagtgctcttcttgtctgggacacttgcatggcctctaggactctgagtcctgtggtcccaggaggctgtgggagataagtcctcagcctgattattattgaggctcctctgggtgggatgacacaaaggccaagtttaggaaatatgcctgagggccccttgaagtaagaggacaagtagagcttctctgacttggcctgtgcaaactaggtccagactccctgcagggaatgggacttgcattgggattaacggtagtacttgcacactttttattctttcagtagatatataggtccaaaaaatcagatatgaggtaaagggaagactgtttacaaaaataaaactttagacaaaataaaatttatagcatttatttgagcaaagagcaattcatgaattgggcagcactcagaacaaggagaggttcagagaactctgctgtagcagcccagacagtgaggccaacacaggagtaagacagagaaactatatttaatgggttatcatagaaagatgataattagaggttagatggcagattctagttggtaaaatctctagtttcattttactgtttacatcaggtttcagtttgcttacttagaaacttaaaccactggagccaccccagcctactggccttctctcttcccaattattttttaacaactggttcctgaatcccttcaaagaatactatttaaatttaaataagtgatagatggaaacaatgcattcaatatcataaatcaatctttctgttttttcaacagagaatactgaagtctcaaaacaatagctcagttgacccttgtgtaagtacaaattctgaactacgacccccagaatattccactcctttctccaggcatatgttctgtgtcatgactgctgttgcctgaatcatgttcagtctcagctggagtatgtggctgtgtgaattcagttgcatcacccaagccaggtagatgtgcctgggccttggatgtctcattatgaaagcaccctttccatctgtttcagtagaaaccttccaatgtccttatttcccctggaaagtgagtatgggaggctgagctccagaccactgaggtctcttgagacagagcctgaagtggtaatgggtagggctggcctggtgattagggggaaggaacaaatgtgagaggataacagcattttcaagtaagtggtgtggatgaaagggaaagtcctaaaaatgcactccaaggtgcaggtagagttgaagatggtcataagcatcagccagaaggaacagaccaggccaagctattatgttccaggtgttgatcctgtcattagccctgtaaaggagtacatacaaggcaaggggtcctttacagagctcatttggatggtttcagggaagccattagggtgctgagctggttaggactgaaaccatcacgacctagcaaatcctgaggcattttaactcaactgcttatctggtgctcagtactatgcaaactttctgatgccacaggccccatccattctctgcttgctatatgactgcctgctttggattctgccaaaatcatggatgagtcccttctctaaatgaaatcgtgatttgattcttttcattgcagtgagatgtctgttttaggccgggtcaccttcttgcacaactctgggggacagcactcacatagaatatcatgcaatagcactgacacatgatacttaacagaggagggatgctcaaatagttttatacacaccttacctccaaagcagtcctccaatcagatttaggtcttttccacactgattttgatgtctggccaactgagggacttttcaataattaaaacagccctggaagtcagtgtttgtgtggctgattttggatggactaggcatggaggtttaggtttcacagctcacagccagatatgtgtggggagaagagggaaacagttccagcaaaggtatggtcacccctgttaataatttttccaaggccagtaacaacattgacttataatatccccatgcgtccataaccagactttgcttaggttgaatctcatattgtcctgcagcctggaatcacttgaagagctttaaaaaaatattgtttcctggatcccacttctggggaaattataatttaatcattctggactatgtatgactggaacattaggatttgtttaagatccccagatgtactaattctgatacatagaattgcctattctgtcacctaaagaagaataccagtgcctgtgcctcaaccctgacccagtgattcagaatctctggtgttgggttcaggacattagcattttatatactctcctgagaggagtctaatgtacagccaggccaacaaccaaagaaccagagaaatcaaatctcttcttgaaaagatgggtttggagaacaaaatggcagataggaggcaggactaacttgctcctcctactcagatggacagaacagcgtgttgagactcacactgtgaacttttgctccaagaaccactgcaggaatataccagcaaaactgaaggaagtcacacaccctttaaaagaagtggcttgccaccgcaaactctgggagatagccaaaaaaccgtgagtcctcaaagtgtgagagggaaaaagtccacctctgaacacatatcctcactggggaacctggaaatccagatcacaggagaaggatttcacctaacctagagctgaaatgaatttagaaagctgggtgaaatataaaagtagaataagcagcaggaagaggtgccttccccaaggatccctataagcatttcagtccccagggaagccatttctgactttatctcacagtccttggggagggcagccagtacaatttgcagagagccatggggagaaggaggcttccagctgaactttgtaataattttaaccaagcacaaattttcctggtcagaatctgggggtgtgaacctgaagtacagatataagtgcagaagccatggcaggcagggaggggtgagatctgaaagccctgcttgctttctcaatgggggtgcttcttcctggggcaagatcttagctccaggcaaaggatgcctggatataaatttggctctgttggctgttgggcaccacagcgggagtgagactggccttgctggctgcctgggtgctgggtgaagcctgtcactgccggcttcccttacttatctggtgaactgtatgaagcagcagaggcaggcataatcccctctggaacataaatccattggcctgcaagccacccctcatcccccacagtggccacagcaagccctgtctgagaatctgagctcagacacacctaaccctgcccccagctgatggtctttctctacctgcccctgtagctgaagacaaaagacaggggctcatgggagctctatgacctcacccatcacctgagaaaaccgaatacttatccagtgaacttaggtcaagcttgtatccccctcatattacttgcagctgatggtctcttgaaagtgccacctcctcgccgaaggtcagccaactcaagtcattacagacactcatacgagaaccaccttgctccaggaaggagaaaacaacaactaattatactgcctgtaacatcctggctaaccaaagatcctgagtctgtccctgtaacaacctcactgctagcataaccaacatttgagaaaaccagtgtactaaacaaaactacaatcaaggactctcacagaatccacttcactcccctgctacctccactggagcacgtgctggtacccatgactgggagaactgaagacagatcacatcacaggaccctttgcagatactccccagtaccagcccagaacccagtagctcttctgggtggctagacccagaagagcaataacaatcacagcagtttggctctcgggaagcccatccctaggggaagggggagaacaccacattaagggatcaccctgtggaacaagagaatctgaacagcagctcttgagtttcagatctttcctctaacgtagtctacccaagtgagaaggaaccagaaaaacaattctgataatgacaaaacaaagttctataacacccccaaaagatcacgttagctcaccagcaatggatccaaaccaagaagaaatctctgaattgccagaaaaagaattcagaaggtcaattattcagctactcaaggagacaccagataaaggtgtaaaccaacttaaaggaattaaaataataatacaggatatggatgaaaaagtctccagagaaatagatatcataaataaaaatcaatcacaacttctggaagtgaaagacatacttagagaaatacaaaatacactggcaagtttcaacaatagactagaacaagtagaagaatgaactacagaactcgaagacaaggctctggaattaacccaatccaacaagaaaaaagaactttttaaaaatgaacaaagcctccacgaagtttaggattatgataaatgaccaaacctaagaataatttgtgttcctcagcaagaaatctaaaagtttggaaaacatattcgcgggaataatcaaagaaaatgttgctggcctttctagagatttagacatccaaatacaagaagctcaaagaacatctggaaaattcatcacaaaaagataatcactcaggcagagtcatcaggttatctaaagttaagatgaaggaaagaatctatgaagcaaaaacatcagctaaactacaaaggaaaacttatctaatgattaacagcagacttctcagcagaaaccctacaagctagaaggctttgggatcctatctttagcctccttaaacaaaataattatcagccaagaattttgtatccaagaaactaagcttcataaatgaaggaaagataaagtctttttcagacaaacaaatgctgagagaattcaccactaccaagccagtgctacaagaactgctaaaaggagttctaaatcttaaaacaatatatcaaaatataccaaaatagaaccccctaaagcataaatatcacaggcctattaaaaaataacacaatgaaaaaaataaggtattcaggcaacagctagcatgatgaatagaatagtacctcacatctcaatactaatgttgaatgtaaatgacctaaattcttcacttaaaagatacagaatggcagaatggataggaatttaccaggcacctgctgtcttcaagagactcacctaacacataaggactcacataaacttaaggtaaaggggtagaaaaagatatgccatgcaaatggacaccaaaagcgagcaggagtaggtattcttacatcatacaaaacagactttaaagcaacaacagttaaaaaagacaaagagcgaccttatataatgataaaaggactagtccaacaggaaactagcacaatcctaaatatgcacctaactgtggagttcccaaatttacaaaacaattactcactttgggaggccgaggtgggtggatcacaaggtcaggagatcaagaccatcctggctaatgcagtgaaaccccatctctactaaaaatacaaaaaaaaaaaaaaattagctgggcgtggtggcaggcacctgtactcccagctactcaggaagctgaggcaggagaatggcatgaacccaggaggcagagcttgcactgagccaagattgcaccactgtactccagcctgggcaacagagtgagactccatctcagaaacaaaaacaaaaacaatttctactagacctaagaaatgagatagatggcaacagaatgatactgggggacttcagtactctgctgacagcactagacaggtcatcaagacagaaagtcaaccaagaaacaatggacttaaactgtacactagaacaaatggacttaacagatattacagaacattctacccaacaactgcagaacatacattcttttcatcagtacctggaacattctccaagatagaccatatcataggccacataacaagtctcaacaaatttaagaaaattgaaattatagcaagtactctctcagaccacagtggaataaaattggaaatcagctccaaaaggaaccctcaaaaccaggcacgtacatggaaattaaataatcttctcctgaatgatcattgggtccacaatgaaatcaagatggaaatgaaaaaatcctttgaactgaacgacaataatgacacaagctatcaaaacctctgggatacaggaaaagcaatgctaagaggaaaattcatagcattgaatgcctacatcaaaaagtctgaaagagcacaaatagacaatctaagttcacacctgaaggaactagagaaagaagaacaaaccaaacccaaacccagcagaagaaaagaaataacaaagatcagagaagaactaaatgaaattgaaacaaaaaaaatacaaaagatatatgaaacaaaaagctggttatttgaaaagataaacaaaattgatacactattagcaagattaaccaagaaaagactagagaagatccaaataagcccaattagaaacaaaatgggagatattacaaccaacaccacagaaatacagaagatcacttaagtctactatgaacacctttatgcacacaaactagaaaacctagaggggatggataaattcctggaaatatacaaccctcctagattaaagcaggcagaaatagaaattctgaagagaccagtaacaagcagtgagattgaaatggtaattaaaaaattgccaatactagaaaggccaagaccagatggattgattcacagctgaattctatcagacattcaaagaagaattggtatcaatcctactgaaaccattccaaaacatagagaaagagggcatcctccctaaatcattctatgaagccagtatcaccctaataccaaaaccaggaaagggcatagctcatgtcaacaaatgtgatataccacataatcagaattaaaaacaaaaattgtatgatcatctcaataaagacagcaaaagcatttgacaaaatccagcaccttttataattaaaaccctccacaaaattggcatagaggggacataccttaaggtaataaaagccatctatgacaaacccatagccaacataatactgaaatggcaaaagttgaaagcattccctctgagacctggaacaagacaaggatgcccactttcaccacttctattctacatgatactagaagtcctaggcagagcaatcagacaagagaaggaaataaagggcatccaaatcagtaaagaggaagtcaaactgttgctggtcgccaatatgatcgtatacctagaaaaccctaaggactcatccaaaaacctcctagatatgataaatgaattcagtaaagcttcaggatacaaaatcaatatatacaaatcaatagcactgttatatactaacagagacaaagctgagaatcaaatcaagaactcaaccccttttacactagctgcaaaaaaataaaatacttaggaatgtacctaaccacagagatgaaatacctctacaaggaaaactacaaaacactgctgaaagaaatcacagatgacacaaacaaatggaaacatgtcctatgctcgtggatgggtagaatcaatattgtgaaaatgatcatatggccaatagcaatctggaaagtcaatgcaattcccatcaaaataccatgatcatttttcacagaactagaaaaaacaattctaaaattcatacagaaccaaaaaagagctcatgtagccaaagcaagactaagcacaaagaaaaaacttggaggcatcacattacctgacttcaaactatactacaaggctatagtcacccaaacaacatagtccaggtatgagaatataccagtacacatagaccaatggaacagaagaaaggacccagaaataaagccaaatatttgcagccagctaacctttgacaaagcaaacaaaagcataaagggggaaaggacaccccattcaaccaatagcactggcataattggcaagccacatttagaagaatgaaattgaatcctcatctctcaccttatacaaaaatcaactaaagatggatcaaagacttaaatctaagacctgaaaccatataaattctagaaaataacattggaaaaactcttctaggcattggcttaggcaaagagttcaggaccaaaaacgcaaaagcaaatgcaagaaaaacaaagataaatagatgggatttaattaaactaaaaggcttctatacagcaaaagaaataacagaataaacagacaacccacagagtaggagaaaatatttgcaaactatgcatccgacggaggactaatatccagaatctacaaggaactcaaagcaatcagcaagaaaaaatcaaataatcccatcaaaaagtgggctaaggacatgaatagacaattctcaaaagaagatatacaaatggccaacgaacatgaaaaaatgctcagcatcactaattatcagggaaatgcaaatcaaaaccgcaatgcgataccaccttactcctgcaagaatggccataacttaaagatcaaaaaataataggtgttggcatggatgtggtgaaaatggaacacttttacacttctggtgggaatgtaaactagtacagccactacagaaaacagtacagaggttccttaaagaagtataagtagatctaccatttcatccagcaatcccactactgacggcagcggcaggcagtctgaagtggctgctgccatgaagctggctgcagtgaggtgcaggcgctggccgtgggtcttagggggcagacacagaggcaggagatccccagagccagttgccctgggagccttcctctgggagccgctgcaatggggctaggcccagctgcccgtagggcgtggtcaggcagggaggggtgagcagagagaggtcccaagatggagctgggccagtggtggttcggcacttgcacacgtagcgtgggggtcgggcccgaacgcggagcagtggccacacttcaggggccggggtgggaagtgggagtggcgcccacttccaggacccagccagcaatgcggcccctgcacccaccctgcccacagcgccaggttcccgcccctcacaggaggctgaacaaagggccgccagaggccgtgtccctaggatctgccccgagttagagtgactgctgtgcctggtgctttcagcagctgagactggggaggcaatccggtcctggaggtttcccccaggcagggtcacaagccaggagagggggtgccccaagccatccctgagccttggggccacaggaggaacttgagccaacatcacccctgcaccagatgctggcctgggcctggcaagggctggagccaccaacccaggctgcaaggaggcagacagggcagcaggaacggccagaggagcagcagtggcagcagtgggtccctgtgccctgtgtccctgaggcagggaccctcaccctcacacagccggcaggacctgctctcaggcccagagcctctatcacagcctggacctctttccccactgcatcctgggaacctgcaagcacctggccaaaggtgcagccgagactcacagaactggcccctgagtgtcaggttcctttgtgtgaggttggctggggcactgtgccacctgcacctcatccacaactgctgcaggagacacagagagggggcatggctgaggccgccccactctgcagagccaaggacaagcaggagccctgcctctcccaaattggcagggcaggagctcgccatgcgcaactgcaggtgcccaggttgcagctgtaggcctgggcctcccagtgctcttgggggcccaggaggctaccctccacctgccagaacagaagcttctgctgcctggccattccctgctcccagcacctgctgcaatcttggagcagggttggggctgagcccaggtgcagttgcagccctgttgggtgtgcacatgcttggggcagagctgacacaccaggcccctgctgcctgcacccctctggattttgggtgctgacgatcataggagagaggccaagaatgggctggggccagctcagcactggcctgcaggtgcccctttgggcaaggggcctgggcaccatgggtggtggggaaaggcagacaggctcctgggtgggaaggggcaggtccctggtgaggcaccaccttcaggcaagagagggcctgaaggctgggaactgggctgccaatcctatggaccagagtgggaacttgtaatgcctttcaaaggcctgctcatggtaacccatggaccaatcagcatacacttcctcccctctgaagcccataaaagctctggactcagtcagacttggagagaacatcctggacaaccagcagcagagaagagcttcacactccagggactacctgccagcagagagaagccacccaccctaggacctcctcctctttgctgagggctgaacactcgtcaggacacattggctgcagaaaggagctacccacagtgggtctctgagctgttctactgctcggtaaagctcctcttcgtcttgctcaccctccatttgtcagcgtccctcattcttcctggttgcaggacaaaagaacttgggatctgctgaatggtgaggctaaaagagctgtaacacaaacagggctgaaacatgccccttgatcaccgcattgtgggtgaagagaaggagagaagagctgcagccctttggggagcccagacctggaagctccctgagccagggctgtgactcccttttggaggctctgaggttcctggcatcttcaagcttctaggtgccagcacatcccctgttgccagccatggaagctgtttgcagtgtgcctggtccagacacagccttgcagagagccagtgctcatgccagcacctggagttgcctgcccttatgcaatagcaggcatgtctgactgtatgcagtggctggaccccatgcttgctcacacgcctctcccactccatgcctgacctgccccatggcaggcccttggtaggtatgcgatccaggccagtagcctgagccaagtgcagcctgccaggccaagtgggtggaaggagcccagtgggcctgagcaaaactcaggcaaaggcacaactgcttacagaggtttctggcaagaaaaagcaataccccaaggattccgtaacactactgggtgtctacctagtggaaaaaaagttatatgaaaaagacacttggacatgcatgtatatatatatatatatatatatatatatatatatacacacacacacacacacacacacacagagacacacacacacacacaccatggaatactactcaggtataaaaaggaatgaaataatgacattcacagcaacctggatggagttggagaccattattctaagtgaagtaactcaggaatggaaaaccaaacaacgtgtgttctcacttataagttggagctaagctatgaggatgcaaaggcataagaatgatacaatgggccttggggactgagagggaagggtggaggagggtgagggataaaagactacacattgggtacagcgtacactgctcttgtgatgagtgcaccaaaatctcaaaagccaccactaaaaaaattatccatgtaaccaaaaaccacctgttcccccaaaactattgaaataataattttttaaaaagattaaggattcgacatacttaaacatttggtacttcattccctccctagggttttggagatggtggaacacacagcatctgacactggacagatgagattgacagcagtgtattagtcacatttactcggtagcccggtgggggtgggcaggcatcccacgccacgcagggccacatgggggctgcgctcaggaacagaggaaacagccagtggctgtggagggcgggctgtcccctgcttccagagggagagtgtgattggcttgtttgaataattccatggctggcagggaaatgaaatcagctattcaaaaatacgcagaaggtgcaagcggtcctcttgatcagaagtgttggtaggaaaccttacctgcagcagcagagccggcggaggacttgtagatagaccattctaggccctcccagtgttaccagatgtccaggctgcacataatattgaactctaattttagtccttacagcacttttcacttgaacggcaaagggctcagtcacagactggttctttgttgtaaatacacatgtatttgtctacaatacagcatgtatgtattggtctctatatttgctctataaattctgttggtttttaatgaccgggatttgctccacaacacgtggatgcaaataccatcatattttaatttccccaaatgaaattaaatctggctaaaggtgtcacatattgagacttgtaagaaatggagaattcgttgatttaccattccttttatagaacaaagcaccagctcttttatgggcccaggaaatgaggtgagggcctctgtcttcaacactgtatggtgctgttaccattgtccttggtcatcagagatggcaccttcgcaccttacaatccaagttagctaagtcaagggggatgtatgccaggctcccagagctgaagagctctgtgcttcctggggcccacctggtcatctccacccacggtccttccccctcagaggtcggcgtagagccctccaggcacaaaacgtacagtctaggaatccctaactaggccctctcttcaactcatggggaacttatggccaagaatatgggatgtggtgatatctcagaagcttattccatcatatgtaattagctaggtctccttttcactagttgatttgtggtataggcaaattgatttaacacttcatttcaaaacctggttttatctgcagaataaggaaattattcagattcctataaaatcatcatcttgctttgttgctagtctttcttcattacaatctctggtttcataaggaagacttttcaattctgacccataccccttcctcctgaacttcactgcagaccaggatttgttctgaaatctccatgccatgtttttccttcatatcccagggagaagcatttgcctgtccatgcaggttcacacaaaggcagtgtgttctagttgcccagagggttggccttcctgaatcttgcggttcccagtgacgtggacactgttttatcttctagatgagaaacctggatgagtgtgaggtgtgccgggacggaggggagctgttctgttgcgacacttgttcaagagtcttccatgaggactgtcacatcccgcctgtggaagctgagaggtaagtgacatgcaggcgtctctctttttgtcctttaagggatcttccacctgccatgcgcactctccagcagagtgccggcttgtgtctagatggggaaagagcaggttcatcgggtactgggacccagcagtgtgatccagagagcagtgggagacgctggcagcaggaggttaatgtcctctgtgctctcagggacacctcctctgatatgctgagggcagtgttggggacctttgcctacataccggcattgtcctttccttgaagttttgcagctgggtgggttggagacaagaaacaccagttgtttatattttgtgcttattcatacaagacaggaagcacgatctcattgggctgttggaggcccgaggtccctggggctgaaaacccagtttctgaaactcaggcctgacagacagggttccctgtgctcccagcagctcagacagagaaaggagagtccacactcacggtgacaccaccttcctcagacttcctgcctgctgctaccactgatgcgagggaaaggccaatggctggagaccccatgtgtgaatcttgcatactttgggaggtgttcccctccctcccatgactgagcccatcagccattcctgaaggaagacagtggtagccacaggaacggtggccatttccaagctccctgccctctgctcacccatgtccaatctctcaggaccccgtggaattgcatcttctgcaggatgaaggagtctccgggaagccaacagtgttgtcaggaatctgaggtcctggagaggcagatgtgtcctgaggaacagttggtaaatcagatgcaaaccccaagccttctcctttcccctcacacgtgagaaccatgaacaagcgcaagggcaggggaatgtactgaaaggagcctgctcttccgcgccacacttcaatggcactgatagaacaccacaccttgtttgcacaaaaaataactcagccatgacatgtctgtttccaagagccacacatgttagagaaacttgaggaagaagggtgtgagttctgtgctgtgtctcatgcatgtgggctcattctctccaagctgcttttcatttacggcctctttcttttgcagaaatgtgagttcctcctcttgaaagtctattgctgttctgagagctccttttttgccaagattccatactattattatgtaagtaacaacagcaacccatgattacaggctgccatgacattacctgaccctgaaatgggccctcgtgagatttgtgatcttaatcccacggggcaagagcacacgctgtcgttagttgccttcaccttgttgtatttctgctggattttatgggaatccacagaaggtagacactgaactatgctggtagcttttccattggtatatttgtcaccagattagagaggcgtgtcaaggcctgaaggagcccatgtggttggataaaatcaagaaaaggctgaatgagcacggttacccccaagtggaggggtttgtacaagacatgcgcctcatcttccagaaccacagggcctcttacaaggtaggtggctcttcctgcttccatttcatttctttccatccttcccctcattttctggtgccaagaaaaatttagtttccctcatcctgtaataagcttgcacgagcaagggttctggaagtgattgattggtttcagttcagaacttaagctcttcttagcaaagaaacagtgaatcaaaaggtgtccctgcaaccagaaccccaggtccctgagagctcctcccccacctgccccagaggagacaggagctcagagagagcaattgaatcctgcctgctgcagcatataaagaggagagaatttcatcttaaagtggtattgtgcttcttatctgctcccaatcccagaaatcccaaactccagattctttgcatgtgaatagaccatatcccaacaaggattgccagcaaggagtagaagtgacagagaaaggaacagatcagtgatcttaccttatacccttccactatctgaattgttgaaagaacctagattgcttttctaacccactgaaataagcaaccaaaggcaaagaagtaataatcccagctgtggaaatgatttcacttttctgccctgttaataagaaaggatcatgctggtaagaaacggaagttactcttagctgcatgagttttcaagtttaacctggttaatgtaacttagggtgtttaagataagtgttctacttaataatagtgtatttcacacttcaacattgttaagaaagtaaatttcaaatgtactcaccacaaaaaaatgataactatttgaggtgatgaatatgttaattagttcaatttaattattccacatagcagtcataaatcacaacattactttgtactccaaaatatatgccattataaattgtagacttacagtacttttttttttaaagacaagagtcctgatcattctcagttgaaaggtgtctcatgacgctaatgatgaggagcattgtttttgtctttattattttttcagtacaaggattttggccaaatgggatttagactggaggctgagtttgagaagaatttcaaggaagtgtttgctattcaggaaacaaatgggaacaattgactggattagtggatgctgaaagcattcagcaaatggcaccctaaaatatgccgctggtttgccactgacttcaaaatgaggtcacttgggcacagcacatgcagggaggggcttttctctgagcctccttcatctgcccaaagacaaatcctcaaaaggaaattcaatcatcatgaatcacaaccccaagtatctcatcagccagggaagagtaagtgggatcacagggaaggatgttggcagcgacaccatcccatacaggctcttacctcttctcctgagggctgctccagacaacatttattacccagaagaccttttgtctgaaaaccagccaagctttattcaggacacacttcttgccttcactttcccacttccgtggc

SEQ ID NO: 15821 - DNA, 87480 bp, Homo sapiens
cttttcctctttgactgagcaccgaggggcagttggcagcttcacctcagagctgcaggaaggaacggggcagtgaaaatcgaatcgggtgtgatcctaggccaagctcatggcccagcagggccagcaggggcagatggcaagtggagacagcaatctcaacttcaggtgggtcatcgtctcctttcccgtctgtccttcatctctggtagggttccctttcatacttgttatttaatgtctacccagcttcactctacaggtatacaatagaattcagttacaaataaataacgaggcaatcagattttttaaattgcagggattggctgttggagaaactcaaggatgccgtgactcacatcatcttcctattctcttacatctgcaaatggctggactggagctgtttgaacatcatgcctgttctgaggctttgtgtaggattggatgattccccgtgacctctgaaccctctcttctcccccaggcctcctttatccccactccaaaagacaactctgtctaaaaaggatctttttagaagaattaaaatccaaacgcctgtctgttgtcacactttccaggctgtgtagttggggaccggttctgctctgagcccatctatgtggctcttagccctagaatcacttcaggatctctgaatacttggtaggaggaagtgaaagcagatgagacccaacaaaaaaggcaagcaggtagagagtgagtgctgcttctgctttttttattcttctgttctggtattttttacatatctggtcagagaagcctggaaatcatctttaaaaaatgtaagacaatgagaccagtctgaccaacgtggagaaaccctgtctttactaaaaatacaaaattagctgggtgtcatggtgtatgcctgtaattccagctactcaggaggctgaggcaggataatcgcttgaaccagggaggcagaggttttggcgagccaagatcacaccattacactttagcctgggcaacaagagtgaaattccatctcaaaaaaaaaaaaaaaaaaagacaagtacatcaatacggtcatttcttcttatctgtggattctgtatccatggatctaaccaaccatgaatgcaaaatattttctaaaaattaaaaacataaataacaacaataaaaagtaatataaaaatttaaaatacagtataactatttgtatagcatttacattgtattaggtattataagtctagagatgatttaaaatatacaggaggatgtgcataggttatatgtaaatactacaccttttatatcagggacttgagcatccatggattttggtatccatggagggtcctggaaccaattccccctggataccaagggatgactgtacattcttgataaaaatgaaaatgtgtggaatgtaaaaatgtatggaaacttgtctaattgggactctgtgctaaggctacttctggcgctggtacagccccaagaaagcaaaagctattgctattatcagcagtagtggtggcaccagactggttttcagtgcccagtgccaccactcccagacaggcatccctgtcatctctctttcacttgctctctagtgaagggaagatgagccagcggagctcaaagtccagccagcccatggtcaccaagcaggaagaagacggcactgagaggtgacaatgggctaatgctaacctcaaagaatgagttaggaagtgttgcctctgctcttatttttggaggaaattggggaggatgatgtcatttcttccttaaatatctggtaggattagctagtgataccatctgggcctagtactttcctttctggagggctattaattatcgattcaaatttctttaatagatgtaggcctattcagacaacctatctcttgtgcaagttttggttagtttgcctcttaaagaatttgttcatttcatctgtgaccaaatttgtaggtgtagagtccatagttttcctttattacctttccattgtccatggaattcgtagtgatgacccttctttcattctgatgatttccgtcttctctatttttttctttgttaggctggctagaggtttattaattaactctttgaaaagaaaatcagcttttggtttcattaagtttctcgaatgttttcctgtttcaatttttttaacttccactttaattttaattttttttcctgcttgcatcaggcttaaattgctccttttttctctagtttcctcagatgaaagcttagattattgacttagatctttcttcttttctattgtatgcatttaatactatacatttccttctaagtgctgcttttgttgcatcccattcattttaataagttgttttccttttcatttacttcaaaatatttttaaaattcttttaggacttcttatttgaccctagaactcttttggttaatctggaaatattttggaattttccagctatttttctgttactgatttctagtttatggtctgagaacaaacttttaggatttctattcttttaaatttgttaaggtatgttttatggcccaaaatgaagtacatcttggcaaatattctatgtgagcttaaaaagtacatgcattctgctattgttaaatggagtaccgtataagtgtcagttagaccaagctgattgctattgctcatcaggtcaactacacccttactgatttttctgcctgtgtgatatgtcaattaataaaaaagaagtgttgaagccttcaataatagtagtgaatttgtctatttctctttatagttctatcagtttttgcctcatacattttgccattagtttgttagttgcatacacattaaggattgtgtaccttcttggagaattgacccttttatcataatgtaatgtccctctttaatccctgacaattttccttgttctgaagcttctttgtctgaaattgatatagctactataccttttctttgattagtgttggcatggtatatcttgctccatccctttatgtttaacctatctgtatttttatatttacaatgactttcttatagacaacatatagtcgggtgttttgtgttttttatgtactctgttgatctcttgtcttttaattggtgttttagaccattggcattaaagtgattattaatatagttagattaatatctaccacatttgtaaatgtttcattgtacctatcgtttttatcttttcttccttttttcctgccttttctggtttaattgagcattttatgcttctattttctctcccttcttagcatatcaattatacttcctttaaaacatttttagtggttccctgaagtttgtaatatatatttacagcgaatcatgcccattttaaattacactatatcacttcatgagtagagaatacaccatgcaactgaatgtcccaaattctgccctcctgttctttttaacattgtgaaatgactgacaatgttaaaaagaacaggagggcttccagtcattccatttatttatgtcccataaccactcaatatgttgttgattctattaatttgaataaatggcttcattttaggttaacttggagtaggaaaaatgaaaacattttattatatctgcatttatttcttctctggtgctctttctttctctatgtaaatctgagtttctggcccacatcatttttccctttgcatgaagaaattctttttttttttttttttttttttttttttgagatggagtctcactctgttgcccaggctggagtacagtggtgcaatctcggctctctgcacactccgcctcctgggttcacgccattctcctgcctcagcctcctgagtagctgggactacaggcgcccaccaccacgcctggctaattttttgtatttttagtagagacgggatttcaccatgttagccaggatggtcaagaaattcttttaacattttcacatggagtaggctttctggcaaagaatttcctcagtttttgtttgtttgagaaaatctttatttctactttacttggaaggttaatttcacaggatatggaagcctacataggctttttttttctttcatcactttaaatatttctttccactttctttgcttgcatggtttttaatgagaaatctgatgtaattttatccttgttctttcacaggtaggggttttttgttttttttccctaccccctggcttttttcaatattttctctgtctttcgtattctgcagtttgaatataaaattgtaattgccaaactagactcttcttgtccattgcccagaaaagccacacattgagaatagtaggagttgcaggagagagagaatttaataatcgcagggccagccaagcgggagatgtttctgaaatccatctccccaagaattcagagactaggctttttaaaggatagttaggcagacagggggctggggaacagggaagtgctgattgcttaggttgggaatgaaatcacagggggttgaagctgtgttcttgtgctgagtcatttcctgggtaggggtcacaggacctggttaccaatcctgtggtattagctgttccattagaatgcaaggtctgaaaaatacctcaaaccccagtcttaggttttacaatactgaagttatctataggagcaattgcggtggttatggatcatgtgacctccagctacatgactcctgaaccataattctaatcttgtatccaatttgttagttttacaaaagtggttttggtcccagagcaaggagggggtaagttttgggaagggattgttataatctttgttttaaagttaaactataaactaaattcttctcattgttagcttggcatacacccaggaatgagcaaggacagcttgtgaggttagaagcaagatggagtcagttaatttagattcctctcactgtcatgatttttgcaaaggtggtttcaatatgtctaagtctagatcatttgatatttatgcagcttggtgtttgatgagtttcctgaatctgtggtttgttgtctgtcattacttttggaaaattcttggctatcactacttgaatatttcttctgctctattttctctttcttctccttctcgtattccaattacatatttgtcacactttctgaaattattccagcattcttggatattgtgttctgttttgttttttcctttttttttcctctttgcatttctatttgagaagtttcttttgacatatcttcaattcactgattctttccttggccatgtccaggctactgatgaactcatcaaaggtattcttcatttctgttacattgtttttcatttctagcatttcatttttcattatgtctttgagttgtcatctttctgctcacttaaccatctgttcatgcgtattgtgtgcttttttctttagagcccttaacatattaactaaccatagttattttaaatttctgtctaaaaacttgaaaatccatcatatctgagtctggttttgatgattactttgtctcttcacactgtgttacttcttgccttttggcatgtcttataattttttttttaagtcagacatgataagtcaggtaataggaactgaggcaaataagccttcaatgtgaggttttatattaatctgggtaggaaatgggccatatctaatgtttgttctagctgtaggtggcagaggtgtcaaattcctctagcgttcttgtttttctttcccctgctttctctgggtttctctgagaactcctttttaaatagtctgtttcttgtagttcttccagctgtaatctgctcttattatacaggaaccctgttgatggaatggtaacgtgtcagagggggaagtggtctataatcttatgattacatctcgatcttttaatggaactgcaccttgggctattacttttaaaagaatttctccctccacccttttttttcaatttttttgagatggagtcttgctttgttgcccaggctatagtgcagtggcgtggtctcggctcactgcaacttctgcctcctaggttcaagtgattctcctgcctctgcctcctgagtagcagagattacaggtgcctgccaccatgcccagctaattttcttttgtgtttttagtagagacggggtttcaccatgttggccaggctggtctcaaactcctggctttgtgatccacccgtctcagtctcccaaaatgctgggattacaggtgtgagccaccgtgcccagcctcacctccaccctttttagaagtgacaagatggccagaaggggctagattttggtagtcacccttcccctagaatggttaaagcattttccctggagagcaggcccttgtcatggagaatgctttggctttttaaaaacttttcttttccctcttcttgccagaaggataaagagatttttcttggggtttgtggaggtaaaatccataaaaggttgggggcctgccctgagatgatgacccccaggagtttctcatgctcatgctcctccacactcagcctccagcaattcatcaaacataccaggctatgacttcagtgcctgctgcctcagatagttgatctcggctaattctctggatttgcctgtatctccagattttggggcagtttgccttgtgactttggttatttgagagatagaagaaaagttgttaattcatagtttgttcagcagggttgttgttgttgttgtgaggatgggagcgatgacttccaatgtctttgcgtgttgaagctgaaaccagaggtctagtgaacttttacatttttgaagtttagacttttttcttaagacaaactttctttttgttttaaattttggttttattatagtattatcttatagccagagcatgtaacctgttcaatttctcttcattattatttattgaaattacttcagggccaaatacctggtatgatcttgtgtgtttaacacagtgttattaaaaatcaattttgccagtttttaaaacttacattttgtgtatctttgttcttttatttttatctacttgagaagctaaggactggaagtaagatgttttttaacagccttgaaagatttccccattagtaatctttaatcttactttttaaatgtgagtattgagaattttaccttctttctcatttgtatttgcttaatgaaacttatccatcttttgactgttaacatttttaatgttattttatctctgttatgtctcttgtagttagattctattttgaccatttataatttaagatggtagcttaatctgttttaaatatcttgttgcttatggattttttatttttatattttatgcctctttattttctataagaaaaagagcatgtttttctttctcattattttgtaaagtttgtagcctcattttgactctatttgttacacttgggtttctaattaattctttaatgtatatttctctaactgagaccatcaaatttataactatatcatttgaatttgtatttgaaataagttacttaactcaattttttacttgtcctcactcaatttaaaaaactttaccaagatatcgcaccactgcactccagcctgggtgacagagcgagattccgtctcaaaacaaaacaaaaaaaacattaaaatagaatctaaagtttaagattgaaattactataattttattatatgcagtatatatcctctctttttagaacagtgcttctcaagtatttgggttcaggatatttttatatttttaaaaattatcgagaaccccaaagaactggcttttgtttattgggttatatctgttgctatttacgatattagaaattaaaactttgaacacttaaaatatgtatttattcatttagaaataatagtagtgaatttattacccgtgaatatgtgatgtgtttttatgaaaaataataaaacttttcaaaatagaaataaattagccagaggattagcattgctttacatttttatacgtcttttaaatataagtagaaggcagctagaccctcctatctgcttctgcattcaatccgttgtgacatcacaggccatttagcctctgaaaaatttcattgtatattcatgagagaatgagaaagataaagggaaaataatatgttattatgtgaagagttttacttggtgacacctgaaagggtcttgcacaatcctagggggtccctaaccccactttgagaattactgttctaagataatttatacatttgagacatcagtattgtaactggttttaatgatgcttccagttcctctacaataaggctttactgatactgatttcttgattctgttaatgtagtacatcatcaaataattcgtcctacacagtgtcagtaaaaatggagtagggtgatctataggaacaaacaattcccaaatctcaacgggtcaccagccctctgcacagaggaccctcatcctggactctgtctctggctgaggagcagccaccccatctgaaatgacagtcactgtggtagaggaacagagagcatgcctaaccaggtgctgcctctgagctcttctgccagagtgatacccattgctccaagggaggtacaatcttaccttggcccagaagaaaagaacattgaaaaatgtgtgaccaacacagaaggtgcatgagcaaaatattctttgagtccttgtctatctaagtattgattctgccctcatacgtgaatcattgaataaggtatacatttttccattttaatttttttggacccattctcaagaactgaatgggtatacactttttttagtagtttcctcttacctctaggtttataggtttgcatcattgctttagacatttagggtttcaaattcacttatttttccctttagggcttttccccatatgttctgggaaattctccctcctttatcttataaaaattttcattcactttttaaaaatttcacaatcattttgaatttccaaggtcgttttattttctggttgtttcttttctgcatggaatttttggtacaatatattctctttctgtgtgataatatttgttgtttagaaattcttttttgttccctgaaacatctgtatttccgctagggtaattttttgccttttgcttatcttggttttactccttaatgttgtaggtttccacaaatgctgtggtctgttgtagtctgttcatgcttaccagcaagatgctgaaaagtaaacttgaaactccatttaatgagatgggcttgcaaacttgtgggcttcactgagcaaataccaaatccctgaaggtaaaggccttttctctgagtcatttatatttttcttaagaggaaacctccagtcttctgcctgattgtgggtgttctgtgtcgtagagcaaactgtttttaattttgcctttggaacaatctctcgattttcatctctgcatctccttctcaaccaccactgcatctctgggaggctgcaggacacgctggatccttttctgacctcaggaagcatcctccaccttcaatagcaatgagtacccctcagaccactttttctctttcatacttaggttaaaatttctcatctaattcctttctcttcatcattgtaactttaattcctttactgtcattttaggagatattctagtgaaagaggagaaaaacagttgtcattaatcaacgattttaaaccagaaggctttttcttttttaaaagaattcaatggataaatggtgcatgtctggagaatgggaaattttagtgatcctctattctatcctgatgcatgtttaaggaatggaaagtcccaatgaccatttcctggtgggataaaaaaaatcctggaagtcttcataccgtttagaaatacagataaatttgttaaggcctattagcaaggggaacaatttagcaagtaggaatcagaactacaaacttttgtgattaaaaattagtttcccaggcacagccttaatgtctgaaatccagaggtctccaagtttagacagattaatgtgtcctagttttgcatatccacacaaatctccatgttggaccagagaaagagtgattttcttgtgactgtttttttttttttttttttttttttgagatggagtcttgcctctgtcactcaggctggagtgcagtggcacgatctcagctcactgcaagctccgcctcctgggttcacgccattctcctgtctcagcctctcgagtagctgggactacaggcacctgccaccatgcccggctaattttttgtatttttagtagagacaggtttcaccatgttagccaggatggtctcgatctcctgaccttgtgatccgcctgtctcggcctcccaaagtgctgggattacaggcgtgagccaccgcgcccggccttcttgtgtattcttaatcaaaccttaccagatgagagtctttgaaccaattttatgatgcagaatgccaccctccttttgcagttacagatggaggagatacatctcctttacatctcctgagatttcctctctttgttgttaactaagaagacttgcagttcagtgttaggttctgtaatatctcagccagatttttatttctttctctgtaagttaaagttctccagagaaacagaaccaataggatgtgtatatacagagaaagagatttgttataaggaattggctcttgcaattatgaaggctggcaagtccaaaatctgtagtgtgggcctgctgtttggagacccaggagagctgatggtgcagctccagtctgaatgcagtctactagaggattctttctttcttggggacactagtcttttggttctattcaggctttcaattggttgggcaagccccacccacattatggaaggcaatctgccctactccaaattcaccaatgtaaatgttaatcttatccaaaaacaccctcaaagttggcatataaaattaattaccacagtatcatgtcaattcctataaagattttgacatcttttaattgcatattttccctagagagttcaggtgaaggtctctttataatagtttgattggaacagggtgagcctttttacttctatgtacaggtctttcttaagttcactgttttcatcttttccaccttgatttttcccaaaataaataaattccattcattctggtctccctacaagaatgcttattttatacatgttggctctccattggccatccttcatgtctaaaatcttctaaccaccacaaacctcttggaaactcagtgtctacttccacgttgtatctttgtttcttaggatggtcgcagagatccagaacgtagagggtcagaacctgcaggagcaggtttgccctgagcccattttcaggttcttcagagaaaacaaggtggagattgcaagtgcaataacaaggccatttcctttccttatgggcctccgagaccgctccttcatctccgagcagatgtatgaagtaagtaagaatttccaaatgatgataaaccaggtccatactcaattatgccaaacttcaagatgcaatgagcaggctaaagggcctcctgtgagtggggaccttcaccattctgtaggttaggaggtgacaggagaagcaggcatcacagaaaacctcccttcttctgtagtaaatgttgggggagggccacagtgagggaggtggggcaggagagagaatgggaatgctgtatgggtgcagatcatcctaggtacttgtaaacaatctactaatggtagccataattaaaataaataagtgacctaggcagcattttattccaaagcctacttatttgaaacacttgaaactgagatttttttgaaactcacagtgaagttgtgtcattttaggttacatttggaagtggatgcttgctactgtctctccaaatcattgtttgatctttggacatttctagagccctagaatgcaagttaatgttagcagtggatgcccttagggatactgaggacaaggcttcttcttgtctttgtgaattttctgtgccctttggccaggagtcatagtgggggctggttgattggtttcctggagctcgtcaggccaggccaatcctagtagtggttattgtccatgcaacagaacagccttgttaaggccactcctgaaataacctggccaggctctaaagccatacacaacattcaactttgaacccacacttattatttaaaattactctctccccttaagtgtacaacaatgtcagagagtcaggttcaaaaaattagagtgtatttttatggtggaggacatttaagaagtcatccaaatatacgcaaaattctaacatttcacaagagaacagatgttctatctacaacctaaaagtcttttgtaacccataaatctctagctacataattctccatttaatatttttaagcattttcaagaagcttttagaaacctggtcccagtgacaagagtgatgtattgtgtactcagtgaactggagaagacatttggctggtcacatctggaagcattgttcagcaggattaacctgatggcctatcctgatttaaacgagatttacagaagcttccagaatggtaactatagctctcaacagctttgggggattcaagcccatttcattcattgattcattcattcactcttcattcatatttgacaaatatttgactgagtgactattacatgccaagcccagggggaatataatgatgaaaaaacacacatgtcccatgtccttatggagtttacatacagtgggagtgacagacgttaaccaagtaatcctgcaaatggttgctcagccaggacttgattttgatgctgtaaaacatagggttgaagtctctatttttttgaaggaatacatgagtgatgtcttttcatgggaaaggaggaagccttctctgatatttgcagatatgttcaaagataaaacaattttctttgtattagaaaatttatcatccagtgcagtcctgtgtcaacttgtttctccaaacaaagactggagaagtcacgaagagagcctagcacatactggtacactgaggaggagctgcatgtgaaagctatgaagacagaaaagggggttggtgggggcctttccgaaccatgtggttgaattgcagactgtgggaggcagggtgtgagagctgactctggagaaagaagttgaagtggattctggaaggcttgacaccctgtgctaaggaatctggagtttaatttttggaaaataaagaaggaataaagggcatttaaacgggaaaagtaaaagaagtcagtatgaagaatgggatgtgttgatttgtgaatactataccttgattcaaaaaagaggtatcttgttttcatattatgatacatccaagtcagagaaaggtctagaggaagtcaaatactgtgcatgcctcctttggtatccatgagggattggtttcaggaatacccaccactctcagtcctgaatgcttaagtcccttatataaaatggcgtagtatttgtgtataacctatgcacattgcaccagtatactttaaatcatctctagattacaatacctaatacaatgtaaatgctatgtaaatagttgttaaattgtatttttcatttgattatttttaatttttgtattgttattttatttatttatttattgagatggagttcactctgtcacccaggctggagtgcagtggtgtgatcttggctactgcaacctccacctcctgggttcaagtgattttcctgcctcagcctcctgagtatctgggattacagtcacccaccaccacacccggttaattcttttgtatttttagtagagacagggtttcgccatgttggcaaggctggtcttgaacccccgacctcaggtgatctgcctgccttggcttccccaaatgctgggattacagacatgagccaccatgcctggcctgttattatctttaacttttgtcccacgtttttaatctgagggtgggtgaatccacagatcccaagccaactgtacctaggcacaaattttgagtcaatatttgtattttaaccagggtgttccaggctgtggcaatgaagggaatgatgttacttctactgcccacatctcaggggctctgattctgtctgtggactgtggggatcctcctggccccagcatccacatctcatatgttagtatctggcacttcctgtgtttgggtgacaggtacctgaggctcacgactgcccactgcctcagactatgagtagaaatgtgagaaatgggcagaagtagaatgaattgtaaaaagattgaaaaaagaaaaaataaacctctacttatactacacaacatccacaaaaaaataattcaagttggatcacaaatctagaagttaagactacaagtataaagctgctaaaagagaaaacataagacagtgtgtttgcaaactgagagtaggcagtaatttgctatacaggacacaaaaaaacatggatcataaaagaaaaacttggtaagttagatgtcaacaaattaaaaactatgcatccaaagtcaccattaagaaaaggaaaaaacaagccatagactgggagacaatattttgcaatacacatatctaacaaaggattgtactcacaaaatatgaagaactcctataaatgaataataaaaggacacatcaccaattcaaaaaatggacaaacgatttgaacagacatttcaagacaggagatataaaatgtccagcaagaatataaagtgtatgacattattaatcatgagggaaatgcaaattaaagttatagtgagatatcattcactcactagaattgctaaaattaaaaagactgacaataccaagtgctgatgagaatatggaacaattggacctcccatcccttgctggtaggaatgtaaaatgataacgaccactttgggaaagtgcctggcaatttcctataaagttaaatctaacctatgatcttggcagtttcactcctaggtatttacatgagagaaatgaaaatatgttcatgcaaagatttgtttaagaatgtttatggcagccttattcataataactaaaatctggaaccaacccaaatgctcatcaacggagggtagataaactatgactaatttatagagtataatactattcagcaataaaaagaatgaactgttatcacatagagcaacatggataaatctcaaaaacattatgttgagcaaaataagcaagttgtaagagtacatactgcatgatcctatttatataagtacaagtacagacaatacagacaagtacagtgccagaaaggaaggcgccattgctggtgataggaaccagaacagtggtgtcttaagcacaaagcaattttctgggatggtggaaatgttctgaatcttgactgggatgttggtttcacaatgatttacacttaagatatgtgcctctcaatgaaaaaaaggggaacaaggctctgttggacctcgggggtgggagatcctggggcttggacatcaagttcatcttgagcacactgaggtctctcctctggtcactgtctgagtttggtaattttcacattgttttcctcagtatgctatgaacactcacctctccaaatgaataatgtaaacgatttagaagatagacccagattactaccatatggtaaacaaggtaactatcatttagctgatcaatgcccttattaaagttttgcttccttgccttcatggaggcaaatcttgtatttcctctcctgtcttagccctctgttatctcccagtcctcctcccctcacacagccatgtacctgcccttatctgccaacagatgtgagagaaccaatgaaaaaggagatctgatctcttgaatagatggagtctccattggtggagaatataagaagagaaaatgggaaaggtagacagagaataatacaggacaaattacatgaatggattccatcttctaaaggaacataaaagtcctaccctccgaggttgagataaggggattatttttaattaatttcatagaactattaagagaaactcagaaataacctaagccatatcagattcaggtgagagatattccttacggagatgaccagttaggggtctctagtactgtggtcacagtccaagaggggagtttggatatggagagagaggggagcctgaaagatagaattgcgcagggagacaaaactgaaatagtgttggcagatagaagatcaaagtgaaatgggagaaacagaaatggaaagagaggaagtataagacacagcagagaaaaggtaaaccgaaacatctgccaaggatcagaggtaaaaatggagagagaagtatatggaaaaggaaagatgagaggaaaataaataccaagaaatggggaaagtagagaggtacagaggcaactatgtagataaagagttaagaaaaaaagggtgtaaaacacttgagagtgaaaagtggataaaagggagagagaaacagactgggacagtgtaggtttgaggtaagagcactggatatccataactttacaagggtttattccattaaccgtaagttttcagaatgaactgttcccacatcaaagtggcacttgcatgatactcagatttcaatagatctctcccagaatagtccaatgattcccaagcacaaatctccactctaaattatctttagagtacatttattcatggacctgaggacctttactcaagggtcagatagacatctacacttgatttttttcaagaaccttaaacttggtactttgagaactgaaagccacatcttcattgctcaagttagatcgaactcctctgcagcactctttctctcagagacggatcactattatcccatggtttttcaagttggaaacctagtcaagtcatcatggatgactcctcccttgccctcaaatacatgccagttatgcagccaatgtaatcatttcatcttcaggttgcccctggcctgtccatctttgcatccccaagaccaggtctctggtccagatctccatcaccctcatgattctcagggcaacatcctttgctcatctcctccctctaatcttgcttccatcaaatgtgttatttgcacttcaactagatgggatattttaaagtgcacatcagattgtatcattttcctacttacctccttaatacactaaggattaaataaatgggtttttaagtagcatccaaaggcatccacaatgagccacctgcttacttctccagcttaatccctgcctcctgaaatattacttcaaggtggaataaaatttcccccaataatttcaattgttaaatctctctttcaaactgagcctttccctatgttttctctatgctgccttatttagaattgttttcctgtcccactatcctccatttacccttctccaatccagctaaatcctacttagaatatatgatcaaagggaggtctttctttagagaaagctagaaaggcacaattgggagaccaaggatgggagagaaagagcagtatcagagaaagcaagagaaaaaatttgcaggagcagagaagagagaaatgcatctaggaaagagaggctccaagaaacatccgcagaaaaaaacagaggcagagattgaggaaatgtacagaaacaggtggaaagacatgagtgagaaaatgggaaagagaacaaggtataaggaaaggaagactcccccacagtggatgaattattctcagcctctggtgaaggttactgaaggactgaatcctcaggtcaggttgtttggggagaggggaccttccagattatcaggttttcttagttttctcattatttgttttcttgttttgatggctttttgaccataaatcaagacatctaagggatttcattcctttcggcagagaacagcaatgcctgtcatgaaatggatgatatagcagtgcctcaggaagccttgagctcctcgccaaggtgtgagccaggtaaggaaggagtgacttgctctccctgacctgcagggtgtcaggaggtggaattcagagctggtgtttcctaatgcattttactctgagtacatgccacaggcaaaagatccattttgtccttggatcctataattctgctaaattttcctaagtgtatgttatagtagaaatatgctagagaaggatgatgtctttcatgtctactaataataaaaacttgattatacctacccaccacttactttctctagagaataaaaacgattattgtttgttactattattattttgtcccttactatagaaagccttcaaaagaaacatgttccatcagaccaactactcgaaaaactaaatgataatttttgccaaatattttccattgtgttactatcttatctagttattgttcaaagaattttggcaaacaagatgtcattttatctccacagcttatgaattttgatggataaacttttgcttatttgtattttatagctaaataaagtagaagtagaagcatagcaatgtgtaaggtcttttaccaggtcaaattagtcaagcaagaacatgacccacatccctgctgactcactgcggtgatggttgtgtgaatttggcagagatcagggtagccagggtcatggattggagttcacacaggagacccaaggaggcctgcaggttcttaggggagtgggccagggcctggtgcaaggagactcttattcagcaaaagcatttccatggccagagcagggaaaagcagagagaaacggtaagattggaatctgccatgtgggatgcaagaaatccagaagaagagaaccagaaagaaaaatggagacacaagtaggaaaatgtgatggagggcattgaagagcaacagaaaagaaaaagagagggaatcccagggagtcaaggagatggacggtgcttcatggcgtagaagcaagagtgtgtggtaaccaaaaagtgagaaggagaaaggaggtagcagagagatgatcagaaggaaaacaggcagagcaaggctgtggcggggctcaggcgaggtccttggagcaatagtgtttttttgcaaggagaagctcacttgagtgctgaacaccaggattcagcaggagcatcctgaggtctgtgctctcatcactgtgccttgtttatttccaggtttctcttcagagtcttgtgagcagttagctctcccaaaggctggtggaggagatgctgaagatgcacccagcctactaccaggtgggggaggtaattatgatttaaatgaccaattatctcattaaattagttggcctatctctatgcaaccaacacttccttctctctccaccaccaaccctgtaacacacttttgttcagcctgtggttgttttccccaggtgtgtgggaggcaagaggtaaaggacggctaagtcctttagtggaggggctcctgggcagagagcttaagggtacagagtaataaaaattactctgattggaggcaccaaatggtgttgcctaagtgggcccaattttatctacatgaatattgaatctaaatcctaccaggatggggtttgagaaaagagagagaattttaaacttacttgccagggattatttaggaataatgaaatactgtatatagaagagacaaagtggaagtgacaaagttagaagaatgaatagggatataacggggcaaagaggtaacaaacatcacgaaggaagaaagagacagaaatgcaaagaaatggtagaagtcagggagaggaagtcaagtcaaagagatcctggagttggtttatggtgcagatgcagcaatgtgtaaagacagggttagagggagaaaaaagaaggagagagagggagagaggggaaaggggcctgacaaggtgctagaagaagtagagccacttttgtttggtgcaaagatacctttattcccagggagcagttctacacccgaatattagagctcagcatggatccaggtaggtgtccaggtcactgccaattgtctgtcatgttcctctttcactctgcagtgtcctgtaaacttgctatacaaatagatgaaggagaatcagaagaaatgcccaagttactgccttatgatacagaaggtaattaggatttaaattaaagctttatttttctgtcaacatacaaaaacacctactctttcatctcccttcccattcccccatctattcatgtattcatccatatatccatccatccatccattcatccatccatccatatatccatccatccatctgtatattcatctgtccatccatccatccagccatccatcaatccatgcatccctccccacatacagacagagacagtctatgtccagcttcttcctgctttccttaagaggcacaagtagcaaaagaaggatgagctcagactggttggggctttcctgcatataggacatagggaaagagagagagaaagaaaaatatagtttgaatcgttaaataaagagagatctgagtgattgccagttttacctcaatagttgtgggatccaaatattaccacgttgggtaacatttgggtaatattaccacattgggtaacatttgggtaatattaccacattgggttataaggaaggggagataattttcaacttattttctcgaggttatgccaacagcatggatataatgagtatattgcaatatagaaaactcagtgaaagactgttgaaatgaacttcacaaagggaagggtccctgcccctttgttaatggcaaaagatgaggcctttgatactatggcagaaaaataagacagaatatacagaaagactgaagtttaaatttttagatttaaattttggattgaaaaattaggaacagaaagctaattagagagaacagatagaggcatggaaatgagcaccatggaagaaaggagataagcttgattattaaatatggcacaggaattaaaaggtggagaaaatactgtgagaggaacagagagaagaaaaatgctcgaagacagagacagtggaggagaggcacaaaagttgtacacagagaaaaagagaaaggagaataagtgaagttagcagagagtgaaaactgcttgcaagagatggggaacaatatgggacattgtagggatggagggaagattcactagacagaaataacttctggcccaagaatgagacatgttagcagcgagttttcacattatggtgtccccagcctatcaaaatggcacctgtaatgtcctcagaggcagtcgacctccccctgaggctttcatgtctctcccatctataacttaatgatttcaaaacacatatgtccagatttatcttctaagttcattcatctgagtacctgaatacgttcatgaagatatctgaaagacctctccatttggatgtttttcaggaacctcaatacaagacacctccaagagtacataccatctttcctgacacagatctgactcctctcccagtgttccctatctcaggatgaaacactattactccattcttgaagcagaaacctaggagccactcatgactcaccccacctccctcaacttaaacaccccatcaaccatccagtagacttttagtgagttctacatatctcacctgtccatttccttccaccccaacacaaaaactctggtaagatctctctcttggactggagcaacagcctctagactcacatctttcctctgatcttgtacctctcacatccattctttccaactcaaacaactctttcaaaaattgaagttggcttatcttacatttctactttaaatcaataactacttggggtcataaggattaaatctattttttcccccagggctccagcttcatgtctgcctctcctgcaattacttcaaggtttatatacaaattttctagtcattgtcattttctgatgactctttctcatctgagctttcctaaaggcttagccctgtgcttgaaaaagtcaccttgtttcactacaatctccatcatgctcactaatctagtgaaattatatggaaattacatacactctcagagatgccttttttgatccctagttctagaaagcaacgggatgatagatgcggcaaggacatacagcacagcaccaggggagaaacagggagaggaggaaggcaggaacagtcccagaaaaagaaaccaagacaaggagaagtaccaagagagtccagagggaagagacaaaggtaggaacagaagaagcagagacatgtgtcaagggtgaaaatgagagtgccaacatggggtgggagaccaggtgggcaaggtttctgacagtctctatcagattactggattgcacaagagcttcttttaccctcacaaaatctttaacatcgatatgcaaacagctgtatgtctatcttacagactgagaaataaagcacagaaatgcaagcaggatattatcacaaaggcaaagtagaaaaggaagagtgggcaccagtgtcctggatgtgtcactgggtgatggttgtgcaaggccagctgggggttcagggccaggtcacagggtcagaatagaaagaagtccaaggagttctgcaggttcccggaggagtggaccagggatcaatgtaaggctttaaggaaaaaaaatgctaatgggagggaagggaaatcatggaaacacagcatggaaatagagcctgccctttggaataggagagggatctagaataagagctaaagaaataatagaaaagggatatggtatcactgaaaaagaaaaaagacatagaaacaggagacaagagaagccagttggagagaagatcagacaatccaagcgctgctcagctaggagggaattatgtggaggcagaacggtgaggaggacactgagaattacagagaaggagaaagaggagctgcaacaaggtggagaaaaggcggaacaagacaggggtggctctcagcatttgcccatcttggatggcatgaacacactgaggcctgtgtccaagtcaccctctgtggtctgtcaatttcttgtttatctgcagagacctttgatctaaaaactccccaagtcactaatgaaggagaaccagagaaggggctctgtctactaccaggtgaaggagaaggtaattatgatttaagtttttaaatatttgagtacatctttgttttctagttggcatggaaaaaaagtttccctttctcccatcctacccttcccttcttcacattcgcatacatacagatggaattatgtcaattttctgttgtgcctttttgaaaactgtgagagagacaaaggatcaaggtgagctgagcccctgagtggggaccatatttctgcatggggaatgtagggagaacgaatataccagaggtaggctggggcgccagagaagtgcgtgggtgatgttattaaacacacattaaacctaaataacagcagattatggcaactgacgcaggggagaatgttttcagcctacttccagaaggatctggagcacagacatgttttgtgaaagaccgaaggcttgcaactgaggaaagtcatgcaggagacccttgggatggtgctgacaagggaaggacctgtggtgctatagcccctgcgtgaacagaagatcttttccaacctggaagaagataactttgagaatgaggaaaatatataaaataagggacattttaccagcatctaggagcataagataaaacccaaagaaacagaaaaggagaaagtagaagacacatagaaaggtgataacctcaaggagaaaagttagagaaaattgtacaaatggtagcaaatacaataacaacagcaatatgggaaggaagcacagaagaaattatgcagagaaagaaacagatcaaaataattaaagaacccatgaagagtgaaaactgttgtccaaggaaaggggcaggtcgagggcctatggagctgaagtcagtcactagatagaagcagctcccagcaaagggcacctctatcaatagtgagttttccaatccaggcccccctaggtagacagtggcacagaagcatactcagagagtaagagtactctttccccagtctcatctgctcaggtagtggaatgattctcatgtacatgtctgcgatgcagacctgctttccaagctcttccatccatgtgcctgaagatatttatcccaggaccctgccccttgcaatgtctttcaggaactacacacatccaaaagggaaaccaacacctcctccgaacctagaaactcccctttctccagggtttactctgtcagtaaagggatgaatatcctgtttgctcttctactcatcagactctttttctctgctttagcacaattgttctctgctttagcacaattggcaattgcaagatgtcaatcagatcattttcttttccccttagacgcggtgatctttgctgcacaggattagatgaattatccttcctgtggatttctgtggcttccacccttcatgggtccccagcccatatcatctgtcccatctctactaatggcatcaattgtttcaggagctgcaatgatctgatctttcttttatatgtgggcccttgagccacatttcccctgtactctgtattgttgccttggcccactcttctcctgatccctttccttatctggttcatttccaccatcccaaggatgcctttcctgatgcccagtatgagaaagggggtgacaaggaaataaatgagatggggaaagccaataaaaagcagagtcaggggtgcaagagaaaaaggcaggagcagagaatggagcagaaacacatggaaacaaagagaagcacctggagccactggcagcaggaaagcagggcaaaggcagaagaaatgtgcctaggaaagggggagggggagaaggagagagaattaggagtccaggcagcaagtgagctgatggatggttctcagccttggtgacagcaactggagtgcatccacttacaggccaggtgaacccacctacagaacccacctacaggccaggagggcctgggtgatggacagccccacctaggagatacttcagcttcccacgtcttcactaagttttctcttcataatttcttgagggatttcttttctttctgcagagggcagtgatgactgttcagaaatgtgtgatggagaagagccccaggaagcctctagctccctagcaagatgtgggtcaggtaaagaaggggaggatttctggccctgggctgcagagtgtcaggaggttgaatttggagcttgtgtttcctgattgtctttcctccaagtatacttcacagtgaaagaatgcaattaaatctgagatttttcacattttctatacatggatatttgagaaatgcagggaggaatcttgatatagaagtctgtgtttaacggaatgggttttattgtttgaacatatgtgtttagataatcacgtggtagttggattatgtcaaggcaaggcaatgtgttctccccttcatattctcatgcctattaatactgaagcattaaaatattttactgaataagatctcctgataccctcacaaaaccttaagatggggccagacaaactgggtaatcctattttacagatgaagaaataaaggtcagaatatgctaggaggaaaaaatgctctttgcctttatttttcttcactatcaatagtattacttgaatttaaaattctattctcactcactttttctatgggaatgaaaaagcttatcatccctctgctggtagatactttttatcattttattacaaacttgacaaagccttcaaagaaatggtatcctaccctctaattgacagaattcagatgatctctttatgagactaaatgctatttttgaccaatactcttcattatgttattggatcatgcagtatgtttttagaggactctgataagtgttacatttttaccctcagaaacctcaagatttaggcagggaaagtgctgttattgttgttttgaggagccagaaacacagacgtacatgtgacaccggtgtttgttaagacccaagaaggagggaaatgcggagaccagtgtcctggatgactccttacaggctttcagttctgtgaggcgggcatgggttagggtggggtcccatagactgagtccaatgtggatgcccaaagggtttttaggaatctgagagactctacctgggtttaatggaaagagacttttattaacaagtaaagcaagcttaaggagaggagtggaaaaattattgagagttagaaagtatgtaaatataatccatgatacgagataggagatatccagaaaaatagagccaggaaagatacacagagatagaatgtgcatagcagatgtagcatatcactgaaggagaaagagacagatattcagggagagatgtttggaagagaaagtccacagagccaaagagaaggacagttgccttcatagagtagcattctatgaaggtgtatgaagatataagtgtataccttcatgtgccttaataggcatagagtggggcaaggacataaagcacaggaccagggatgcaagagggaaatgagggaggcaggagcagtcccagaaaaagaaaccaagacaaggagaagtaccaagagagtccagcggcaagagacagaggtagaaacagaagaagcagagacatgtgtcaagcatgaaaatgagagtgccaacatggggtgggagaccaggtgggcaaggtttctgacagtctctatcagattactgggttgcacaagagctccttttaccctcacaaactcttaaacatctgtatgcaaacagctaaacgtctattttagactgagaaataaagcacagaaatgcaagcaggatattatcgcaaaggcaaagtagaaaaggaagagtgggcaccagtgtcctggatgtgtcactgggtgatggttgtgcaaggccagctgggggttcagggccgggtcacagggtcagaatagaaagaagcccaaggagttctgcaggttccctgaggagtgaaccagggatcaatgtaaggctttaaggaaaagaaaaatgctaccgggagggaagggagatcgtggaaacacagcatggaaatagagcctgctctatgggataggatggatctagaataagagctaaagaaataatagaaaagagatacaatatcactaaaaaagaaaaaagacatagaaacaggaggcaggagaggccagttggagagaagatcagacaatccaagcgctgctcagctaggagggaactatgtggaggcagaacggtgaggaggacactgagaattagagagaaggagaaagaggagatgtaacaagatggagaaaaggcggaacaagacaggggtggctcttagcattttcccatcttggatggcgtgaatgcactgaggtctgtgtccaagtcaccctctgtggtctgtcagtttcttgtttatctgcagagacctttgatctaaagactccccaagtcactaatgaaggagaaccagagaaggagctcagtctactaccaggtgaaggagaaggtaattatgatgtacatttttaggtatttgagtacatctttgttttccagttggcatgggaaaaaagcttccctttctcccatcctacccttctcttcttcacattcgcatacatacagatggaattatgtcaattttctgttgggctttttttgtaaattgtgagagacaaaggatcaagctaaggtgagcccctgagtggagaccatatccctgcatggagcatgtagggagatacaatatgccagaggtaggctgggggcaccagagaagaagttcctgggtgatgttattaaaaacacatgaaaccgaaatatcagcaggttatggtaattgaggcagggagattgttttcagcctactttcagaagtatcaggaacacagacgtaagttttgtgaatgattgaatgcttgcaattgagaaaagtcatgtggaagacccttgggatggagctgacaagcaaagcgtatgcagttttacagcccctgcgtaaacggaagaacttttccaacctgggagaagagaactttgagagtgaggaaaatatataaaatcgtggacattttacaggcatctaagaggttaaggtaaaacccaaagaaacagagacagaaaaggagaaagtgaaagacaaagtagaaagaggataatctcgataagaaataagaggcagagagaaaagttaagagaaaattatacaaatggaggcaaatacaaatgacaacaatgttggaaggaagcacagattaaactatgcagagaaagagatcaaaataattaaagtacccatgaagagtgcaaactatgtcggaggaaaggagcgggttgagggcctgtagagctgaagtcagagttactagacagcagcaacatccagcaaacggcacctctatcaatagtgagttttctgattaaggtccttctaggtagagagtgacacagaagcatactcagagggtaagaattctttctctccccgcagcctcatctgctcaggtagtggaatcattgtcaagcatttaatatctgtctgttaggcaggcctcccttccaagctcttccatctgtgtgcctgaagacttttatcttgggaccttctttattgcaatgtctttcaggaactgaacacctcacagtggaaaccagcacctcccctgaacttagaaactcctctttctccagggtttgctgtctcagtaaagggatgaatgtcctgtttgctcttctactcatcagactcattttttctgctttagcacaattgttatttgcaagatatcaatcagatcatcttcctttccccttagatgtggtgatctttgttgcacaggattagaagagttatccttcctgtggatttctgtggcttccacccttcatggggccccagcccatatcatctgtctcatctctactaatggcatcaatcatttcaggagctgcaatgatctgatctttcttttatatgtgggcccttgagccacacttcccctgtactatgtgttgttgccttggcccactctgctcctgatccccttccttatctggttcatttccactatcccaggaatgcctttcctgatacccagtatgaaaaagggggtgacaaggaaataaacaagatggggaaagctagtaaagagcagagtcaggggtgcaagagaaaaggatagaaacagagaaggggggcagaaacgcatggaaacaaagagaagcacctggagccactggcagcaggaaagcagggcagaggcctgagtctaatgtggaaagggggagggggagaaggagagagaattaggagtccaggcagcaagtgagctgatggatggttctcagccttggtggcagcaactggagtgtgtccacctacaggccaggtgaacccacagggcagaccaggaggacctgggtgggggacagccctacctgagagatacttcagctttccacatcttcactaagttttctcttcatgattttttgttggttgtatactgagacctctgagggatttccttcctttctgcagagggcagtgatgactgttcggaaatgtgtgatggagaagagcgccaggaagcctctagctccctagcaagacgtgggtcaggtaaggacggggggggggatttctggccctgggctgcagagtgtcaggaggttgaatttggagctcgtgtttcctgattgactttcctctgcatatacctcacagtgaaaggatctaattaatcctgagatttttcacattttctgtacatgaatcttttgtgaaatgcagggaggaatctttatacagaagtccatgtttaacagaatgggatttattgtttgaacatatgtgttcaggcagtctagtggtagtcaaaatatgccaaggcaaggcaatgtgttccctcctttatattctcatgcctttcaatactacagtattaaaatattttaccaaataagatctctcgataccctcacaaaaccttaagatgggggcaggcaaactgagtaatcctattttataggtgaagaaataaaggtcagaaatacggtaggaagaagcaatgctcttttgcctttattttttctagctatcaatactattatttgaatttatataaaatttctattctcaggaacaattttacactgttggtgggactgtaaactagttcaaccattgtggaagtcagtgtggtgattcctcagggatctagaactagaaataccatttgactcagccatcccattactgggtatatacccaaaggattataaatcatgctgctataaagacacatgcacacgtatgtttattgtggcactattcacaatagcaaagacttggaaccaacccaaatgtccaacaatgatagactggattaagaaaatgtggcacatatacaccatggaatactatgcagccataaaaaatgatgagtccatgtcctttgtagggacatggatgaagctggaaaccatcattctcagcaaactatcacaaggacaaaaaaccaaacactgcatgttctcactcataggtgggaattgaacaatgagaacacttggacacaagaagggggatatcacacaccagggcctattgtggggtgggggaggggggagggatagcattaggagatatacctaacgtaaatgatgagttaatgggtgcagcacaccaacacagcacatgtatacatatgtaacaaacctgcacgttgtgcacatgtaccctaaaacttaaagtataataaaaaaaatttctattctcactccctctatggaaataaaaaagggtatcattcctctgctggtagatacttttttatgattttttcacaaacttgacaaagccttcagtgtaatggtattctaccatctaattggcagaacttagatcaactatttgtgagactaaatggtatttttgaccagtactttccattatgtcattggatcatgcagtggtttttcagagtactctgataggtgttataattttactcacaaaaacctcaagacttagatagggaaggtgctgttattgctgttttaaggagccagaaacacagaaatgcatgtgacacgggtgtttgataagacccaagaaaaaagaaagagcagagaccagtgtcctggatgactccttacaggctttcagttctatgaggtgggcatgggttggggtggggtctcatagtctgagtccaatgtggatgcccaaagggtttttaggaatccaagagactctaccagggttcaatggaaagagacttttatctaacaaataaagaaagattagggagagataaggaaacattatcaagagttggaaaatacttgaatgtaatctacgatacgagataggagatatccagaaaaatagagccagaaaagagaaacagagaggcaatatgaaaagtatatgtagcacatcactgaaggaggaagagacagtaagggagaggagatgttaagaagagaaagtccagaaagccgaaaagaaccatagatgccgtcatagagtaataaaaagatatcactagtagaaggggctatcacttaggctgggtgcagtgggtcacccctgtaatcccagcaatttgggaggccaaggcaggtggatcacttgaggtcaggagttcaaggccagccgggccaacatggcaaaaccccatctctactaaaaatacaaaaattagctggttgtggtcgagcacacctgtagtcccagctactcgggaggctgaaacaagagagttgcttgaacccgggatgtggaggttgcagtcagctgagatcacatcactgcactccagcctggtgacagagcaagattccatctcagaagaaaaaaagaaaaaataaggggccaccacttaatatcaaacgaaaggctgaatttattgttcagttaagggatagttgtgcttgtgggtcagtttctctgaacagagaacgtttgtggaagtgtggatctcggtgactggcggccttcaaaagtgagatttgttagtggttagctgacctttagtgaaagcagggtcactggagtgtggctgttactgactgtctgactttcagaagcatggggaagtcaatggttggctggctttcagaggcctgtgtactggccagaagctattgttgattaattgggatgattctggttgttattgaccatatggccaaacaataatgagttttcctagaagtgtagcaactttcaattatcagtttcccctttaggaaatctctcatctaaagctgcaggaggcaccatcaagtattttccccatccaagatgtcttttctggaagaggaccctggaaacaaaatcctaggattccccttcactgagtaggagttatagagttgctagattgagagtgttatccttgcaaaggatgacataagaaaaagtaatgatgttttacaatacgttaatggaatggcagacaactgttgaaagtttttaattagcagcagaattgtgctgcttgcaatactatcctatttattcccttttgctccaagaatactcaccagccacccttgtggctgcagcgtttatcccaagtaaatttgccatgaaatatcttgcttttattattattttcacatcactctaatatattgactttggaaacaaaagacattcttctaattatagcattctggttttagtagtggtatttccatttacaaaatacagtaattgttgatcactgaaaatgtcaaatcctggaaaacgtggctttcccacatgtgctgttaacattgttactgaacaattgttggccgaagattcatttgatgaatcatatatttttaaaatagatgattctgatatggttctgtttagaaataactccaagaacagtttatatattttattttcacattgaaaatcaatcatgtttgcttcagcctcaaagaatgtgtttacgtaaaattaaatgagtgcagcaagctgcacttttttttttttctaaacgggaacagagttaaagttgatccaagtacaaaatctccagaaccatggactaatgcagtcacctgcaattgctttgaggcaactaggatgagatgtggctactagcaatggctctttgatgtctgtcacgttttgaagtgatacccctagagcatggcctgtttgtttatttatttatttatttatttttatttttccgtaagttattggggtacaggttgtatctggttacatgggtaagttctttagtggtgatttgtgagattttggtgcacccatcacctgagcagtatacgctgcaccatatttgtagtcttctatccctcgcacccctcccactcttccctccaagtccccaaagtccattgcatcattcttacacctttgcgtcctcatagcttagctcccacgtatcagtgagaacatacagtgtttggttttcctttcctgagttacttcacttaggatgatagtctccaagccgggcacggtggctcacgcctgtagtcccagcactttgggaggctgagatggatggatcacctgaggtcaggagtttgagaccaacctggccaacatggcaaaaccccgcctccgctaaaaaaaaaaaaatacaaaaattagtcaggcatggtagtgtgtgcctgtaatcccagctactagcaggggctgaggcaggagaattgcttgaacccgggaggtggaggtggtaatgagctgagatcacaccactgcactccagcctgggtgacagaacgagactccatctcaaaaaaaaaaatagtctccaatctcatccaggtcactgcaaatgctgttaattcattcctttttatggctgcgtagtattccatcatatatatatatatatatatatataccacatacatacatatataccacagtttctttatccacttgttaattggtgggcatttgggttggttccacaattttgcaattgtgaattgtactgctataaacatgcatgtgcaagtatctttttcgaataatgacttcttttcctctggatagatacccagtagtgggattgctggatcaaatggtagttctatttttagttctttaaggaatctctacactgttttccatagcagctgtactagtttacattcccatcagcagtgtagaagtgttccctattcactgcatccatgccagcatctactgtttttgattttttgattatggccattcttaaggagtgaggtggtatcgcattgtggttttgatttgcatttccctgatcattggtgatgttgagcaattttttcatatgttcattggccatttgtatatcttcttttacgaactgtctattcatgtccttagcccactttttgatgggattgtttgtttttttcttactgatttgtttaagttcattgtagattatggatattagtcttttgtcagatgtatagattgtgaagattttctcccactctgtgggttgtctgtttactctgctgactgttccttttgctgtgcaaaagctcttaggtttaattaagtcccagctatttatctttgtttttctttcatttgcttttgggttcttggtcatgaaggccttgcctaagccaatgtttagaagggtttttctgatgttatcttccagaatttttatagtttcaggccttagatttaagtccttgatccatcttgagttgatttttgtataaggtgagagatgaggatccagtttcattctcctacatgtggcttgccaattatcccagcaccatttgttgaatagggtgtcctttccccactttatggtttgtttgctttgtcaaagatcagttggctgtaagtatttgggtttacttctgggttctctgttctgtttcattggtctacgtctatttttgtaccagtaccactctgttttggtgactatggccttatagtatagtttgaaatcatgtcgtgtgatgcctccagatttgttctttttgcttagtcttgctttggctttgtgggctcctttttggttccatatgaattttagaggtgttttttctaattctgtgaagaagatggtggtattttgatggggattgcattgaatttgtgattgcttttggcggtatgatcattttcacaatattgattctacccatccatgaagcatgggatgtattttcatttgttcaggttgtctatgatttctttcagcaatgttttgtagttttccttgtagaggtctttcgactccctggttaggtatattcctaagtttttgttgttgttgttgttgttgttttgcagctattgtaaaaggggttgagttcttgatttgattctctgcttggtcactgttggtatatagaaaagctactgatttgtgtacattaatcgtgtatccagaaagtttgctgaattcttttatcagttctaggagctttctgggggagtccttagggttttcaaggtatacagtcatatcatcagcaaacagtgagaatttgacttcctatttaccaatttggatgctctttatttctttctcttgtctgattgctctggctaggacttccagtactatgttgaagaggagtggcgagagtgggcatccttgtcttgtttcagttctcagagggaaagctttcaacatttccccattcagtattatgttggctatgggtttgtcataggtggcttttattaccttaaggtatgtctcttgtatgctgattttgctgagagttttaatcataaggagatgctggattttgttgaatgctttttctgcatctattgaaatgatcatgtgatttttgtttttaattctgtttatgtggtgtatcatatttattgacttgcatatgttaagccatccctgcatccctggtatgaaacctacttcatcgtcgtggattatctttttgatatgttgttggattcagttggcaagtattttgttaaggattttagcatctatgttcatcaaggataccagtctgtagttttcttttttggctatgtcctttcctggtgttggtattagggtgatgctggcttcacagaatgaattagggagggttccttctttctctatcttgtggaatagtgtcaaaaggattggtaccaattctttgactgtctggtagcattctgctgtgaatccgtctgatcctgaacttttttttgttggtaatgtttaaattaccatttcagtcttgctgcttgttactggtctgttcaaggtatctaattcttcctgatttacactaggagggttgtatttttgcaggaatttatccatctcttctatgttttctagtttatgtacataaaggtattcatagtaaccttgaatgatcttttgtatttcactggtgtcagttgtagtatttcctgtttcatttctcagtgacgttattcgggttttctctcctcttggttaatcttgccaatggtctatccattttatttaccttttcgaagaaccagcttttgtttcatttatcgtttgtattttttttatttcaatttcatttagttctgctctgatctttgttatttcctttcttctgctgggtttgggtttggttttggtttgttcttgtttctctagttccttcagatgtgaccttagattgtcagtttgtgctctttcagtctttctgatgtaggtgttcagggccatgaactttcctcttagcaccgcctttgctctatcccagaggttttgattgtcattcagtttgaagaattactgtcattcagcttgaataattttttaatttccatcttgatttcgtttttgacccaatgctcattcaggagcaggttatttaattttcatgtatttgcatggttttggaggtgccttttggagttgatttccagtcttattctactgtggtctgagagagtgcttgatataattccaattttcttaaatttattgaggctcgttttatggcctatcatatggtctatcttggagaaagttccatgcactgttaaatagaatgtatattctgtggttgttggatgaaatgttctatatatatctgttaaatccatttgttccaaggtatagtttaaacccattgtttcattgttgactttctttcttgatgacctgtctagtgctgtcagtggagtattgaagttctccactattattgtgttgctgtctatctcatttcttaggtctattagtaattattttataaatttgggagccccaatgttaggtgcatatatgtttagaattgtcgtattttcctgttggacaaggctttttaccgttgtataatgtccctctgtgtctcttttaactgctgttgccttaaagtttgttttgtctaatataagaatagctacccctgcttgcttttggtgtccttttgcaagaaatgcctgtttccacccctttactttaagtttatgcgagtccttatgtgctaggtgagtctcctgaaggcagcagatggttggtgagttcttatcggttctgtggttctgtatcttttaagtggagcatttaggccatttacattcaatgttagtattaaaatgtgaggtaccattgcattcattgtgctttttgttgcctgtgtactttttgtttttattttttaacttgtattttatttttgttttataggtcctgtgtgatttatgctttaaagaggttccgttttgatgtgtttctaggatttgtttcaatattgagagctccttttagcagttcttgtagtggtggcttggtaatggcgaattctctcagcatttgtttgtctgaaaaagactgtatctttccttcgtatatgatgcttagttttgctggatacagaagtcttgtctgataattgttttgtttgaagaggctgaagatagggccccagtccctcctgtcttatatggtttctgccaagaaatctgctgttaatctgataggttctcctttggaggttacctggtgcttctgtctcacagctctaaagattctttccttcgtcttaaatttggttaacctgatgacaatgtgcctaggcgaagatctttttatgatgaatttccctggtgttctttgtgcttcttgtatttggatgtctaggtctctagcaaggccagggaagttttctttgattattcccccaaatatgttttccaagcttttagaattctcttcttcctcaggaacaccgattattcttaggtttggtcatttaacataatcccagacttcttggaggctttgttcatattttcttattctttttactttatctttgttggattgggttaattcaaagaccttgtctttgagctctgaatttctttcttctactttttcaattctattgctgaggttttccagagcatttcacatttctaaaagtgtgtccaaagtttcctgaattttttattgattttctttaagctatctatttgcttgaatatttctcccttcacttcttgtatcatattttggatttccttgcattgggctttgcctttctctggtccctccctgattagcttaataactaccctcctgaattcttttttgggtaaatcagggatttcttcttggttcggatccattgctggtgaactagtgtgatttttggggtgtgttaaagagccttgttttgtcatattaccagggttggttttctggttccttctcatttgggtaggctctgtcagagggagggtctagggctgaaggttgttgttcagattcttttgtcccataggatgttcccttgatgtactattctcctcctttttctatggatgtggcttcctgtgagccaaactgcagtaattgttgtctcttttctgggtctagtgacccagtgagtctaccaggctccaggctggtactcggggttgtctgcacagagtcctgtgatgtgaaccatctatgggtctctcagctgtggataccagtgcctgttctgctggaggtgaagggggtgcaatggactccatgggggtcctttggtggtttaatgttctatttttgtgctggttggcctcttgccaggaggtggcactttccagagagcatcagctgtggtattatggggaggaaccggtgatgggccagccctagaattcctaaggttatatgccctttgtcttcagctgccagggtggataaggaagagccgtcaggtgggggaggggctaggcatgtctgagctaagactctcgttggacatgtcttgctgcagctgctgtgggggatgggggtgagattcccatgtcactggagttgtgtacctgggaggattatggctgcctctgctgagtcatgcaggttgtcagggaaatgggggaaagctggcagtcacaggtctcacccagctcccatgcaaaccaaagggccagactcactcccaccatgccccgccccaacagcccccagaccatttccaggcttgaaaacctgccccaggctatctgcctcccagctgcagaagaaaaaggcttggttcttccccacctgtggagtctgcacaccggatttgcgccctcacaagagttctgtccaggaggcgtctcaccctgttcaaattgttacaaagttcagctagagattggcttctccctgtgtagttttaccccctgctcctctcccattgggtccctgtggtgccaggcaggaatggccttctaggggacccagccacctcccaggccctttccgctgcttccccctacacctgtatttccctcatctcttcagattgactcagctccaggtaaagtcggaaacttctcccacaaacagaccttcagcttctccagtgggggtgtgtgttcgggagaggagggtctccttttcccacttctgcagttggggcactctcagttttacgggggggggcggtctcctgggtcctgcaggtgcaatctgcttccttcagagggtcatgttgcctaggctggtcacgaaccatggcctattttttatgtacgtataaaagaaaaggattatgataaaggagaaagggagacaggagacctgtctcctgataatgtgataatagaagattcagtgtgggtgactgatgaaggagtattttaaaatcgtgaagatctgttccatttctgtgttccatgagaatggccccaagatatttgggtcaaatgtagggaggcctggtatttcagaaaagattgacccccattgtcttcaagactcagttaatcctagaaatcctcttatctttccttcagtcattggtcttgggaaactctgaagacattgtaacatttctttatataatattatttcctcagccaatagattatgtctgagaaaatagcctagtttttgttttgtttcattttgtttgttttacaaacttggagtttttccttagaagttttatgtccatttttgcccaactcaatgaatagattaagaaatgtctagatctatagagtataatagaggtgacctatgcatcagatcagagaagatgcaggtatgagctttgtatcccttaggccgtatttaaaacttggaagaagatggttgtgttcgtttttcattgctgcatgacaaataaccacaaatgtaatggcttactacaatacccacttgttatctcacagtcctgccagcagaagtgtgggtgggctcaacttagttctctgcttagagtctccttaggctgaaattaagatgtcagcccagctgaagtcttggctgaaggctctgagaatcttgcaatcgagctcacccaggttgttgacataatccagttcctcgtggttgttgaaccgaggtcacagctttgttgctggttgttggtcacggaccactctcagctcctggaagccaatcatattccttaatacattgcccctccatcttgaagccagcaatcttgtgtggaatccttctcacactttgaatctctgacttcctcttctgctgctggctagagaaaactccctgctcttaaaaggctcataaggttaaaccagatccactctattagtctctcttaaggacagctctgccatatcacataaggtaattatggaagtaatatctcattatgttcacagtcctcaggattagggaaagaaatatttgggggccatcttagaattctgcctatcgtcaaggaaattcctagaaaataactgtccagataagccactgattttcccaagcaaataatatttatctttatcaagtgagacattaaacaaagctgaacataaatatattaaaaattttggctttaggtgagactgaagagattgtagtaatctggttaggaggtacagggaagtgaggtatacctattttgtttattgcttgcagacctcaaatcatccgtagtgtaggtatactaatggtcaggtcaactatacatagatcatgtgtcagagaattttccaggacttctaaaattagtccttcttctgaacctttaatctggtagttctatttgcagaatagatccctacctattacatttatagaggttttgttgaaaacagtgttcctcagataatggtctgaaagtaatagattactggttgagatgtggaaacattcagtgatttttttctcttcttttatagacctacttgtcaaatgtgttacttactttggacatgacaaaacctccccattgcaagccagagtcattttagggaaaattttgccagttattaagaaaagtacaagagttagaatcatgatgaaagtatacagaggaagtgaacattttgtcggggagattatggctttggcaaagacaatcccgtgacaaacagcaaagaggccactatatttcagtataagtgtgaatggtgtgttccacatgaatgaagcagaaactgaaaaggggacatatgattaattacatgattgtagttgactccagattacatactaaacaaaatgattttctttcacaaattgacaagacactaggtgccctcatgaaggttttgatgagggacccaagaaaaaatgtgaccgaacatctttgcacagtttggctactgtctaatggacccacatccattagttttaggggctggcttgaattgaggacttatcagaccttgaccaccagctgtttgctttggatcactgtcttctaacattcagaaagcacaggaaaatcaggaacaagcacacatgaaataagactttttgtttttttggtggggttttgctatgttgcccaggatagtctagaattcctgagctcaagccatctgcctgtaatatgacctattaacaggcataagccaccatgcctggcagagataagactttttaaaaatagacagaagaggccgggtgtggtggctcatgcctataatcccagcactttgggaggccgagatgagtggatcacctgaggtcaggagttcgagaccagcctggccaacatggagaaatcccctctctactaaaattacaaaaattagccaggcgtggtggcaggcacctgtaatcccagctactttgggaggctgagacaggagaatctcttgaacccaggaggcggaggttgcagtgagccgagattacgcggttgcactccagcctgggcgacaagagtgaaactctgtctaaaaaaaaaaaaaaagacaaaagaaaggtaacagtagatgaagtagtgaaacaagtaaataagtaaataagcacattaattgagaaaatgtttgctaagtggtgtacttccaactgaaaatatctaattgtatctaattgtatacccatgtttaaataagataaattcagaactaggagctcagtgaaacaagtcagagttcgagttgttgttgagaaagattcacttggcagtaggtcagaaaaatgacctgagctggacacagtggcctgagattcatgcctgtggttccaagggtcccacaggacactccccagcaagaatcttcaagataatctcggcaggaactccaatttttgaagggctaggctactactcataatctgaaactaaaagctgatttattcctagctaagcaaggcacctagtgggaggaggccctgtgcttgtaagacacagtctctatagaaaaggaaactgcagttttatagagagttttaggaagcatattgtgtagggactccagaccttcagaaacaggagtgtttatgagtaatttagcatttggccatcaatgcaggctttgtggagggggtgttgctgactggctgggcttcagatatgtagaactgccagtaatgggctcgctttcagaaatgtgactggggatataagtagtcagtggccaattgggatgagtttaaatagttgcttttcactattgtcaaagaacagtagtattttctggaatgataagagtttccttgctttattctcaggactacaagtacaaaaataaaagtagagaaaaggaggatgaggtgcataacatggggagagcgtggctctgttatgtgtcaaatgtgattattggagcaggtatatttttttccagagaacagttcatcttagctcagaatatcagtgtgcagtatagcagcactggaaactcttctgtggtcattgtctcaggatccttggacaataattttcttgtttctcattagtgtctagtgaactagaaaatcacccaatgaatgaagaaggagaatcagaagagcttgcttctagcctgctatatgataatgtaccaggtaattatgacttaaaaatagtgaaaacagaaacagagttctgataaagagaaaaaggaggagaaaaaatagacttaaaggaagagtcaaatataaggaggagcagtgaaaggagaagatttcagaggaaaaagtaaagaagggggagcaacaagggtgcagaaaatagagtcactgggtcaaactgaaagtcttcatgaatcacaattttggcccaggagcggagcaatcagcatatgaaaatgagaagtgttcctgtgtcatgtgtttctcagaagaggtgccaggaagcccagaagcaaggacggaaagtgatcaagcgtgtggcacaatgggtaaggctgtctgagggccgtgggatgggggtggctcagtgggccccacagacccccagtagggtggaggtaggtgctccagtctgtccagaattctattctccgcatttgcttgacctgagcctttggggagctgcagggaggcaagagatcgttataaagtactatttaagaggatggactctgttgattagacatagatgatgtcatagaagtatactctttgcaatggcacttatcttgtgtattgcattagtatattaagttacacccaatcttccatgaagcccaggataccccagtgaacttctgctggtagataatagtgtcactttgctacaacttagaaaggccacactcaaaagacaactaatcccggtacttaattgtcaggaggaaagactgcaggtctactcttcttagcccaacacgtatttttgatagaagacccagggcccatcctagactcctagttctcagttcggtgggtttttggttcccctagaagaaagagaggaatgattatccaagcatctgtataaactcaagccttctgtagtatacattgtcctaaaatctataacttttatttattaatttctgtttcctcaccaccacttgttattttccagatactgtggatattgcaaacaactccactttgggaaaacccaagaggaaaagaagtaagaataaataagaatttatttgcttttggtattacaaatacgtttttaatgccagagttttaattttgtcattgttactatttctgttattatttgtaatactgtggtagacagaaggatgacctccctaagatgtctacctcctaatccctggacctgtaatctgctatcttacatgacaaaagggactttacagatacaattaagctagagaccttgaaatggggagatgatcctgggttatggggtgggcacaatctaatcttgtaggccttaaagagtggaaaacttttcctggctgtggagaaaggaagatgtgactatggaagaatcatcagaaatatgtcatgttgcaggctttgaagatggaagaagggaccaaggaatatgggtgacctctaggagctgaaaagacaaggaaatagcttgtcctttccagctcccagaaaggaattactttagccagtgagacccatgtcacacttctcactgacataactggaagaaaatacatttgtgttgttttaaaccactaaattggtggtaatttgttatggcagcaattaagagtaatacagattttggtacttagaagtagggtgtggctattaacatattcctgaaagtgttggcatgcctttgggattgggcaatggacagaggctggaagaattttagattatgatcggaaaagcctatattgccttgagtagtccttagtagaaacatggatgctaaagactgtgctagtgaggactgagaaggaagtgaagaacatgggagagaaagcctatattgcgttagagaaaacctggatcatcatgagcagactgttagtaaaaatatggaggttaactgtgttactggtgagcactcagaaggacataagaaagatgtggaaagggcctccttattatatagtggtctgtcctgtactcatgtgaaaagcagaactttctggatctatagctaaggagatttccaaacacagtgatcatggtgtgttgtggtgtcttttgctaattatagtaaaatgcaagagggaagaggtatattgaaggaagagctgctaaacgaaaaagaatcaagtcttgatgatttagaaaattcccagcctatccaggtcaaaaaacatgataaaatgaggagattcactgtcagggacgtgtgcttggtagaaacaacaaagactttttgccagttccctgggaagtagtgaaaggtcagattatacattcacaaaaaaagttatttgaagagacgtagcatgtgactcataagtccctcagccatctcagcagaagtcaaaaatagatgtgcgttgctacaaaaagaataaaatacctaggaatacagctaattagggaggtgaaagatctctacaaggagaactaaaaaccactgttcaaagaaatgacagatgacacaaacaaatggaaaaacattccatgttcatggataggaagaatcaatatcattttaaaatggtcatactgcccaaagcaatttataaattcaatgctattgccattaagctaccattgacattcctcacataactagaaaatacgattttagaattcacatggaaccaaaaaagagcctgaatagcaaaggcaatcctaagcaaaaagaacaaagctggagatatcatgctacccaatttcaagccatactacagggctacattaactgatatggtttggctgtgtccccactcaaatctcatcttgaattgtatctcccacaattcccaagtattgtgggagggacccagtggcaggtaattgaatcataggggccggtttttcctgtgctattctcataatagtgaatatgtcttcatgagatctaatagttttataagggggagtttccctgcacaagctctctctctttgcctgccatcatccatgtaagacgtgacttgctcctccttgtcttccaccatgattgtgaggcttccccagccacatggaactgtaagtccattaaactctttttcctgtataaattacccagtcttgggtgtgtctttatcaacagtatgaaaacagactaatacagtaaccaaatcaagatggtactggtacaagaacagacacatagcccagtggaacagaaaagagaacccagaaataagaccaaacacctacaactaactgatctttgacaaacctgacaaaaacaagcaatgggaaaaggattccttattcagtaaatggtactgggataatcagctagccatatacagaaaattgaaactggaccccttccttacaccatatacaaaaattatctcaagacagattaaagaattaaatgtaaaacccaaaactataaaaaccctggaagatgacctaggcaataccattcaggacataggcatgggcaaagagttcatgacaaagatgccaaaagcaattgcaataaaagcaaaaattgaaaaatgggatctaattaaactaaagagtttctgcacagcaaaagaagctatcatcagagtaaacagacaacttacagaatgggagaaaatttttgcaaactatgcatctgacaaagatctaacatccagcatctgtaaggtacttaaacaaatttacaagaaaaacaaacagccccattaaaaagtgggcaaaggatatcaacagataacttttcaagagaagacatacatgcagccagcaatcatatgaaacaaagctcaacatcactgatgattagagaaatgcaaatcaaaaccaaaatgagataccatctcacaccagtcagaatgactattattaaaaggtctaaaaacaacagatactgacgaggttgtggagaaaaaggaatgcttatacacactgttgctgggagtgtaaactagttcaactattgtggaagacagtgtggcaattcctcaaagacctaaagacagaaataccatttgacccagcaatcctattactgagtatatacccaaaggaatataaatcattctattataaagacatatgcacatgtatgcttatctcagcactgttcacagtagcaaagacatggaatcaacctaaatgtccagcaatgatagactggataaagaaaatgtggttcatgtacaccatggagtactgtgcagccataaaaaaagaataagatcatgtgctttgcagggacatggatggagctggagagtattatccttagcaaactaatgcaggaacagaaaactgaacaccacatgttctcacttataagtggtaacgaaatgatgagaacacatgaacacctagaggagaacaacacacactgaagcctatcagaaggttcagaaggtgaagggttggaggagggagaggatcaggaaaaataactaataagtatgaggcttaatacctggatgatgaaataatctgtataacaaacacccatgacacatgtttagctttgtaacaaacctgcacatatatccttgaacttaaagtataaaaaaaaaaaaaaatagatgtgtgaattcctaggaaagatctgtagggaagcttcatgtctaatggaggaaatcagaaatccccatgatatatgcaggagatccataagactcttgagggttttgtaccaagagaaacaaagatttccatgtcctatctcctagaacctataatctgttactttacatggcagaagggactttgaagatgtaattaagttaaggatcttgagataagatcacatgggccactaaagtcagagaacatatccttctgtcgagagagggatgtgtgactatggaagaatggtcagagagaatagagctggatgtggagatggatgcaggggtccatcaactaaagaatgtgggcagccttccgaagctggaaaaggctcctctgtggcctccagaaaggagcaaagccctgcagacaccttgattgattttagccctgttaggtgcatgtcagatttccaaccctcagaattatgagaccacaaatctgtgatttttttgtcactaaatttatggtaatttattacagcagcaataccttttgtaagacaaaaaaaaaatttcaccctatacggttatattcaatcttctaaactaacaatttatattttttcaaattacttacacctttatgctttttttttctgattttaaaatacttgttccctgtaaactttgctgtacatatttctatatttttttctatgctttgttagcacatttagaattatgtgatatatctaaatgaatacatttaaactgttacatttctttttaaatcaatataacatgcactggatattataaacatttaatatcttgccaacttaactgtaaaaaaaagttttatttcattcctgttttaacttacattgctttcatttttggtgcagttgagcattcttcatttgttattggccatttttgtttcttctcctacgagtgcctggaacttatattttgccagtgtgttgtctttttttccccatgctttaggacaacaggaatacttatatatgatatatactaagggttgactacgtgtgttgtcatatttgatgttattcttttacgtttctttgtggtataggcacatctcgtttgattgcacttcactttattgtactttgaggatattgtgagttttacaaattaaatgtttgtgacaaccctgtgtcaaaaaaagtctgttggtgccctttttccaacagcatgtgctcactttgtgtctctgtcacattttggtaattctcgcaatatttcaaattttattattattcttcttcctgttatggtagtatgaacagtggtaacaatgatctttgatgttactattctaactgtctatggcaccacacactgtgttcgtataagatggcaaacctaataaatgttgtgtgtgtttcaactgcttcactgaccagctgttcccctgtctctctccctctctttgactttcctctttcctgagacaaaaaaatatggaaattaagtcaattaataatcctacaatggcctctaagggctcaagttaaaggaagcgtcacatgtgtctcactttaaataaaaagctagaaatggtgaggcttagttaggaagccatgtcaaaagctgagaggctgaaaactaggcctgttgcagcaaacaatcagccaagttatgaagtgctactccagtgaacatacgaataataagaaagtagaacagtcttatcgctgatatggagaaagtatgagtggtctggatagaagatccaaccagccacaacattcccttaagccaagccttaatccagagtgaggcctaaactctcctcaattctatgaaggctgaaagatgtgagaagctgcataagaaaagtttgtggctagctgatgttggttcctgaggttgaaggaaagaagctgtctcataacattaaagtgcaaggcgaagctgcaaatgctgatgtaaaagctgcagaaggttgtccagaagatctagccaagatcctagatgaagatggctacactaaacaacagttttacagtgtagactaaacggccttttattggaagaagatgccatctagaactgtcatagctagagaggagaagtcaatgcctggtttcaaagctccacagaacaggctgagtctcttgttagaagctaaggcagcaggtgactttcccttgaagccaatactcattcaccattctgaaaatcctagggcccttaagaattattctaagtctactctgcctatgctgtataagtaaaataaagcccagatcatagaacatctgtttacaacatggtttactgagtattttaaacccactgttgagacatactcctcagaaaaaaagattcctttcaaaatattactgttcattgacagtgcacctagtcatccaggagctctgatggagatgtacaaggtgattagcattatttccatgcctgctaacacaacgtccattctgcagcccatggatcaaaaagtaatttcaacttgcaagtcttaatatttaagaaacacatgttgtaatgctatagctgtctctatacataatgattcttctgatgaatcttggcaaagtcaattggaaaccttctggaaaggattcaccattttacatgccataataacattcatgatatatgagaggaggtcaaaatatcaacattaacaggaatttagaagaagttgattacaatcctcgtggatgactttgaagtgttcaacacatcagtgaagaagtaattgcaagtgtggcagaaatagccaagagaaccagaattagaagtggagcctgaagatgtgattgaattgctgcaatctcatgataaaccttgagtggacaaggagttgcttcttaagaatgagcaaagaaagcagtttcttgagatggaatttatacctggtgaaaatgctgtgaacattgttgaaatgacaacaaaggatttagaatatattagttgataaagcagcagcaagatttgagaggatctaccgtgataaaatgctactcaatagcattgcatgctacagagaaatctttcaggaagagccaatcaatttagcaaacttcattactgtcttattttaagaaatttccacagacacctcagccttcatcagtcaccaccctagtcagtcagtagccaccaacatccaggcaggactttccaccagcaaagagattatgacttactgaaggctcaagtgatcatgagcattacatttagcaataaagtatgtttaagatatgttcattttattttagacacaatgctattgcacacttaatataccacagtatagtgtaaacataactttcatatgcactgggaaaccaaaacatttgtgtgatttaccttattgcaatattcactttattgcagtggtctgaaaccaagtatttctaagatatgcctgtatctttatcccaaagaagcttgaaatttttatctgatcaaatctgtcagccttttcatttatggtttccaggttttatgtaaaatttgcaaatatattgtccacctcataatttagaaacatgtttacttacttctagaatatttggaatactttttaatgtttaaatctataacacacatggaattcatttattggtatatgatgtgagatggtaattaagagatataacactggtagtttttttcttcatgattcaaaatactattttatgtatgttttccagtatatacagaactgtgtcttatcacatttctttatccattcatctgttgatagagacttaggttgtttctatgtcttaactactgtgaattatgctgcaatgaacatgtggatgcagatacctctttaagatattggtctcatttcctataaattcataccccaaagtgagatttctggattgtatgtatttctgtttttaactttttgaggaacctccatactgttttccataatggctgtaccaatttacattcccacttagagcatacaagagttccttttccccacaacctcaccaacacttgttatctcctgcctttttgctaatagctatcctaataggtgtgaggtgatgtttcattatggttttgagttacaattctctcatgattagtaatgttgattgctttttttataatccattggccattatatgtcttctttgggaaaacatttattaagatcctttgcccatttttaaatcagattatgacatgcttttgttttgttttgtttttttgctattgagttatgtgagttccttatatatatttaggtagtaacccttatcaaatacatggtttgcaaatgttttctcctattccgtaggttgccttttcatttttacaattatttcatttgctgtacaaaagctttttagagtgatgtaggtccacttgtttatttttgcttttgttcctgtgcttctggtgtcatatctaaagaataattgcccagactaacctcaaggagcttttcctctgttttcttctaggaattttatggttttatatttgacatttaagcctttaatctattttgagttaatttttgtatatggtgtaagccaagcgtctaatttcattcttttgcttgtggatattcagttttcttaggaccatttattgaagagactgtcttttctccattatttattcttggcacccttgtcaagattaaatgccccttcttgacatctgtattcagcatagtgatgtaagtcctagtcagagcaagtaagaaagaaagaaaaggcatccaaattggaaagaagttaaattgtctctgtttgcaggtgacatgatcttctatgtagaaaaccctatagactccatcaaaaaactgttggaactaacaaatgaattagtaaggttgcagaattcaaagatcagttgtgtttctatgcactaacaatgaactatccaaaaaataaattaagaaaacaatcccatttacaatagcaacaaaaagaataaaataggaaccaagttaacaagaggtgaaatatttgcacactgaaaactatgacattgatgaaagaaattgaaaaatatacaaataaatggaaagatatctcatgttcatgaactggaagaatagtgttaaaatgtccatattacccaaagtgatctgaagagtcaatgaaatctctatcaaaatttaaatgacatttttcacagaaataggtaaaaggaatcctaaaatttgtattgaatcataaaagactccaaatagtcaaagtaattttgaaaaaaaaggaaacaaactggaggcatcatactgtctgattttaaactatgttacaaagcaagagtaatcaaaaccatatggtactgtcataaaaacagacataaaccaatgcaattgaatagggaacccagaaataaacactcatgcatgtatgttcaagtaatctttgataaggacaacaattacagaattttctttatgtagatgttccacgcatccacttttcttatctgctttattgagctgtaatttgcataaaacaaattcatcaccttaaggtataacctaatttgttttaacaaatgtgtgcagttatataaatacctccacaatcatgacatgtatcattttcatcaccccaaagtccacttgcattcttctctccattctctggttctcgacaacagctgatctgttttttgctagtttgttttttaaaagatggggcctcactgtgtgttccaggatgaccttaaactcctgggctcaagtaatcctcctgcctcagactcccaaataagtgggaatacaggcatataccacccctaaaccaaggtgtttttttttttaatttgcaacctaatgtgtggtcaatatttgtaaatgttttctgccccttgagaataatgtacatttgaactatttgttaggctctggcttcactccatatatatcttttttatcaagcacaactttcttgtttaaatttgtgtccatagtaatttaaattttatttgctccatcagatttgcatacaaatgtgttaaattcttgcacatggttgtatatttgccaattcctctttatcttgttgctttactttaaatattttgaggctatttatgatttgtaactttttaatggatgtttttcttttatcattatacagcattctgctttatccctgttaatgcttttgccgtaaaatctcttttgccaagtactaacattgttacacaaacttttatgattttttaaaaatattttccactcactttatgtgatgcccttttgttcagttttcttttatgtctcttgtaactgcacttaacttttgtagttttgtctgatattcctagcttcttaataggtaaatttcaatttgtttacatttattgagtttccagatgtatacggacctatatcttctgtggtattgttgaccattctctatttgtatctttcgtgtctccttcctgctttttaatggattggtataaaactatatattctcccctttctccctgctggtttggaaattaaagataaaatttctgtaagcttttaaattatgccccaatcccaaaagatgacaaggatcttatcatggtttcactacaaactgaacaccccatctctaccattttggctattgtttaatattttatttttaactataaattttgaaactattatcatttttacagttgatatttacttaatttaaaaaaatattttgtatactcaccattgttctttttctttggtttcactttttgtctagctgaagtaaattctttgttttttctagtgagtgatctctaagtggtaaactctgtaagtgttgggtgtacaactttttctttactttgatagaactttttagctacattaaaaattccaggtcgataatttatttcttctcagtatagtaaggtgattactatattatttcctggaatctatggtgtggctaataacaattattctcttattgtaactaactgtaacttcttggtaaatattctgtcctttctctctaaaagcttttattccccaaaatttaatcacgaaaattttaagcatacagaagacttgggagaattgtacactaaacatcaatatactttcacatagattcacaattaacattgtatcattcctgctttatcacttttctattcatctatgcatttctctatccactcactaaccggtggtcaagtttgaaacatttcaaggctgcagacgttagcactattccccctcaactacgtcagaatgtatatcattaagtagagttcaatgtatgtttagagttcttttgttaagataaaatttacaatgaaatgcacaagtattaagtgtaccatttgatgagttcttataactgcatttttctgcaccatcaaaattcttatcaagatacagaacatgatcatcaccctggaaaggttccttacgccctttctggtgtatctccacccactatccatcagggcaatcactactcttctttttaactatgataatttggcttttaaaaaactttatataaataaggttttatagcatattctctttagagtgggatttatttcacacagcatgtttttgagattcatccatattgttggatgtctcagtagtttgttctttttcattgctaagtagtgtacattatctggatataccaaattttgtttataattctcctattgatggacacctcgagttttttaagtttttgctattatgaaaactctgctgagtacattcttgtaggagtcttcctgttttttcgtatctcctgcataaatacctagaaacaaaattgccgggatatagagtagatgcatcagttctttcccccaggacccatgaaaaggatggtgcagagcaagcccaggtggatgctgcactcataggtgtgtgcagcagcagaagaatgcttcactgaggaaacctatgggattataaggggaccaatagcaaacctgcccaaaccttacctctgagggagacattatctttttagctggaatttaagcaattctcctctggggatattaagcaaatctcctctggggatcttaagcaaatctcttctggaggcatctcctctggaaaatttctaaggagggagatgttctctactttatactggtcagggatacatttgccctataatctggaggctacatgatctctagcttccaaggccgctttggtattcaaatatccttgaagtgatactctgaggcacgtagaaatgccatggagaatggcctcccagcaaattcaccccacatttttgcttctggcaaatttccccatgaagacaccaccccatcagccactctgattattcggacccatgggtccacatccattcaatttttttcctgcaacatttaacaaatcttgacccagtgcagcggctcactcatgttatcccagtactttgggaggccaatacaggaggatcacttgaggtcaggagttcaaaaaccagcctggacaacatagtgagaccccgtatctacacacacacacgtacccacacacatttcataaactgtaaacgatctaggtcccttatgagcacctctaaggtacaagtccttatgtgagggaggcaagttagtgcctggctttcatacaagaagcacaatcccaagggcacacgtggtgctcccagaagggaagtgtatacaattgttgggcttccctgagtgggatgtacattagtaagggagaaggtgaacagtgtctcttacgtggctcctggctggctgtaagccttggggttcccagttctgtttatccttgatttgtttgtgtgtggctggggagagggtgggcatatgggggactgcttgaggacagtctgtccaatctgtcctatttgtccatgtcaccaaccaggtggcagtcccccctaacaaatgactgagaatagtggtggagactatgtctagagggttctgtgtgggacctcagaagctgggcccagcccctgccatctcatggctggtgcagagaggctgactcagcattctcagaggcgggagcgctggagtagtgtgttttccttctggacaaagcatccttgggttcttctgaaagacagatatcaccaatgctcctgttttctcccatacctctttagatgtctggatttttgctcttgcttcactgctgcaaaatctgctataccattccagtggctgtaccttcatcttttgccctaattatctccttttctcacttagactttccatctacaaaattagatagaagtagaggaaaagcattttataaaatgtgcctggagttaaatctgaatccctaggcactttgaaggccatagccaccaggctggtaggggaaagaatgaggcatcatccctaggaatgaccagggtcacaacagaatcctgaattttcaagataggtctacagaacactcgcaatccccaccacttttgtcctggtcactatccaggaaggagatgatccctttctggagattgctcccttcaatgagcctactgccctcccatagtgtgcggacaggaggagatgagggacagtcagaaaatcagtgcactgtggagtcacttttctgataaagggcacgtcagactgcaaatggcccagatggccagtttgaggacactgatgagtttctggggtcaccatagcgttcctggagtcagctgctctgcagcctgaaggagggctgacagtgtggaggcagtgctgagattatttaaggaaactatatagaaattctataatgattatgtaattacataatgaaaactctccatatcagagttcagaatatctcccaatttccaacacagaatattatccataacaccatcaacctcaaggaggatgtcctctcattgcacatttgaatttacacaacaaacacttgaaaaagcaacatgaaacagcagttatcattcactttaaggtgccagcaagagttaattttccattaaaaattttgttcaaaggaacgtcatctcctgtagtctctcccaagcccatggcccaaggctcatgcagaggtaaaatataactctgtactcaacctccacgctgctacactgatcataaagtattttgccccattcctgcggaccaaagtatgaaaaaaaatctttaatactattggcatataaaactcagagaattatatttatacctctgcataattaactttattctctttggtttgaaggaaaaaagagggggcatggctggagcagaatgagaatgagaaggcaggaaaacagccaacaaaatggtaagcaggcaaagtgaagtagttacagcttttgagtttattagggcactgtccattgtattctggaaggcctgcagttccccagagccagagttctatacctcctgtatccattaggatgtagactaacaggctgtgacaaagaggcctgagaatgcaatggcttcaacaaaatggtttctaatgcatgtaatagtccagaggcccacagttaatagggaggtgttatcatcctcagtatgactttctttcctagctcaaagtatttttattaatttggaaagacattcctaagagggctaaatgaagaaatcagggtgtatgtgtatgtgtgcacaatagtaaacatacatatatgtataaccatattttatgtgaaattcatacttgtgaagtatatttttatgtatcctgatatacacatatgtaattatttatctgtacatataaaaagacataaatatagaaaaatagatggcagttcattcataaaaatatatgcagtggttacatttggtcagtgtaatagaggtgatgtttatatatttttatctgtggtttttaaatgtatgtgtatatattaaaatattataaatcttcaacatttttaatgaaaaagtgttattcaaaaagtaacatatgcaaaaagaaaagactaggagaatatttttgcacaaatcatcatctggagatagccatcctcatctgtggctatctccaatggtgatgtttcatatcattttattttctgaatttcctgtaaatatatttattctttataatcaggcccctgaaattttcaaaatttattttagccatggtctgaggacttccattcttctagacgatgaaggctaagtctcattttctaaatgattgtcaattttgaatcagtggatctaaatagtaagattttagagtcctattgaaagttattaatttttaccaatcttgccagttgatgtggcttcctggttggtggatgtgacagctttgtttggaaagaaaaaaaagtggctgcgtgcattttaagaatggctgttttcaaattgaaaatttgtttggactcaatcattataacattttcatttaagtctgaatcattataacattctcatttaagtctgtgtgtatgtagacaaattctaagagacttcaatgtgcaattaaatcctgtgtgtaacttaaaagtcgacactcccaaaagcaaaaaatgctctggacacctgctcgaggggatccagaatgagacccaggactccctcacttgcgtttgttcctgcctgacagctgttgttctgcccagttctattaatacattttcccctgcctatccccagataatagcaaagccgacggccaggtggtctccagtgaaaagaaggcgaacgtgaatctgaaagacctttccaagattaggggtaagataaagtttgtccgctttccctttgccctacaggtcaatacaaattttactgaggtattgacgagcctagatccaccttaattgtttactcatcaagcttagtcaattggagagcagtgaaatctaaaagagcaaactcattataagcaggggttgtaagttgattgtattcatatcatagatcttatctgcccagtttctaaaatagttttcctctgtgttttatctcattttcctggaaattcctttgcctcaaatcattgttttattaaaatggctggacctggtaaattgtaagccgaatacaggtttattctctcactgccctttcaagtcctcctcctagatgagttctttcctgtcttgagcaagctctgtcgctttcttgttcccttttaaaaacagtaagagtctcatttcagtagttgggacctttctgacctagtattaaactacaatgtcttccccagtttaaagcaccttcgcttcttcagcctaggcaagccttagtctggaacacatatagttgggggtgacatggtcagtgtcttctcttattctgtcttggccctacccccactccatagctgttggcttggtcccatccaggattggggaggtgagagagatgggtgagatcagagtgtggaagtgtcttgcctgacaggtgcagccgtgaaatgacattgcaagtggttgatgcacaatcactagctctttcttccatgagatgctttcatcaagtccactgcaagggaaggggaggggtcaggcatcacagcttgacttattttgaaagaaatagagctttacttctacaacctggatgtgagtgaagggctgaacctggcataatcagttccaccaactctttctaaggttacatatgtggcctggtgcattgtcctaggatgcgggtgctcaactcaacctacttgcttgggactttctcaattttcccaatgaaactctcatttccaagccataggtccactttgggtctgattggtcctttttactttggtggcctaatatgctcatgatatgcttagaacttatagtacttaggaatgcataggctggaaaatatttcctcatgggcctacatgaccctgatcagcacccccagatggtggtcattggatggtggacatccagcacaagaaggaaggaacattttgctttcctgccttggaaaataaaacacatttggacaatagtaaacattgagatgcccattcacagccaattaacatgcacttgggagaatatcatcggctgcagtgtctgccatgtcaatccttaattactatttggaatgaaggctgcggaaatctcaattctacccattcctcatggttaaccttcttctgattagtttcttagatcctaatatttattttgtccaaagccatgtggacaaagccctggtcacatttactattactttcagcacgagggtacaaatatcttcccccaatgtgacatgtgcagcatacatctcacctatgggacacctaatagggtttcccttaagtcacagaactgtcatttatttgtgtctctgctgagagaaactgaaacgccttcacttaattttgtagttttgtctcaattttctctgaatattttagtttctgtaatgacggtaatcatcattttgatcttgcaaagattaaataaattaatggatatgtaagtgtttaatgtgtattatatgtcatatatatttcaaatatatatgtttggaatgaaatatgaaatgaaccttcaaaatatggaatgaagcatttatacttttgcttgagatatacgtgaaatactgatttcaattagtttttttcctaacataagaataggaaaatgaaatataaagtgaacctaacattagctatctaattcttcataccttaaaggctagggtttaaatctttttatttatacattaaacaggcttttggaaagttacatttaaatggaatttttgaaaagctgtaatatgtgtaatacagctgctcataaatgactgtgattatattattctactttctcagggagaaagagaggcaaacctggaacccgcttcactcagagtgacagagctgcacagaaaagagtccgatcaagaggtaaaaaagaaaacaggaatgaactttcaataactaaacatctaatttcctgtgcggtacactgtactttcagtaataaacccatttccttaattgttttatgaagctgtactaactagtgagaaatgtatcctatttagtcattttccaaaatgtgtcaaggaaagaaggaagtaagttggtgatggatctacaaccagatcccaggggcccaggggccactaaagtgctactttcactgaaatgataaatttcaaggctggagatagttcattgccgtataaagggtataacccataagtgatttaactgaccttcctctgactactcagaaagccacaggttgcacactaagggtgaaaaagagttgtggttagagatctgtgtcctaagactttctttttctttgtgtgggcttaggctgatcatttgactttctttgtctcagttttctcatctggaaagcaagagcatgaattaggccaactatctttctttctttctttctttctttctttctttctttctttctttctttctttctttctttctttctttttttattctttaagttctgagatacacgtgtagaatgtgcaggttctacaacccatcatctacattaggtatttctcctaatgctatccttcccctaacccccaaatcccgacaggccccggtgtgtgatgttctgtccctgtgtccatgtgtccttattgttcgacttccacttatgagtgagagcatgtgatgtttggttttctgttcctgtgttagtttgcccagaatgatggtttccagcttcatccatgtccctgtaaaggacaggaactcattctttttcatggctgcatagtatttcatggtgtatatgtgccacattttctttatccagtctatcattgatggacatttgggctggttcctagtctttgctattgtgaacactgctgcaataaacacacgtgtgtgtgtctttatagtagactgatttataatcctttgggtatatatccagtaatgggactgctgggtcaaatggtatttctggttctagatccttgaggaatcgccacactgtcttccataacggttgaactaatttacactgcaaccaacagtgttaaagcttacctatttctccacatcctcttcagcatctgttgtttcctgactttttaatgattgccattctaactggcgtgagatggtatctcattgtggttttgatttgcatttctctaatgaccagtgatgatgagcttttattcatgtttgttggccagataagtgtcttcttttaagaagtgtctgttcatatcctttgcccactttttgatggggttgtttttttcttgtaaatttgttttaagtttcttgtagattctggatattagccctttgtcagatagatagactgcaaaaattttctttcattctgtaggtaggccaaccatctttcttattagtccatcctggtcctaatagtctgcctttctaaaaatttgtctcaggaccaaggacagctcccccgtttatcatgacttctgttgcccaggctggagtgcagtggtgtgatctcactgcagactccacctcccaggatccagcaattctcctgacttagcctcccaagtagctgggattacaggtgggcaccaccatacctggctaatttttgtatttttggtagagatggagtttcgccatgttggccaggctggtctcgaactcctgacgtcaagtgatccacctgccttgccctcccaaagtgctgagattacaggtgtgagccaccacgcctggccctacacctttggttggaagggaaggattcactgctcaccctcctggagttcctttgaagacctttcacccccttctctgtgaaatcaggtctccagtcccccacctgcaaccccatataattttcagattattctagagctccctgagctcttctcttagctacggggaaagcagacaggacagagaaatgaactaaaggagagaacaaaaatagaaggcagacatcatctccattaggttatcccatcattaccctctccctgcttgccccgtcagtgctcaaatggggagactgaatatgatctctggagtcatctaaggctacccacctgcagcaaaacagcatagctggagagcttctgtcagaacagtgacagcaactgtgtttcattgtcatataagaatcagtggagcttacgagattaggagttaaaccagttttactgaagtctaatttctctgctaaagcattctattttgtatgaaatttgaaaggtgaaattggggtagacattctgtaattatgtatcaaaaatgccacttggaagaaagactttgaaactctagagggttttggaatagaatttcctaagtatccctcgtgtctttataggaattacctcagtagggaggggggacgtgcctttgcaaagtgagacagaatgaagaaatcctctctttcagcttcaagaaagcacaaagatgaaactgtggattttaaggctcctttgcttccagtgacctgtggtggggtgaagggaattttacataagaagaaattgcagcaaggtaggttttatggtcttctttaatttgcagctcctatctgaaggcatcacaagtagtggggaattatcatgtgaattacacatcattcaaggagtttggtcccagtttggcttgagggaaggaggaagggatttctaagatgacgtttacagactttaagaaatcgcaaccaccagatgctcacttgcacatggaatgtccagagggtgcccaaagaaccaaagagaaggcaggaacatcaattcacagatgaaaaatgtcacgtattttactttgaatcagacagaaaaatgaagaggccctcaacctcgaccttcatattctctctcccttctggagtgccatcaccagggcagggtgcttggtatagggagatgatcacagaatttgggatcagaaagcctgagttccagcctttgctgtttcaggagtgactgttccattctgagtagagaagggaacctttctgaacctgaaatgtctcatccaagagagggaacaataatgaaaaacctgcctcatgatgtagctgtgagaattaatttgcatattgatgtaaaatatgtaaatttacatgtttttactgtaaattataaaactttgccaaaaaatgtctattagaatggccatcatctcagaccaatcttaatatgactctttggatgtcaattaacagaaatgtttgcattgtgactatttctaaacagctttactgagatatagttcacatatcatacaactcaccacttagagtgtacaaatcaacttttttttgtatagtcacagaattgtacagccatcattatcctctaattttggaacaatttgttccccactgaaagaaaagcccatgtcaattagcagtcagtgcctattcccacctaagcagccactaatctattttctgctctataagtttgcctactgtaggctttctagaagtggaatcctataatacatgccctttcctgactgccttcattcactaattgtgatattttcaaagttcatccacaatgaatgtattagtatttcatttcttttattgacaaataatatatgtcattgtatagatataccacactttgtttataaactcatcatttggaactatttccactctttggctattataaataatgctgttctgaacatttgtgtaacaagttttgtgtgaacatatttcagttcttttgggtatatagtcaagagaggaatgactacatcgtatggtaattctatgtttaatttattgaggaatcaccaaagtgtttccacagtggctgcactattctgtattcctaccagcaatgtatgaaggctccaatttctctacatgctcaccaactttgttatcgtctgtctgtctttttttattacagtcatactgtcatcctagtgggtatgacatggtatctcattttggttttggtttgtgtttccttaatggctaatggtgttgagcatgtgactatcttttacatataaattaaattttttatcagataacatttcacaattagttttttaatatcagctacctgtgattgcagggatatgaaaatttctgtttaataatgccactagactgcataaaacatgttataattgagagtgcagatgttgcgggagtgaccccctgagccacagggcacccatctgagaccgtagccccaagttgaggattctgcctccaacattgccctcacagccatctggagactcaggcctggcctctacttccaaatttgaatagcaagttggagtcctctcatctttcagaatcacttgcttttccttctgtaagtgcttttgaaatgcttaaaaggttgctcttgatgataaccatcactctcctcatggatgaaggtcaaagaaatgtgcacccccaccaggaaatatccttagaggggattttcaggctggatttggggcctctgtagtctgagagggaaggccagactctcctgctattgatctgcatcacaaattgggtggctctagatccagtgtggtgagtggccatagtctgtgcgctgggaaaaaagagggctcaggatcaagttaccctggtcttacaggaatcttggtgaagtgtatacagactgaggatggaaaatggttcacccccacggaatttgaaatcaaaggaggccatgcaagatcaaagaactggaggctgagtgtgcgctgtggcgggtggcccctacgatggctgatggaggtattccaatgacaaggggccaggcctgtgttccttcttgttccctaataatgaggagactgtttattcaccaaatatttgttaggttatagctaaagccttgatgccagtgggtttatcctctcactcaggagagagggaccccacattcataaccacactacagtgcaacacattgacgttgtaccaggggctccgtcaggatagactcagcagcttggaggaggaaagggtcattctgactagggtgcatgcagacagctttgtgcactgaaagaaagaagggagttgacagtcaagcagtggaagaagacacttcagagaaagaatggcataaaagccagaatgccatgaaaaccagaaccatggcaaaagtagctctgtggatttaggtagcacaggttgtgtgcaattaggtataatttaacaattggggcaggttgtgcagggctttaatgccaggctaaggagtttaaacctgtaattgagataacaaggattcagtgaaatcttctaggattggaaatgacatttaaaacaatattttattttatttatttatttttaggagacagtctcactctgttgcccaagcaggagtgcagtggctcaatctcggctcactgcaacctccacctcccagattcaagtgattcttgtgcctcagcctctcgagtagctggaactacggttgtgcaccaccatgccaggctaatttttgtatttttagtagaaatggggttttgtcacgttggccaggctgatctcgaattcctggcgtcaagcgggaggcctcctcggcctcccaaaatgctggggttacaggcgacagccaccccgccccgccataaaacagtattttagacagccacggggctttccccctagcaaacctatactcaatctagaatgctcagttcaagtgttaccccttcctgaatgttcattgattgacctgtcatgggccattgaccaggccttcccagggctcctgagccctctactaaggcctttcattcactgttttatatttattattttgtgagtgctttttgtccgtagactcctttaggttgtcccatcttcatgtgcccaagattgatcagaattactgatacccagtagcaggcaatgtgtgtgctgcttggatagctctggtgtaaggactccagctggagtggcactggtgggactggaagagaggtgataggtggtatgagattgtgaaggaaaacctcttaggacttaggaaagaagcacaagagaagggaaaatggtcctgaagatgcttttctggcttctattgattgaagtctagaagaagcacaggtgaagacagggagatggtttctcattagacaccttggatttgagctggcagtggaacactcaggtagaaatatttgggaggaggttggaaatgccagactcacaaaacggaaacacaggctgaccatatacctgaatctttttgtctttcagaatggatttctgcctgatcctccaagaatacgttacaggaaaaaaaaggtgattattacatagctttatacagcttcttgtcacataactgatttagcatgcacaaaatcttattttatggggtctgaaattgggtaggaataattaagctttcaccttcttcactactcaccttaaaatactttttgcatgtattccttcagagtcgctaatttgaacactaaatgtatataaagctaggtcctgtttggattcaaccatttcatatgaagatgataaggagccatcagaatatacgtcctgggagtgttttagcaatagatgcagatgtcttaagagtgtccaagttggaaagtcaagcatggtcatgggatacataaaaatatttcatagtaaggtgagaggatcaccttcaactcaaaattcagatttttttcattgaagttactattttctaactttagtgaaataggatggagcagatatttgctcacatccatttgagacatgcatgaaaccatatatcatttaatgaaatcggcaacaaaaagaatatttcttttctgatccttcacattctctttcaccttccaaaaaaatgtacacacagacacacagaatgtcttctcaaggtgaaattatttcctgttaccacaatggtgccactgaggaggaagatctccagaggcaaatgtattttataggaggggctgaccaggaaaatcttttatgttgatgccacctctttggctctaccagagggactgtgcagacctgctttttatctgtgaaagtgatttttccctctcttgaagaatgcaacaaacaaataggttaagtgcagtgtatattcaggacaaggtgatggtttttccaagactgggtatgaatgagaacctgaggagggggaagagaaaaatgtcatccttatgcacttcaggtagaaatacgcattcaagacattcacagacttctaaaacagctcacacatagctagccactaagcttcatattccactgggaacctgagatgcaggcctttacattatctgatatactggctgatttgaattttcagccactgagacatttcatccactgggtttcccgaagggaaactatgatgtcacctattcagtgactacactaaagaccagcatctctacctttcaccgggtgccaagagtaactgagtctggatgacccaaatgagctggcaatttccgactaaccgactctccctctattctggggtgcaaaacttagcagcgacaaggtgcagttgcctctatatgttgtgtctcctcatgggggagaacagaaggtcccttaagtggcagatccaggatccattatgaactccatgggtcctctgtgcctctcagagcttctcttacttgcagagccatttggctttaggaaatttcagtgtcactatgagtgccacatgatagcatctctgctcatgacaagggccacatagaccttttggtggcacctgagatattgtaaagcaatctgatatactcacccagaataattgttgtatgctaatgtttgcttaagagcctccagtgatttctaagtgaatcaacattcatttattcacccactcaacatataattatcaagcacacactaaatgccaatggacattacagaagattgacctcaaaaattatttcaggccaaacatggtcacttgagcctataatgccagcattttgagaggctgagatgggagaatcattggagcccaggaatttgagaccaacctgagcaacatagtgagataccatctctaccaaaaaaaaaaaaaaattacccagacattgtggtgtacacctgtagtcccacctactcaggagactgaggtgggaagatcacttgagcctgaaaggtcaaagctgtactgggctgtgatttcatcatagcactccagcctaggtgactgagtgagactctgtctcaaaaaataaaaaaagttttaaatttattgtcaacatggatgaattacaaatggggtggggtgggagattctagaccagttggagaggcattcagtgacaaggtcatctctcaggtgcttgtcctttgaatcacacttgtttatggcctctgtgccctgggctacagacaaaagctgaggctgcttgtatcccagaagggaaggatgccaagtcatgccatggatatccaaaagcaatctaaataaatgtagtgggttacctcttaaaagtcagtcaacctggcatcttcttgtgatttggatagaagggagagggagagagtttcaggaaaaagagctgcagcacagaggaccttggaggcattttatcaccagggctgtgtccctaggggagctgcagaaagcagtgctcttcttgtctgggacacttgcatggcctctaggactctgagtcctgtggtcccaggaggctgtgggagataagtcctcagcctgattattattgaggctcctctgggtgggatgacacaaaggccaagtttaggaaatatgcctgagggccccttgaagtaagaggacaagtagagcttctctgacttggcctgtgcaaactaggtccagactccctgcagggaatgggacttgcattgggattaacggtagtacttgcacactttttattctttcagtagatatataggtccaaaaaatcagatatgaggtaaagggaagactgtttacaaaaataaaactttagacaaaataaaatttatagcatttatttgagcaaagagcaattcatgaattgggcagcactcagaacaaggagaggttcagagaactctgctgtagcagcccagacagtgaggccaacacaggagtaagacagagaaactatatttaatgggttatcatagaaagatgataattagaggttagatggcagattctagttggtaaaatctctagtttcattttactgtttacatcaggtttcagtttgcttacttagaaacttaaaccactggagccaccccagcctactggccttctctcttcccaattattttttaacaactggttcctgaatcccttcaaagaatactatttaaatttaaataagtgatagatggaaacaatgcattcaatatcataaatcaatctttctgttttttcaacagagaatactgaagtctcaaaacaatagctcagttgacccttgtgtaagtacaaattctgaactacgacccccagaatattccactcctttctccaggcatatgttctgtgtcatgactgctgttgcctgaatcatgttcagtctcagctggagtatgtggctgtgtgaattcagttgcatcacccaagccaggtagatgtgcctgggccttggatgtctcattatgaaagcaccctttccatctgtttcagtagaaaccttccaatgtccttatttcccctggaaagtgagtatgggaggctgagctccagaccactgaggtctcttgagacagagcctgaagtggtaatgggtagggctggcctggtgattagggggaaggaacaaatgtgagaggataacagcattttcaagtaagtggtgtggatgaaagggaaagtcctaaaaatgcactccaaggtgcaggtagagttgaagatggtcataagcatcagccagaaggaacagaccaggccaagctattatgttccaggtgttgatcctgtcattagccctgtaaaggagtacatacaaggcaaggggtcctttacagagctcatttggatggtttcagggaagccattagggtgctgagctggttaggactgaaaccatcacgacctagcaaatcctgaggcattttaactcaactgcttatctggtgctcagtactatgcaaactttctgatgccacaggccccatccattctctgcttgctatatgactgcctgctttggattctgccaaaatcatggatgagtcccttctctaaatgaaatcgtgatttgattcttttcattgcagtgagatgtctgttttaggccgggtcaccttcttgcacaactctgggggacagcactcacatagaatatcatgcaatagcactgacacatgatacttaacagaggagggatgctcaaatagttttatacacaccttacctccaaagcagtcctccaatcagatttaggtcttttccacactgattttgatgtctggccaactgagggacttttcaataattaaaacagccctggaagtcagtgtttgtgtggctgattttggatggactaggcatggaggtttaggtttcacagctcacagccagatatgtgtggggagaagagggaaacagttccagcaaaggtatggtcacccctgttaataatttttccaaggccagtaacaacattgacttataatatccccatgcgtccataaccagactttgcttaggttgaatctcatattgtcctgcagcctggaatcacttgaagagctttaaaaaaatattgtttcctggatcccacttctggggaaattataatttaatcattctggactatgtatgactggaacattaggatttgtttaagatccccagatgtactaattctgatacatagaattgcctattctgtcacctaaagaagaataccagtgcctgtgcctcaaccctgacccagtgattcagaatctctggtgttgggttcaggacattagcattttatatactctcctgagaggagtctaatgtacagccaggccaacaaccaaagaaccagagaaatcaaatctcttcttgaaaagatgggtttggagaacaaaatggcagataggaggcaggactaacttgctcctcctactcagatggacagaacagcgtgttgagactcacactgtgaacttttgctccaagaaccactgcaggaatataccagcaaaactgaaggaagtcacacaccctttaaaagaagtggcttgccaccgcaaactctgggagatagccaaaaaaccgtgagtcctcaaagtgtgagagggaaaaagtccacctctgaacacatatcctcactggggaacctggaaatccagatcacaggagaaggatttcacctaacctagagctgaaatgaatttagaaagctgggtgaaatataaaagtagaataagcagcaggaagaggtgccttccccaaggatccctataagcatttcagtccccagggaagccatttctgactttatctcacagtccttggggagggcagccagtacaatttgcagagagccatggggagaaggaggcttccagctgaactttgtaataattttaaccaagcacaaattttcctggtcagaatctgggggtgtgaacctgaagtacagatataagtgcagaagccatggcaggcagggaggggtgagatctgaaagccctgcttgctttctcaatgggggtgcttcttcctggggcaagatcttagctccaggcaaaggatgcctggatataaatttggctctgttggctgttgggcaccacagcgggagtgagactggccttgctggctgcctgggtgctgggtgaagcctgtcactgccggcttcccttacttatctggtgaactgtatgaagcagcagaggcaggcataatcccctctggaacataaatccattggcctgcaagccacccctcatcccccacagtggccacagcaagccctgtctgagaatctgagctcagacacacctaaccctgcccccagctgatggtctttctctacctgcccctgtagctgaagacaaaagacaggggctcatgggagctctatgacctcacccatcacctgagaaaaccgaatacttatccagtgaacttaggtcaagcttgtatccccctcatattacttgcagctgatggtctcttgaaagtgccacctcctcgccgaaggtcagccaactcaagtcattacagacactcatacgagaaccaccttgctccaggaaggagaaaacaacaactaattatactgcctgtaacatcctggctaaccaaagatcctgagtctgtccctgtaacaacctcactgctagcataaccaacatttgagaaaaccagtgtactaaacaaaactacaatcaaggactctcacagaatccacttcactcccctgctacctccactggagcacgtgctggtacccatgactgggagaactgaagacagatcacatcacaggaccctttgcagatactccccagtaccagcccagaacccagtagctcttctgggtggctagacccagaagagcaataacaatcacagcagtttggctctcgggaagcccatccctaggggaagggggagaacaccacattaagggatcaccctgtggaacaagagaatctgaacagcagctcttgagtttcagatctttcctctaacgtagtctacccaagtgagaaggaaccagaaaaacaattctgataatgacaaaacaaagttctataacacccccaaaagatcacgttagctcaccagcaatggatccaaaccaagaagaaatctctgaattgccagaaaaagaattcagaaggtcaattattcagctactcaaggagacaccagataaaggtgtaaaccaacttaaaggaattaaaataataatacaggatatggatgaaaaagtctccagagaaatagatatcataaataaaaatcaatcacaacttctggaagtgaaagacatacttagagaaatacaaaatacactggcaagtttcaacaatagactagaacaagtagaagaatgaactacagaactcgaagacaaggctctggaattaacccaatccaacaagaaaaaagaactttttaaaaatgaacaaagcctccacgaagtttaggattatgataaatgaccaaacctaagaataatttgtgttcctcagcaagaaatctaaaagtttggaaaacatattcgcgggaataatcaaagaaaatgttgctggcctttctagagatttagacatccaaatacaagaagctcaaagaacatctggaaaattcatcacaaaaagataatcactcaggcagagtcatcaggttatctaaagttaagatgaaggaaagaatctatgaagcaaaaacatcagctaaactacaaaggaaaacttatctaatgattaacagcagacttctcagcagaaaccctacaagctagaaggctttgggatcctatctttagcctccttaaacaaaataattatcagccaagaattttgtatccaagaaactaagcttcataaatgaaggaaagataaagtctttttcagacaaacaaatgctgagagaattcaccactaccaagccagtgctacaagaactgctaaaaggagttctaaatcttaaaacaatatatcaaaatataccaaaatagaaccccctaaagcataaatatcacaggcctattaaaaaataacacaatgaaaaaaataaggtattcaggcaacagctagcatgatgaatagaatagtacctcacatctcaatactaatgttgaatgtaaatgacctaaattcttcacttaaaagatacagaatggcagaatggataggaatttaccaggcacctgctgtcttcaagagactcacctaacacataaggactcacataaacttaaggtaaaggggtagaaaaagatatgccatgcaaatggacaccaaaagcgagcaggagtaggtattcttacatcatacaaaacagactttaaagcaacaacagttaaaaaagacaaagagcgaccttatataatgataaaaggactagtccaacaggaaactagcacaatcctaaatatgcacctaactgtggagttcccaaatttacaaaacaattactcactttgggaggccgaggtgggtggatcacaaggtcaggagatcaagaccatcctggctaatgcagtgaaaccccatctctactaaaaatacaaaaaaaaaaaaaaattagctgggcgtggtggcaggcacctgtactcccagctactcaggaagctgaggcaggagaatggcatgaacccaggaggcagagcttgcactgagccaagattgcaccactgtactccagcctgggcaacagagtgagactccatctcagaaacaaaaacaaaaacaatttctactagacctaagaaatgagatagatggcaacagaatgatactgggggacttcagtactctgctgacagcactagacaggtcatcaagacagaaagtcaaccaagaaacaatggacttaaactgtacactagaacaaatggacttaacagatattacagaacattctacccaacaactgcagaacatacattcttttcatcagtacctggaacattctccaagatagaccatatcataggccacataacaagtctcaacaaatttaagaaaattgaaattatagcaagtactctctcagaccacagtggaataaaattggaaatcagctccaaaaggaaccctcaaaaccaggcacgtacatggaaattaaataatcttctcctgaatgatcattgggtccacaatgaaatcaagatggaaatgaaaaaatcctttgaactgaacgacaataatgacacaagctatcaaaacctctgggatacaggaaaagcaatgctaagaggaaaattcatagcattgaatgcctacatcaaaaagtctgaaagagcacaaatagacaatctaagttcacacctgaaggaactagagaaagaagaacaaaccaaacccaaacccagcagaagaaaagaaataacaaagatcagagaagaactaaatgaaattgaaacaaaaaaaatacaaaagatatatgaaacaaaaagctggttatttgaaaagataaacaaaattgatacactattagcaagattaaccaagaaaagactagagaagatccaaataagcccaattagaaacaaaatgggagatattacaaccaacaccacagaaatacagaagatcacttaagtctactatgaacacctttatgcacacaaactagaaaacctagaggggatggataaattcctggaaatatacaaccctcctagattaaagcaggcagaaatagaaattctgaagagaccagtaacaagcagtgagattgaaatggtaattaaaaaattgccaatactagaaaggccaagaccagatggattgattcacagctgaattctatcagacattcaaagaagaattggtatcaatcctactgaaaccattccaaaacatagagaaagagggcatcctccctaaatcattctatgaagccagtatcaccctaataccaaaaccaggaaagggcatagctcatgtcaacaaatgtgatataccacataatcagaattaaaaacaaaaattgtatgatcatctcaataaagacagcaaaagcatttgacaaaatccagcaccttttataattaaaaccctccacaaaattggcatagaggggacataccttaaggtaataaaagccatctatgacaaacccatagccaacataatactgaaatggcaaaagttgaaagcattccctctgagacctggaacaagacaaggatgcccactttcaccacttctattctacatgatactagaagtcctaggcagagcaatcagacaagagaaggaaataaagggcatccaaatcagtaaagaggaagtcaaactgttgctggtcgccaatatgatcgtatacctagaaaaccctaaggactcatccaaaaacctcctagatatgataaatgaattcagtaaagcttcaggatacaaaatcaatatatacaaatcaatagcactgttatatactaacagagacaaagctgagaatcaaatcaagaactcaaccccttttacactagctgcaaaaaaataaaatacttaggaatgtacctaaccacagagatgaaatacctctacaaggaaaactacaaaacactgctgaaagaaatcacagatgacacaaacaaatggaaacatgtcctatgctcgtggatgggtagaatcaatattgtgaaaatgatcatatggccaatagcaatctggaaagtcaatgcaattcccatcaaaataccatgatcatttttcacagaactagaaaaaacaattctaaaattcatacagaaccaaaaaagagctcatgtagccaaagcaagactaagcacaaagaaaaaacttggaggcatcacattacctgacttcaaactatactacaaggctatagtcacccaaacaacatagtccaggtatgagaatataccagtacacatagaccaatggaacagaagaaaggacccagaaataaagccaaatatttgcagccagctaacctttgacaaagcaaacaaaagcataaagggggaaaggacaccccattcaaccaatagcactggcataattggcaagccacatttagaagaatgaaattgaatcctcatctctcaccttatacaaaaatcaactaaagatggatcaaagacttaaatctaagacctgaaaccatataaattctagaaaataacattggaaaaactcttctaggcattggcttaggcaaagagttcaggaccaaaaacgcaaaagcaaatgcaagaaaaacaaagataaatagatgggatttaattaaactaaaaggcttctatacagcaaaagaaataacagaataaacagacaacccacagagtaggagaaaatatttgcaaactatgcatccgacggaggactaatatccagaatctacaaggaactcaaagcaatcagcaagaaaaaatcaaataatcccatcaaaaagtgggctaaggacatgaatagacaattctcaaaagaagatatacaaatggccaacgaacatgaaaaaatgctcagcatcactaattatcagggaaatgcaaatcaaaaccgcaatgcgataccaccttactcctgcaagaatggccataacttaaagatcaaaaaataataggtgttggcatggatgtggtgaaaatggaacacttttacacttctggtgggaatgtaaactagtacagccactacagaaaacagtacagaggttccttaaagaagtataagtagatctaccatttcatccagcaatcccactactgacggcagcggcaggcagtctgaagtggctgctgccatgaagctggctgcagtgaggtgcaggcgctggccgtgggtcttagggggcagacacagaggcaggagatccccagagccagttgccctgggagccttcctctgggagccgctgcaatggggctaggcccagctgcccgtagggcgtggtcaggcagggaggggtgagcagagagaggtcccaagatggagctgggccagtggtggttcggcacttgcacacgtagcgtgggggtcgggcccgaacgcggagcagtggccacacttcaggggccggggtgggaagtgggagtggcgcccacttccaggacccagccagcaatgcggcccctgcacccaccctgcccacagcgccaggttcccgcccctcacaggaggctgaacaaagggccgccagaggccgtgtccctaggatctgccccgagttagagtgactgctgtgcctggtgctttcagcagctgagactggggaggcaatccggtcctggaggtttcccccaggcagggtcacaagccaggagagggggtgccccaagccatccctgagccttggggccacaggaggaacttgagccaacatcacccctgcaccagatgctggcctgggcctggcaagggctggagccaccaacccaggctgcaaggaggcagacagggcagcaggaacggccagaggagcagcagtggcagcagtgggtccctgtgccctgtgtccctgaggcagggaccctcaccctcacacagccggcaggacctgctctcaggcccagagcctctatcacagcctggacctctttccccactgcatcctgggaacctgcaagcacctggccaaaggtgcagccgagactcacagaactggcccctgagtgtcaggttcctttgtgtgaggttggctggggcactgtgccacctgcacctcatccacaactgctgcaggagacacagagagggggcatggctgaggccgccccactctgcagagccaaggacaagcaggagccctgcctctcccaaattggcagggcaggagctcgccatgcgcaactgcaggtgcccaggttgcagctgtaggcctgggcctcccagtgctcttgggggcccaggaggctaccctccacctgccagaacagaagcttctgctgcctggccattccctgctcccagcacctgctgcaatcttggagcagggttggggctgagcccaggtgcagttgcagccctgttgggtgtgcacatgcttggggcagagctgacacaccaggcccctgctgcctgcacccctctggattttgggtgctgacgatcataggagagaggccaagaatgggctggggccagctcagcactggcctgcaggtgcccctttgggcaaggggcctgggcaccatgggtggtggggaaaggcagacaggctcctgggtgggaaggggcaggtccctggtgaggcaccaccttcaggcaagagagggcctgaaggctgggaactgggctgccaatcctatggaccagagtgggaacttgtaatgcctttcaaaggcctgctcatggtaacccatggaccaatcagcatacacttcctcccctctgaagcccataaaagctctggactcagtcagacttggagagaacatcctggacaaccagcagcagagaagagcttcacactccagggactacctgccagcagagagaagccacccaccctaggacctcctcctctttgctgagggctgaacactcgtcaggacacattggctgcagaaaggagctacccacagtgggtctctgagctgttctactgctcggtaaagctcctcttcgtcttgctcaccctccatttgtcagcgtccctcattcttcctggttgcaggacaaaagaacttgggatctgctgaatggtgaggctaaaagagctgtaacacaaacagggctgaaacatgccccttgatcaccgcattgtgggtgaagagaaggagagaagagctgcagccctttggggagcccagacctggaagctccctgagccagggctgtgactcccttttggaggctctgaggttcctggcatcttcaagcttctaggtgccagcacatcccctgttgccagccatggaagctgtttgcagtgtgcctggtccagacacagccttgcagagagccagtgctcatgccagcacctggagttgcctgcccttatgcaatagcaggcatgtctgactgtatgcagtggctggaccccatgcttgctcacacgcctctcccactccatgcctgacctgccccatggcaggcccttggtaggtatgcgatccaggccagtagcctgagccaagtgcagcctgccaggccaagtgggtggaaggagcccagtgggcctgagcaaaactcaggcaaaggcacaactgcttacagaggtttctggcaagaaaaagcaataccccaaggattccgtaacactactgggtgtctacctagtggaaaaaaagttatatgaaaaagacacttggacatgcatgtatatatatatatatatatatatatatatatatatacacacacacacacacacacacacacagagacacacacacacacacaccatggaatactactcaggtataaaaaggaatgaaataatgacattcacagcaacctggatggagttggagaccattattctaagtgaagtaactcaggaatggaaaaccaaacaacgtgtgttctcacttataagttggagctaagctatgaggatgcaaaggcataagaatgatacaatgggccttggggactgagagggaagggtggaggagggtgagggataaaagactacacattgggtacagcgtacactgctcttgtgatgagtgcaccaaaatctcaaaagccaccactaaaaaaattatccatgtaaccaaaaaccacctgttcccccaaaactattgaaataataattttttaaaaagattaaggattcgacatacttaaacatttggtacttcattccctccctagggttttggagatggtggaacacacagcatctgacactggacagatgagattgacagcagtgtattagtcacatttactcggtagcccggtgggggtgggcaggcatcccacgccacgcagggccacatgggggctgcgctcaggaacagaggaaacagccagtggctgtggagggcgggctgtcccctgcttccagagggagagtgtgattggcttgtttgaataattccatggctggcagggaaatgaaatcagctattcaaaaatacgcagaaggtgcaagcggtcctcttgatcagaagtgttggtaggaaaccttacctgcagcagcagagccggcggaggacttgtagatagaccattctaggccctcccagtgttaccagatgtccaggctgcacataatattgaactctaattttagtccttacagcacttttcacttgaacggcaaagggctcagtcacagactggttctttgttgtaaatacacatgtatttgtctacaatacagcatgtatgtattggtctctatatttgctctataaattctgttggtttttaatgaccgggatttgctccacaacacgtggatgcaaataccatcatattttaatttccccaaatgaaattaaatctggctaaaggtgtcacatattgagacttgtaagaaatggagaattcgttgatttaccattccttttatagaacaaagcaccagctcttttatgggcccaggaaatgaggtgagggcctctgtcttcaacactgtatggtgctgttaccattgtccttggtcatcagagatggcaccttcgcaccttacaatccaagttagctaagtcaagggggatgtatgccaggctcccagagctgaagagctctgtgcttcctggggcccacctggtcatctccacccacggtccttccccctcagaggtcggcgtagagccctccaggcacaaaacgtacagtctaggaatccctaactaggccctctcttcaactcatggggaacttatggccaagaatatgggatgtggtgatatctcagaagcttattccatcatatgtaattagctaggtctccttttcactagttgatttgtggtataggcaaattgatttaacacttcatttcaaaacctggttttatctgcagaataaggaaattattcagattcctataaaatcatcatcttgctttgttgctagtctttcttcattacaatctctggtttcataaggaagacttttcaattctgacccataccccttcctcctgaacttcactgcagaccaggatttgttctgaaatctccatgccatgtttttccttcatatcccagggagaagcatttgcctgtccatgcaggttcacacaaaggcagtgtgttctagttgcccagagggttggccttcctgaatcttgcggttcccagtgacgtggacactgttttatcttctagatgagaaacctggatgagtgtgaggtgtgccgggacggaggggagctgttctgttgcgacacttgttcaagagtcttccatgaggactgtcacatcccgcctgtggaagctgagaggtaagtgacatgcaggcgtctctctttttgtcctttaagggatcttccacctgccatgcgcactctccagcagagtgccggcttgtgtctagatggggaaagagcaggttcatcgggtactgggacccagcagtgtgatccagagagcagtgggagacgctggcagcaggaggttaatgtcctctgtgctctcagggacacctcctctgatatgctgagggcagtgttggggacctttgcctacataccggcattgtcctttccttgaagttttgcagctgggtgggttggagacaagaaacaccagttgtttatattttgtgcttattcatacaagacaggaagcacgatctcattgggctgttggaggcccgaggtccctggggctgaaaacccagtttctgaaactcaggcctgacagacagggttccctgtgctcccagcagctcagacagagaaaggagagtccacactcacggtgacaccaccttcctcagacttcctgcctgctgctaccactgatgcgagggaaaggccaatggctggagaccccatgtgtgaatcttgcatactttgggaggtgttcccctccctcccatgactgagcccatcagccattcctgaaggaagacagtggtagccacaggaacggtggccatttccaagctccctgccctctgctcacccatgtccaatctctcaggaccccgtggaattgcatcttctgcaggatgaaggagtctccgggaagccaacagtgttgtcaggaatctgaggtcctggagaggcagatgtgtcctgaggaacagttggtaaatcagatgcaaaccccaagccttctcctttcccctcacacgtgagaaccatgaacaagcgcaagggcaggggaatgtactgaaaggagcctgctcttccgcgccacacttcaatggcactgatagaacaccacaccttgtttgcacaaaaaataactcagccatgacatgtctgtttccaagagccacacatgttagagaaacttgaggaagaagggtgtgagttctgtgctgtgtctcatgcatgtgggctcattctctccaagctgcttttcatttacggcctctttcttttgcagaaatgtgagttcctcctcttgaaagtctattgctgttctgagagctccttttttgccaagattccatactattattatgtaagtaacaacagcaacccatgattacaggctgccatgacattacctgaccctgaaatgggccctcgtgagatttgtgatcttaatcccacggggcaagagcacacgctgtcgttagttgccttcaccttgttgtatttctgctggattttatgggaatccacagaaggtagacactgaactatgctggtagcttttccattggtatatttgtcaccagattagagaggcgtgtcaaggcctgaaggagcccatgtggttggataaaatcaagaaaaggctgaatgagcacggttacccccaagtggaggggtttgtacaagacatgcgcctcatcttccagaaccacagggcctcttacaaggtaggtggctcttcctgcttccatttcatttctttccatccttcccctcattttctggtgccaagaaaaatttagtttccctcatcctgtaataagcttgcacgagcaagggttctggaagtgattgattggtttcagttcagaacttaagctcttcttagcaaagaaacagtgaatcaaaaggtgtccctgcaaccagaaccccaggtccctgagagctcctcccccacctgccccagaggagacaggagctcagagagagcaattgaatcctgcctgctgcagcatataaagaggagagaatttcatcttaaagtggtattgtgcttcttatctgctcccaatcccagaaatcccaaactccagattctttgcatgtgaatagaccatatcccaacaaggattgccagcaaggagtagaagtgacagagaaaggaacagatcagtgatcttaccttatacccttccactatctgaattgttgaaagaacctagattgcttttctaacccactgaaataagcaaccaaaggcaaagaagtaataatcccagctgtggaaatgatttcacttttctgccctgttaataagaaaggatcatgctggtaagaaacggaagttactcttagctgcatgagttttcaagtttaacctggttaatgtaacttagggtgtttaagataagtgttctacttaataatagtgtatttcacacttcaacattgttaagaaagtaaatttcaaatgtactcaccacaaaaaaatgataactatttgaggtgatgaatatgttaattagttcaatttaattattccacatagcagtcataaatcacaacattactttgtactccaaaatatatgccattataaattgtagacttacagtacttttttttttaaagacaagagtcctgatcattctcagttgaaaggtgtctcatgacgctaatgatgaggagcattgtttttgtctttattattttttcagtacaaggattttggccaaatgggatttagactggaggctgagtttgagaagaatttcaaggaagtgtttgctattcaggaaacaaatgggaacaattgactggattagtggatgctgaaagcattcagcaaatggcaccctaaaatatgccgctggtttgccactgacttcaaaatgaggtcacttgggcacagcacatgcagggaggggcttttctctgagcctccttcatctgcccaaagacaaatcctcaaaaggaaattcaatcatcatgaatcacaaccccaagtatctcatcagccagggaagagtaagtgggatcacagggaaggatgttggcagcgacaccatcccatacaggctcttacctcttctcctgagggctgctccagacaacatttattacccagaagaccttttgtctgaaaaccagccaagctttattcaggacacacttcttgccttcactttcccacttccgtggccacctccatgcagaagccctaagcccacattctttcgatagctcacggtggtgcatgagtgtccatcatctgactcttctcggagtctcatattttgtgggactcctgtgcaaacatatgttattaaaatttttttcctcctgtt

SEQ ID NO: 15822 - DNA, 87473 bp, Homo sapiens
ctctttgactgagcaccgaggggcagttggcagcttcacctcagagctgcaggaaggaacggggcagtgaaaatcgaatcgggtgtgatcctaggccaagctcatggcccagcagggccagcaggggcagatggcaagtggagacagcaatctcaacttcaggtgggtcatcgtctcctttcccgtctgtccttcatctctggtagggttccctttcatacttgttatttaatgtctacccagcttcactctacaggtatacaatagaattcagttacaaataaataacgaggcaatcagattttttaaattgcagggattggctgttggagaaactcaaggatgccgtgactcacatcatcttcctattctcttacatctgcaaatggctggactggagctgtttgaacatcatgcctgttctgaggctttgtgtaggattggatgattccccgtgacctctgaaccctctcttctcccccaggcctcctttatccccactccaaaagacaactctgtctaaaaaggatctttttagaagaattaaaatccaaacgcctgtctgttgtcacactttccaggctgtgtagttggggaccggttctgctctgagcccatctatgtggctcttagccctagaatcacttcaggatctctgaatacttggtaggaggaagtgaaagcagatgagacccaacaaaaaaggcaagcaggtagagagtgagtgctgcttctgctttttttattcttctgttctggtattttttacatatctggtcagagaagcctggaaatcatctttaaaaaatgtaagacaatgagaccagtctgaccaacgtggagaaaccctgtctttactaaaaatacaaaattagctgggtgtcatggtgtatgcctgtaattccagctactcaggaggctgaggcaggataatcgcttgaaccagggaggcagaggttttggcgagccaagatcacaccattacactttagcctgggcaacaagagtgaaattccatctcaaaaaaaaaaaaaaaaaaagacaagtacatcaatacggtcatttcttcttatctgtggattctgtatccatggatctaaccaaccatgaatgcaaaatattttctaaaaattaaaaacataaataacaacaataaaaagtaatataaaaatttaaaatacagtataactatttgtatagcatttacattgtattaggtattataagtctagagatgatttaaaatatacaggaggatgtgcataggttatatgtaaatactacaccttttatatcagggacttgagcatccatggattttggtatccatggagggtcctggaaccaattccccctggataccaagggatgactgtacattcttgataaaaatgaaaatgtgtggaatgtaaaaatgtatggaaacttgtctaattgggactctgtgctaaggctacttctggcgctggtacagccccaagaaagcaaaagctattgctattatcagcagtagtggtggcaccagactggttttcagtgcccagtgccaccactcccagacaggcatccctgtcatctctctttcacttgctctctagtgaagggaagatgagccagcggagctcaaagtccagccagcccatggtcaccaagcaggaagaagacggcactgagaggtgacaatgggctaatgctaacctcaaagaatgagttaggaagtgttgcctctgctcttatttttggaggaaattggggaggatgatgtcatttcttccttaaatatctggtaggattagctagtgataccatctgggcctagtactttcctttctggagggctattaattatcgattcaaatttctttaatagatgtaggcctattcagacaacctatctcttgtgcaagttttggttagtttgcctcttaaagaatttgttcatttcatctgtgaccaaatttgtaggtgtagagtccatagttttcctttattacctttccattgtccatggaattcgtagtgatgacccttctttcattctgatgatttccgtcttctctatttttttctttgttaggctggctagaggtttattaattaactctttgaaaagaaaatcagcttttggtttcattaagtttctcgaatgttttcctgtttcaatttttttaacttccactttaattttaattttttttcctgcttgcatcaggcttaaattgctccttttttctctagtttcctcagatgaaagcttagattattgacttagatctttcttcttttctattgtatgcatttaatactatacatttccttctaagtgctgcttttgttgcatcccattcattttaataagttgttttccttttcatttacttcaaaatatttttaaaattcttttaggacttcttatttgaccctagaactcttttggttaatctggaaatattttggaattttccagctatttttctgttactgatttctagtttatggtctgagaacaaacttttaggatttctattcttttaaatttgttaaggtatgttttatggcccaaaatgaagtacatcttggcaaatattctatgtgagcttaaaaagtacatgcattctgctattgttaaatggagtaccgtataagtgtcagttagaccaagctgattgctattgctcatcaggtcaactacacccttactgatttttctgcctgtgtgatatgtcaattaataaaaaagaagtgttgaagccttcaataatagtagtgaatttgtctatttctctttatagttctatcagtttttgcctcatacattttgccattagtttgttagttgcatacacattaaggattgtgtaccttcttggagaattgacccttttatcataatgtaatgtccctctttaatccctgacaattttccttgttctgaagcttctttgtctgaaattgatatagctactataccttttctttgattagtgttggcatggtatatcttgctccatccctttatgtttaacctatctgtatttttatatttacaatgactttcttatagacaacatatagtcgggtgttttgtgttttttatgtactctgttgatctcttgtcttttaattggtgttttagaccattggcattaaagtgattattaatatagttagattaatatctaccacatttgtaaatgtttcattgtacctatcgtttttatcttttcttccttttttcctgccttttctggtttaattgagcattttatgcttctattttctctcccttcttagcatatcaattatacttcctttaaaacatttttagtggttccctgaagtttgtaatatatatttacagcgaatcatgcccattttaaattacactatatcacttcatgagtagagaatacaccatgcaactgaatgtcccaaattctgccctcctgttctttttaacattgtgaaatgactgacaatgttaaaaagaacaggagggcttccagtcattccatttatttatgtcccataaccactcaatatgttgttgattctattaatttgaataaatggcttcattttaggttaacttggagtaggaaaaatgaaaacattttattatatctgcatttatttcttctctggtgctctttctttctctatgtaaatctgagtttctggcccacatcatttttccctttgcatgaagaaattctttttttttttttttttttttttttttttgagatggagtctcactctgttgcccaggctggagtacagtggtgcaatctcggctctctgcacactccgcctcctgggttcacgccattctcctgcctcagcctcctgagtagctgggactacaggcgcccaccaccacgcctggctaattttttgtatttttagtagagacgggatttcaccatgttagccaggatggtcaagaaattcttttaacattttcacatggagtaggctttctggcaaagaatttcctcagtttttgtttgtttgagaaaatctttatttctactttacttggaaggttaatttcacaggatatggaagcctacataggctttttttttctttcatcactttaaatatttctttccactttctttgcttgcatggtttttaatgagaaatctgatgtaattttatccttgttctttcacaggtaggggttttttgttttttttccctaccccctggcttttttcaatattttctctgtctttcgtattctgcagtttgaatataaaattgtaattgccaaactagactcttcttgtccattgcccagaaaagccacacattgagaatagtaggagttgcaggagagagagaatttaataatcgcagggccagccaagcgggagatgtttctgaaatccatctccccaagaattcagagactaggctttttaaaggatagttaggcagacagggggctggggaacagggaagtgctgattgcttaggttgggaatgaaatcacagggggttgaagctgtgttcttgtgctgagtcatttcctgggtaggggtcacaggacctggttaccaatcctgtggtattagctgttccattagaatgcaaggtctgaaaaatacctcaaaccccagtcttaggttttacaatactgaagttatctataggagcaattgcggtggttatggatcatgtgacctccagctacatgactcctgaaccataattctaatcttgtatccaatttgttagttttacaaaagtggttttggtcccagagcaaggagggggtaagttttgggaagggattgttataatctttgttttaaagttaaactataaactaaattcttctcattgttagcttggcatacacccaggaatgagcaaggacagcttgtgaggttagaagcaagatggagtcagttaatttagattcctctcactgtcatgatttttgcaaaggtggtttcaatatgtctaagtctagatcatttgatatttatgcagcttggtgtttgatgagtttcctgaatctgtggtttgttgtctgtcattacttttggaaaattcttggctatcactacttgaatatttcttctgctctattttctctttcttctccttctcgtattccaattacatatttgtcacactttctgaaattattccagcattcttggatattgtgttctgttttgttttttcctttttttttcctctttgcatttctatttgagaagtttcttttgacatatcttcaattcactgattctttccttggccatgtccaggctactgatgaactcatcaaaggtattcttcatttctgttacattgtttttcatttctagcatttcatttttcattatgtctttgagttgtcatctttctgctcacttaaccatctgttcatgcgtattgtgtgcttttttctttagagcccttaacatattaactaaccatagttattttaaatttctgtctaaaaacttgaaaatccatcatatctgagtctggttttgatgattactttgtctcttcacactgtgttacttcttgccttttggcatgtcttataattttttttttaagtcagacatgataagtcaggtaataggaactgaggcaaataagccttcaatgtgaggttttatattaatctgggtaggaaatgggccatatctaatgtttgttctagctgtaggtggcagaggtgtcaaattcctctagcgttcttgtttttctttcccctgctttctctgggtttctctgagaactcctttttaaatagtctgtttcttgtagttcttccagctgtaatctgctcttattatacaggaaccctgttgatggaatggtaacgtgtcagagggggaagtggtctataatcttatgattacatctcgatcttttaatggaactgcaccttgggctattacttttaaaagaatttctccctccacccttttttttcaatttttttgagatggagtcttgctttgttgcccaggctatagtgcagtggcgtggtctcggctcactgcaacttctgcctcctaggttcaagtgattctcctgcctctgcctcctgagtagcagagattacaggtgcctgccaccatgcccagctaattttcttttgtgtttttagtagagacggggtttcaccatgttggccaggctggtctcaaactcctggctttgtgatccacccgtctcagtctcccaaaatgctgggattacaggtgtgagccaccgtgcccagcctcacctccaccctttttagaagtgacaagatggccagaaggggctagattttggtagtcacccttcccctagaatggttaaagcattttccctggagagcaggcccttgtcatggagaatgctttggctttttaaaaacttttcttttccctcttcttgccagaaggataaagagatttttcttggggtttgtggaggtaaaatccataaaaggttgggggcctgccctgagatgatgacccccaggagtttctcatgctcatgctcctccacactcagcctccagcaattcatcaaacataccaggctatgacttcagtgcctgctgcctcagatagttgatctcggctaattctctggatttgcctgtatctccagattttggggcagtttgccttgtgactttggttatttgagagatagaagaaaagttgttaattcatagtttgttcagcagggttgttgttgttgttgtgaggatgggagcgatgacttccaatgtctttgcgtgttgaagctgaaaccagaggtctagtgaacttttacatttttgaagtttagacttttttcttaagacaaactttctttttgttttaaattttggttttattatagtattatcttatagccagagcatgtaacctgttcaatttctcttcattattatttattgaaattacttcagggccaaatacctggtatgatcttgtgtgtttaacacagtgttattaaaaatcaattttgccagtttttaaaacttacattttgtgtatctttgttcttttatttttatctacttgagaagctaaggactggaagtaagatgttttttaacagccttgaaagatttccccattagtaatctttaatcttactttttaaatgtgagtattgagaattttaccttctttctcatttgtatttgcttaatgaaacttatccatcttttgactgttaacatttttaatgttattttatctctgttatgtctcttgtagttagattctattttgaccatttataatttaagatggtagcttaatctgttttaaatatcttgttgcttatggattttttatttttatattttatgcctctttattttctataagaaaaagagcatgtttttctttctcattattttgtaaagtttgtagcctcattttgactctatttgttacacttgggtttctaattaattctttaatgtatatttctctaactgagaccatcaaatttataactatatcatttgaatttgtatttgaaataagttacttaactcaattttttacttgtcctcactcaatttaaaaaactttaccaagatatcgcaccactgcactccagcctgggtgacagagcgagattccgtctcaaaacaaaacaaaaaaaacattaaaatagaatctaaagtttaagattgaaattactataattttattatatgcagtatatatcctctctttttagaacagtgcttctcaagtatttgggttcaggatatttttatatttttaaaaattatcgagaaccccaaagaactggcttttgtttattgggttatatctgttgctatttacgatattagaaattaaaactttgaacacttaaaatatgtatttattcatttagaaataatagtagtgaatttattacccgtgaatatgtgatgtgtttttatgaaaaataataaaacttttcaaaatagaaataaattagccagaggattagcattgctttacatttttatacgtcttttaaatataagtagaaggcagctagaccctcctatctgcttctgcattcaatccgttgtgacatcacaggccatttagcctctgaaaaatttcattgtatattcatgagagaatgagaaagataaagggaaaataatatgttattatgtgaagagttttacttggtgacacctgaaagggtcttgcacaatcctagggggtccctaaccccactttgagaattactgttctaagataatttatacatttgagacatcagtattgtaactggttttaatgatgcttccagttcctctacaataaggctttactgatactgatttcttgattctgttaatgtagtacatcatcaaataattcgtcctacacagtgtcagtaaaaatggagtagggtgatctataggaacaaacaattcccaaatctcaacgggtcaccagccctctgcacagaggaccctcatcctggactctgtctctggctgaggagcagccaccccatctgaaatgacagtcactgtggtagaggaacagagagcatgcctaaccaggtgctgcctctgagctcttctgccagagtgatacccattgctccaagggaggtacaatcttaccttggcccagaagaaaagaacattgaaaaatgtgtgaccaacacagaaggtgcatgagcaaaatattctttgagtccttgtctatctaagtattgattctgccctcatacgtgaatcattgaataaggtatacatttttccattttaatttttttggacccattctcaagaactgaatgggtatacactttttttagtagtttcctcttacctctaggtttataggtttgcatcattgctttagacatttagggtttcaaattcacttatttttccctttagggcttttccccatatgttctgggaaattctccctcctttatcttataaaaattttcattcactttttaaaaatttcacaatcattttgaatttccaaggtcgttttattttctggttgtttcttttctgcatggaatttttggtacaatatattctctttctgtgtgataatatttgttgtttagaaattcttttttgttccctgaaacatctgtatttccgctagggtaattttttgccttttgcttatcttggttttactccttaatgttgtaggtttccacaaatgctgtggtctgttgtagtctgttcatgcttaccagcaagatgctgaaaagtaaacttgaaactccatttaatgagatgggcttgcaaacttgtgggcttcactgagcaaataccaaatccctgaaggtaaaggccttttctctgagtcatttatatttttcttaagaggaaacctccagtcttctgcctgattgtgggtgttctgtgtcgtagagcaaactgtttttaattttgcctttggaacaatctctcgattttcatctctgcatctccttctcaaccaccactgcatctctgggaggctgcaggacacgctggatccttttctgacctcaggaagcatcctccaccttcaatagcaatgagtacccctcagaccactttttctctttcatacttaggttaaaatttctcatctaattcctttctcttcatcattgtaactttaattcctttactgtcattttaggagatattctagtgaaagaggagaaaaacagttgtcattaatcaacgattttaaaccagaaggctttttcttttttaaaagaattcaatggataaatggtgcatgtctggagaatgggaaattttagtgatcctctattctatcctgatgcatgtttaaggaatggaaagtcccaatgaccatttcctggtgggataaaaaaaatcctggaagtcttcataccgtttagaaatacagataaatttgttaaggcctattagcaaggggaacaatttagcaagtaggaatcagaactacaaacttttgtgattaaaaattagtttcccaggcacagccttaatgtctgaaatccagaggtctccaagtttagacagattaatgtgtcctagttttgcatatccacacaaatctccatgttggaccagagaaagagtgattttcttgtgactgtttttttttttttttttttttttttgagatggagtcttgcctctgtcactcaggctggagtgcagtggcacgatctcagctcactgcaagctccgcctcctgggttcacgccattctcctgtctcagcctctcgagtagctgggactacaggcacctgccaccatgcccggctaattttttgtatttttagtagagacaggtttcaccatgttagccaggatggtctcgatctcctgaccttgtgatccgcctgtctcggcctcccaaagtgctgggattacaggcgtgagccaccgcgcccggccttcttgtgtattcttaatcaaaccttaccagatgagagtctttgaaccaattttatgatgcagaatgccaccctccttttgcagttacagatggaggagatacatctcctttacatctcctgagatttcctctctttgttgttaactaagaagacttgcagttcagtgttaggttctgtaatatctcagccagatttttatttctttctctgtaagttaaagttctccagagaaacagaaccaataggatgtgtatatacagagaaagagatttgttataaggaattggctcttgcaattatgaaggctggcaagtccaaaatctgtagtgtgggcctgctgtttggagacccaggagagctgatggtgcagctccagtctgaatgcagtctactagaggattctttctttcttggggacactagtcttttggttctattcaggctttcaattggttgggcaagccccacccacattatggaaggcaatctgccctactccaaattcaccaatgtaaatgttaatcttatccaaaaacaccctcaaagttggcatataaaattaattaccacagtatcatgtcaattcctataaagattttgacatcttttaattgcatattttccctagagagttcaggtgaaggtctctttataatagtttgattggaacagggtgagcctttttacttctatgtacaggtctttcttaagttcactgttttcatcttttccaccttgatttttcccaaaataaataaattccattcattctggtctccctacaagaatgcttattttatacatgttggctctccattggccatccttcatgtctaaaatcttctaaccaccacaaacctcttggaaactcagtgtctacttccacgttgtatctttgtttcttaggatggtcgcagagatccagaacgtagagggtcagaacctgcaggagcaggtttgccctgagcccattttcaggttcttcagagaaaacaaggtggagattgcaagtgcaataacaaggccatttcctttccttatgggcctccgagaccgctccttcatctccgagcagatgtatgaagtaagtaagaatttccaaatgatgataaaccaggtccatactcaattatgccaaacttcaagatgcaatgagcaggctaaagggcctcctgtgagtggggaccttcaccattctgtaggttaggaggtgacaggagaagcaggcatcacagaaaacctcccttcttctgtagtaaatgttgggggagggccacagtgagggaggtggggcaggagagagaatgggaatgctgtatgggtgcagatcatcctaggtacttgtaaacaatctactaatggtagccataattaaaataaataagtgacctaggcagcattttattccaaagcctacttatttgaaacacttgaaactgagatttttttgaaactcacagtgaagttgtgtcattttaggttacatttggaagtggatgcttgctactgtctctccaaatcattgtttgatctttggacatttctagagccctagaatgcaagttaatgttagcagtggatgcccttagggatactgaggacaaggcttcttcttgtctttgtgaattttctgtgccctttggccaggagtcatagtgggggctggttgattggtttcctggagctcgtcaggccaggccaatcctagtagtggttattgtccatgcaacagaacagccttgttaaggccactcctgaaataacctggccaggctctaaagccatacacaacattcaactttgaacccacacttattatttaaaattactctctccccttaagtgtacaacaatgtcagagagtcaggttcaaaaaattagagtgtatttttatggtggaggacatttaagaagtcatccaaatatacgcaaaattctaacatttcacaagagaacagatgttctatctacaacctaaaagtcttttgtaacccataaatctctagctacataattctccatttaatatttttaagcattttcaagaagcttttagaaacctggtcccagtgacaagagtgatgtattgtgtactcagtgaactggagaagacatttggctggtcacatctggaagcattgttcagcaggattaacctgatggcctatcctgatttaaacgagatttacagaagcttccagaatggtaactatagctctcaacagctttgggggattcaagcccatttcattcattgattcattcattcactcttcattcatatttgacaaatatttgactgagtgactattacatgccaagcccagggggaatataatgatgaaaaaacacacatgtcccatgtccttatggagtttacatacagtgggagtgacagacgttaaccaagtaatcctgcaaatggttgctcagccaggacttgattttgatgctgtaaaacatagggttgaagtctctatttttttgaaggaatacatgagtgatgtcttttcatgggaaaggaggaagccttctctgatatttgcagatatgttcaaagataaaacaattttctttgtattagaaaatttatcatccagtgcagtcctgtgtcaacttgtttctccaaacaaagactggagaagtcacgaagagagcctagcacatactggtacactgaggaggagctgcatgtgaaagctatgaagacagaaaagggggttggtgggggcctttccgaaccatgtggttgaattgcagactgtgggaggcagggtgtgagagctgactctggagaaagaagttgaagtggattctggaaggcttgacaccctgtgctaaggaatctggagtttaatttttggaaaataaagaaggaataaagggcatttaaacgggaaaagtaaaagaagtcagtatgaagaatgggatgtgttgatttgtgaatactataccttgattcaaaaaagaggtatcttgttttcatattatgatacatccaagtcagagaaaggtctagaggaagtcaaatactgtgcatgcctcctttggtatccatgagggattggtttcaggaatacccaccactctcagtcctgaatgcttaagtcccttatataaaatggcgtagtatttgtgtataacctatgcacattgcaccagtatactttaaatcatctctagattacaatacctaatacaatgtaaatgctatgtaaatagttgttaaattgtatttttcatttgattatttttaatttttgtattgttattttatttatttatttattgagatggagttcactctgtcacccaggctggagtgcagtggtgtgatcttggctactgcaacctccacctcctgggttcaagtgattttcctgcctcagcctcctgagtatctgggattacagtcacccaccaccacacccggttaattcttttgtatttttagtagagacagggtttcgccatgttggcaaggctggtcttgaacccccgacctcaggtgatctgcctgccttggcttccccaaatgctgggattacagacatgagccaccatgcctggcctgttattatctttaacttttgtcccacgtttttaatctgagggtgggtgaatccacagatcccaagccaactgtacctaggcacaaattttgagtcaatatttgtattttaaccagggtgttccaggctgtggcaatgaagggaatgatgttacttctactgcccacatctcaggggctctgattctgtctgtggactgtggggatcctcctggccccagcatccacatctcatatgttagtatctggcacttcctgtgtttgggtgacaggtacctgaggctcacgactgcccactgcctcagactatgagtagaaatgtgagaaatgggcagaagtagaatgaattgtaaaaagattgaaaaaagaaaaaataaacctctacttatactacacaacatccacaaaaaaataattcaagttggatcacaaatctagaagttaagactacaagtataaagctgctaaaagagaaaacataagacagtgtgtttgcaaactgagagtaggcagtaatttgctatacaggacacaaaaaaacatggatcataaaagaaaaacttggtaagttagatgtcaacaaattaaaaactatgcatccaaagtcaccattaagaaaaggaaaaaacaagccatagactgggagacaatattttgcaatacacatatctaacaaaggattgtactcacaaaatatgaagaactcctataaatgaataataaaaggacacatcaccaattcaaaaaatggacaaacgatttgaacagacatttcaagacaggagatataaaatgtccagcaagaatataaagtgtatgacattattaatcatgagggaaatgcaaattaaagttatagtgagatatcattcactcactagaattgctaaaattaaaaagactgacaataccaagtgctgatgagaatatggaacaattggacctcccatcccttgctggtaggaatgtaaaatgataacgaccactttgggaaagtgcctggcaatttcctataaagttaaatctaacctatgatcttggcagtttcactcctaggtatttacatgagagaaatgaaaatatgttcatgcaaagatttgtttaagaatgtttatggcagccttattcataataactaaaatctggaaccaacccaaatgctcatcaacggagggtagataaactatgactaatttatagagtataatactattcagcaataaaaagaatgaactgttatcacatagagcaacatggataaatctcaaaaacattatgttgagcaaaataagcaagttgtaagagtacatactgcatgatcctatttatataagtacaagtacagacaatacagacaagtacagtgccagaaaggaaggcgccattgctggtgataggaaccagaacagtggtgtcttaagcacaaagcaattttctgggatggtggaaatgttctgaatcttgactgggatgttggtttcacaatgatttacacttaagatatgtgcctctcaatgaaaaaaaggggaacaaggctctgttggacctcgggggtgggagatcctggggcttggacatcaagttcatcttgagcacactgaggtctctcctctggtcactgtctgagtttggtaattttcacattgttttcctcagtatgctatgaacactcacctctccaaatgaataatgtaaacgatttagaagatagacccagattactaccatatggtaaacaaggtaactatcatttagctgatcaatgcccttattaaagttttgcttccttgccttcatggaggcaaatcttgtatttcctctcctgtcttagccctctgttatctcccagtcctcctcccctcacacagccatgtacctgcccttatctgccaacagatgtgagagaaccaatgaaaaaggagatctgatctcttgaatagatggagtctccattggtggagaatataagaagagaaaatgggaaaggtagacagagaataatacaggacaaattacatgaatggattccatcttctaaaggaacataaaagtcctaccctccgaggttgagataaggggattatttttaattaatttcatagaactattaagagaaactcagaaataacctaagccatatcagattcaggtgagagatattccttacggagatgaccagttaggggtctctagtactgtggtcacagtccaagaggggagtttggatatggagagagaggggagcctgaaagatagaattgcgcagggagacaaaactgaaatagtgttggcagatagaagatcaaagtgaaatgggagaaacagaaatggaaagagaggaagtataagacacagcagagaaaaggtaaaccgaaacatctgccaaggatcagaggtaaaaatggagagagaagtatatggaaaaggaaagatgagaggaaaataaataccaagaaatggggaaagtagagaggtacagaggcaactatgtagataaagagttaagaaaaaaagggtgtaaaacacttgagagtgaaaagtggataaaagggagagagaaacagactgggacagtgtaggtttgaggtaagagcactggatatccataactttacaagggtttattccattaaccgtaagttttcagaatgaactgttcccacatcaaagtggcacttgcatgatactcagatttcaatagatctctcccagaatagtccaatgattcccaagcacaaatctccactctaaattatctttagagtacatttattcatggacctgaggacctttactcaagggtcagatagacatctacacttgatttttttcaagaaccttaaacttggtactttgagaactgaaagccacatcttcattgctcaagttagatcgaactcctctgcagcactctttctctcagagacggatcactattatcccatggtttttcaagttggaaacctagtcaagtcatcatggatgactcctcccttgccctcaaatacatgccagttatgcagccaatgtaatcatttcatcttcaggttgcccctggcctgtccatctttgcatccccaagaccaggtctctggtccagatctccatcaccctcatgattctcagggcaacatcctttgctcatctcctccctctaatcttgcttccatcaaatgtgttatttgcacttcaactagatgggatattttaaagtgcacatcagattgtatcattttcctacttacctccttaatacactaaggattaaataaatgggtttttaagtagcatccaaaggcatccacaatgagccacctgcttacttctccagcttaatccctgcctcctgaaatattacttcaaggtggaataaaatttcccccaataatttcaattgttaaatctctctttcaaactgagcctttccctatgttttctctatgctgccttatttagaattgttttcctgtcccactatcctccatttacccttctccaatccagctaaatcctacttagaatatatgatcaaagggaggtctttctttagagaaagctagaaaggcacaattgggagaccaaggatgggagagaaagagcagtatcagagaaagcaagagaaaaaatttgcaggagcagagaagagagaaatgcatctaggaaagagaggctccaagaaacatccgcagaaaaaaacagaggcagagattgaggaaatgtacagaaacaggtggaaagacatgagtgagaaaatgggaaagagaacaaggtataaggaaaggaagactcccccacagtggatgaattattctcagcctctggtgaaggttactgaaggactgaatcctcaggtcaggttgtttggggagaggggaccttccagattatcaggttttcttagttttctcattatttgttttcttgttttgatggctttttgaccataaatcaagacatctaagggatttcattcctttcggcagagaacagcaatgcctgtcatgaaatggatgatatagcagtgcctcaggaagccttgagctcctcgccaaggtgtgagccaggtaaggaaggagtgacttgctctccctgacctgcagggtgtcaggaggtggaattcagagctggtgtttcctaatgcattttactctgagtacatgccacaggcaaaagatccattttgtccttggatcctataattctgctaaattttcctaagtgtatgttatagtagaaatatgctagagaaggatgatgtctttcatgtctactaataataaaaacttgattatacctacccaccacttactttctctagagaataaaaacgattattgtttgttactattattattttgtcccttactatagaaagccttcaaaagaaacatgttccatcagaccaactactcgaaaaactaaatgataatttttgccaaatattttccattgtgttactatcttatctagttattgttcaaagaattttggcaaacaagatgtcattttatctccacagcttatgaattttgatggataaacttttgcttatttgtattttatagctaaataaagtagaagtagaagcatagcaatgtgtaaggtcttttaccaggtcaaattagtcaagcaagaacatgacccacatccctgctgactcactgcggtgatggttgtgtgaatttggcagagatcagggtagccagggtcatggattggagttcacacaggagacccaaggaggcctgcaggttcttaggggagtgggccagggcctggtgcaaggagactcttattcagcaaaagcatttccatggccagagcagggaaaagcagagagaaacggtaagattggaatctgccatgtgggatgcaagaaatccagaagaagagaaccagaaagaaaaatggagacacaagtaggaaaatgtgatggagggcattgaagagcaacagaaaagaaaaagagagggaatcccagggagtcaaggagatggacggtgcttcatggcgtagaagcaagagtgtgtggtaaccaaaaagtgagaaggagaaaggaggtagcagagagatgatcagaaggaaaacaggcagagcaaggctgtggcggggctcaggcgaggtccttggagcaatagtgtttttttgcaaggagaagctcacttgagtgctgaacaccaggattcagcaggagcatcctgaggtctgtgctctcatcactgtgccttgtttatttccaggtttctcttcagagtcttgtgagcagttagctctcccaaaggctggtggaggagatgctgaagatgcacccagcctactaccaggtgggggaggtaattatgatttaaatgaccaattatctcattaaattagttggcctatctctatgcaaccaacacttccttctctctccaccaccaaccctgtaacacacttttgttcagcctgtggttgttttccccaggtgtgtgggaggcaagaggtaaaggacggctaagtcctttagtggaggggctcctgggcagagagcttaagggtacagagtaataaaaattactctgattggaggcaccaaatggtgttgcctaagtgggcccaattttatctacatgaatattgaatctaaatcctaccaggatggggtttgagaaaagagagagaattttaaacttacttgccagggattatttaggaataatgaaatactgtatatagaagagacaaagtggaagtgacaaagttagaagaatgaatagggatataacggggcaaagaggtaacaaacatcacgaaggaagaaagagacagaaatgcaaagaaatggtagaagtcagggagaggaagtcaagtcaaagagatcctggagttggtttatggtgcagatgcagcaatgtgtaaagacagggttagagggagaaaaaagaaggagagagagggagagaggggaaaggggcctgacaaggtgctagaagaagtagagccacttttgtttggtgcaaagatacctttattcccagggagcagttctacacccgaatattagagctcagcatggatccaggtaggtgtccaggtcactgccaattgtctgtcatgttcctctttcactctgcagtgtcctgtaaacttgctatacaaatagatgaaggagaatcagaagaaatgcccaagttactgccttatgatacagaaggtaattaggatttaaattaaagctttatttttctgtcaacatacaaaaacacctactctttcatctcccttcccattcccccatctattcatgtattcatccatatatccatccatccatccattcatccatccatccatatatccatccatccatctgtatattcatctgtccatccatccatccagccatccatcaatccatgcatccctccccacatacagacagagacagtctatgtccagcttcttcctgctttccttaagaggcacaagtagcaaaagaaggatgagctcagactggttggggctttcctgcatataggacatagggaaagagagagagaaagaaaaatatagtttgaatcgttaaataaagagagatctgagtgattgccagttttacctcaatagttgtgggatccaaatattaccacgttgggtaacatttgggtaatattaccacattgggtaacatttgggtaatattaccacattgggttataaggaaggggagataattttcaacttattttctcgaggttatgccaacagcatggatataatgagtatattgcaatatagaaaactcagtgaaagactgttgaaatgaacttcacaaagggaagggtccctgcccctttgttaatggcaaaagatgaggcctttgatactatggcagaaaaataagacagaatatacagaaagactgaagtttaaatttttagatttaaattttggattgaaaaattaggaacagaaagctaattagagagaacagatagaggcatggaaatgagcaccatggaagaaaggagataagcttgattattaaatatggcacaggaattaaaaggtggagaaaatactgtgagaggaacagagagaagaaaaatgctcgaagacagagacagtggaggagaggcacaaaagttgtacacagagaaaaagagaaaggagaataagtgaagttagcagagagtgaaaactgcttgcaagagatggggaacaatatgggacattgtagggatggagggaagattcactagacagaaataacttctggcccaagaatgagacatgttagcagcgagttttcacattatggtgtccccagcctatcaaaatggcacctgtaatgtcctcagaggcagtcgacctccccctgaggctttcatgtctctcccatctataacttaatgatttcaaaacacatatgtccagatttatcttctaagttcattcatctgagtacctgaatacgttcatgaagatatctgaaagacctctccatttggatgtttttcaggaacctcaatacaagacacctccaagagtacataccatctttcctgacacagatctgactcctctcccagtgttccctatctcaggatgaaacactattactccattcttgaagcagaaacctaggagccactcatgactcaccccacctccctcaacttaaacaccccatcaaccatccagtagacttttagtgagttctacatatctcacctgtccatttccttccaccccaacacaaaaactctggtaagatctctctcttggactggagcaacagcctctagactcacatctttcctctgatcttgtacctctcacatccattctttccaactcaaacaactctttcaaaaattgaagttggcttatcttacatttctactttaaatcaataactacttggggtcataaggattaaatctattttttcccccagggctccagcttcatgtctgcctctcctgcaattacttcaaggtttatatacaaattttctagtcattgtcattttctgatgactctttctcatctgagctttcctaaaggcttagccctgtgcttgaaaaagtcaccttgtttcactacaatctccatcatgctcactaatctagtgaaattatatggaaattacatacactctcagagatgccttttttgatccctagttctagaaagcaacgggatgatagatgcggcaaggacatacagcacagcaccaggggagaaacagggagaggaggaaggcaggaacagtcccagaaaaagaaaccaagacaaggagaagtaccaagagagtccagagggaagagacaaaggtaggaacagaagaagcagagacatgtgtcaagggtgaaaatgagagtgccaacatggggtgggagaccaggtgggcaaggtttctgacagtctctatcagattactggattgcacaagagcttcttttaccctcacaaaatctttaacatcgatatgcaaacagctgtatgtctatcttacagactgagaaataaagcacagaaatgcaagcaggatattatcacaaaggcaaagtagaaaaggaagagtgggcaccagtgtcctggatgtgtcactgggtgatggttgtgcaaggccagctgggggttcagggccaggtcacagggtcagaatagaaagaagtccaaggagttctgcaggttcccggaggagtggaccagggatcaatgtaaggctttaaggaaaaaaaatgctaatgggagggaagggaaatcatggaaacacagcatggaaatagagcctgccctttggaataggagagggatctagaataagagctaaagaaataatagaaaagggatatggtatcactgaaaaagaaaaaagacatagaaacaggagacaagagaagccagttggagagaagatcagacaatccaagcgctgctcagctaggagggaattatgtggaggcagaacggtgaggaggacactgagaattacagagaaggagaaagaggagctgcaacaaggtggagaaaaggcggaacaagacaggggtggctctcagcatttgcccatcttggatggcatgaacacactgaggcctgtgtccaagtcaccctctgtggtctgtcaatttcttgtttatctgcagagacctttgatctaaaaactccccaagtcactaatgaaggagaaccagagaaggggctctgtctactaccaggtgaaggagaaggtaattatgatttaagtttttaaatatttgagtacatctttgttttctagttggcatggaaaaaaagtttccctttctcccatcctacccttcccttcttcacattcgcatacatacagatggaattatgtcaattttctgttgtgcctttttgaaaactgtgagagagacaaaggatcaaggtgagctgagcccctgagtggggaccatatttctgcatggggaatgtagggagaacgaatataccagaggtaggctggggcgccagagaagtgcgtgggtgatgttattaaacacacattaaacctaaataacagcagattatggcaactgacgcaggggagaatgttttcagcctacttccagaaggatctggagcacagacatgttttgtgaaagaccgaaggcttgcaactgaggaaagtcatgcaggagacccttgggatggtgctgacaagggaaggacctgtggtgctatagcccctgcgtgaacagaagatcttttccaacctggaagaagataactttgagaatgaggaaaatatataaaataagggacattttaccagcatctaggagcataagataaaacccaaagaaacagaaaaggagaaagtagaagacacatagaaaggtgataacctcaaggagaaaagttagagaaaattgtacaaatggtagcaaatacaataacaacagcaatatgggaaggaagcacagaagaaattatgcagagaaagaaacagatcaaaataattaaagaacccatgaagagtgaaaactgttgtccaaggaaaggggcaggtcgagggcctatggagctgaagtcagtcactagatagaagcagctcccagcaaagggcacctctatcaatagtgagttttccaatccaggcccccctaggtagacagtggcacagaagcatactcagagagtaagagtactctttccccagtctcatctgctcaggtagtggaatgattctcatgtacatgtctgcgatgcagacctgctttccaagctcttccatccatgtgcctgaagatatttatcccaggaccctgccccttgcaatgtctttcaggaactacacacatccaaaagggaaaccaacacctcctccgaacctagaaactcccctttctccagggtttactctgtcagtaaagggatgaatatcctgtttgctcttctactcatcagactctttttctctgctttagcacaattgttctctgctttagcacaattggcaattgcaagatgtcaatcagatcattttcttttccccttagacgcggtgatctttgctgcacaggattagatgaattatccttcctgtggatttctgtggcttccacccttcatgggtccccagcccatatcatctgtcccatctctactaatggcatcaattgtttcaggagctgcaatgatctgatctttcttttatatgtgggcccttgagccacatttcccctgtactctgtattgttgccttggcccactcttctcctgatccctttccttatctggttcatttccaccatcccaaggatgcctttcctgatgcccagtatgagaaagggggtgacaaggaaataaatgagatggggaaagccaataaaaagcagagtcaggggtgcaagagaaaaaggcaggagcagagaatggagcagaaacacatggaaacaaagagaagcacctggagccactggcagcaggaaagcagggcaaaggcagaagaaatgtgcctaggaaagggggagggggagaaggagagagaattaggagtccaggcagcaagtgagctgatggatggttctcagccttggtgacagcaactggagtgcatccacttacaggccaggtgaacccacctacagaacccacctacaggccaggagggcctgggtgatggacagccccacctaggagatacttcagcttcccacgtcttcactaagttttctcttcataatttcttgagggatttcttttctttctgcagagggcagtgatgactgttcagaaatgtgtgatggagaagagccccaggaagcctctagctccctagcaagatgtgggtcaggtaaagaaggggaggatttctggccctgggctgcagagtgtcaggaggttgaatttggagcttgtgtttcctgattgtctttcctccaagtatacttcacagtgaaagaatgcaattaaatctgagatttttcacattttctatacatggatatttgagaaatgcagggaggaatcttgatatagaagtctgtgtttaacggaatgggttttattgtttgaacatatgtgtttagataatcacgtggtagttggattatgtcaaggcaaggcaatgtgttctccccttcatattctcatgcctattaatactgaagcattaaaatattttactgaataagatctcctgataccctcacaaaaccttaagatggggccagacaaactgggtaatcctattttacagatgaagaaataaaggtcagaatatgctaggaggaaaaaatgctctttgcctttatttttcttcactatcaatagtattacttgaatttaaaattctattctcactcactttttctatgggaatgaaaaagcttatcatccctctgctggtagatactttttatcattttattacaaacttgacaaagccttcaaagaaatggtatcctaccctctaattgacagaattcagatgatctctttatgagactaaatgctatttttgaccaatactcttcattatgttattggatcatgcagtatgtttttagaggactctgataagtgttacatttttaccctcagaaacctcaagatttaggcagggaaagtgctgttattgttgttttgaggagccagaaacacagacgtacatgtgacaccggtgtttgttaagacccaagaaggagggaaatgcggagaccagtgtcctggatgactccttacaggctttcagttctgtgaggcgggcatgggttagggtggggtcccatagactgagtccaatgtggatgcccaaagggtttttaggaatctgagagactctacctgggtttaatggaaagagacttttattaacaagtaaagcaagcttaaggagaggagtggaaaaattattgagagttagaaagtatgtaaatataatccatgatacgagataggagatatccagaaaaatagagccaggaaagatacacagagatagaatgtgcatagcagatgtagcatatcactgaaggagaaagagacagatattcagggagagatgtttggaagagaaagtccacagagccaaagagaaggacagttgccttcatagagtagcattctatgaaggtgtatgaagatataagtgtataccttcatgtgccttaataggcatagagtggggcaaggacataaagcacaggaccagggatgcaagagggaaatgagggaggcaggagcagtcccagaaaaagaaaccaagacaaggagaagtaccaagagagtccagcggcaagagacagaggtagaaacagaagaagcagagacatgtgtcaagcatgaaaatgagagtgccaacatggggtgggagaccaggtgggcaaggtttctgacagtctctatcagattactgggttgcacaagagctccttttaccctcacaaactcttaaacatctgtatgcaaacagctaaacgtctattttagactgagaaataaagcacagaaatgcaagcaggatattatcgcaaaggcaaagtagaaaaggaagagtgggcaccagtgtcctggatgtgtcactgggtgatggttgtgcaaggccagctgggggttcagggccgggtcacagggtcagaatagaaagaagcccaaggagttctgcaggttccctgaggagtgaaccagggatcaatgtaaggctttaaggaaaagaaaaatgctaccgggagggaagggagatcgtggaaacacagcatggaaatagagcctgctctatgggataggatggatctagaataagagctaaagaaataatagaaaagagatacaatatcactaaaaaagaaaaaagacatagaaacaggaggcaggagaggccagttggagagaagatcagacaatccaagcgctgctcagctaggagggaactatgtggaggcagaacggtgaggaggacactgagaattagagagaaggagaaagaggagatgtaacaagatggagaaaaggcggaacaagacaggggtggctcttagcattttcccatcttggatggcgtgaatgcactgaggtctgtgtccaagtcaccctctgtggtctgtcagtttcttgtttatctgcagagacctttgatctaaagactccccaagtcactaatgaaggagaaccagagaaggagctcagtctactaccaggtgaaggagaaggtaattatgatgtacatttttaggtatttgagtacatctttgttttccagttggcatgggaaaaaagcttccctttctcccatcctacccttctcttcttcacattcgcatacatacagatggaattatgtcaattttctgttgggctttttttgtaaattgtgagagacaaaggatcaagctaaggtgagcccctgagtggagaccatatccctgcatggagcatgtagggagatacaatatgccagaggtaggctgggggcaccagagaagaagttcctgggtgatgttattaaaaacacatgaaaccgaaatatcagcaggttatggtaattgaggcagggagattgttttcagcctactttcagaagtatcaggaacacagacgtaagttttgtgaatgattgaatgcttgcaattgagaaaagtcatgtggaagacccttgggatggagctgacaagcaaagcgtatgcagttttacagcccctgcgtaaacggaagaacttttccaacctgggagaagagaactttgagagtgaggaaaatatataaaatcgtggacattttacaggcatctaagaggttaaggtaaaacccaaagaaacagagacagaaaaggagaaagtgaaagacaaagtagaaagaggataatctcgataagaaataagaggcagagagaaaagttaagagaaaattatacaaatggaggcaaatacaaatgacaacaatgttggaaggaagcacagattaaactatgcagagaaagagatcaaaataattaaagtacccatgaagagtgcaaactatgtcggaggaaaggagcgggttgagggcctgtagagctgaagtcagagttactagacagcagcaacatccagcaaacggcacctctatcaatagtgagttttctgattaaggtccttctaggtagagagtgacacagaagcatactcagagggtaagaattctttctctccccgcagcctcatctgctcaggtagtggaatcattgtcaagcatttaatatctgtctgttaggcaggcctcccttccaagctcttccatctgtgtgcctgaagacttttatcttgggaccttctttattgcaatgtctttcaggaactgaacacctcacagtggaaaccagcacctcccctgaacttagaaactcctctttctccagggtttgctgtctcagtaaagggatgaatgtcctgtttgctcttctactcatcagactcattttttctgctttagcacaattgttatttgcaagatatcaatcagatcatcttcctttccccttagatgtggtgatctttgttgcacaggattagaagagttatccttcctgtggatttctgtggcttccacccttcatggggccccagcccatatcatctgtctcatctctactaatggcatcaatcatttcaggagctgcaatgatctgatctttcttttatatgtgggcccttgagccacacttcccctgtactatgtgttgttgccttggcccactctgctcctgatccccttccttatctggttcatttccactatcccaggaatgcctttcctgatacccagtatgaaaaagggggtgacaaggaaataaacaagatggggaaagctagtaaagagcagagtcaggggtgcaagagaaaaggatagaaacagagaaggggggcagaaacgcatggaaacaaagagaagcacctggagccactggcagcaggaaagcagggcagaggcctgagtctaatgtggaaagggggagggggagaaggagagagaattaggagtccaggcagcaagtgagctgatggatggttctcagccttggtggcagcaactggagtgtgtccacctacaggccaggtgaacccacagggcagaccaggaggacctgggtgggggacagccctacctgagagatacttcagctttccacatcttcactaagttttctcttcatgattttttgttggttgtatactgagacctctgagggatttccttcctttctgcagagggcagtgatgactgttcggaaatgtgtgatggagaagagcgccaggaagcctctagctccctagcaagacgtgggtcaggtaaggacggggggggggatttctggccctgggctgcagagtgtcaggaggttgaatttggagctcgtgtttcctgattgactttcctctgcatatacctcacagtgaaaggatctaattaatcctgagatttttcacattttctgtacatgaatcttttgtgaaatgcagggaggaatctttatacagaagtccatgtttaacagaatgggatttattgtttgaacatatgtgttcaggcagtctagtggtagtcaaaatatgccaaggcaaggcaatgtgttccctcctttatattctcatgcctttcaatactacagtattaaaatattttaccaaataagatctctcgataccctcacaaaaccttaagatgggggcaggcaaactgagtaatcctattttataggtgaagaaataaaggtcagaaatacggtaggaagaagcaatgctcttttgcctttattttttctagctatcaatactattatttgaatttatataaaatttctattctcaggaacaattttacactgttggtgggactgtaaactagttcaaccattgtggaagtcagtgtggtgattcctcagggatctagaactagaaataccatttgactcagccatcccattactgggtatatacccaaaggattataaatcatgctgctataaagacacatgcacacgtatgtttattgtggcactattcacaatagcaaagacttggaaccaacccaaatgtccaacaatgatagactggattaagaaaatgtggcacatatacaccatggaatactatgcagccataaaaaatgatgagtccatgtcctttgtagggacatggatgaagctggaaaccatcattctcagcaaactatcacaaggacaaaaaaccaaacactgcatgttctcactcataggtgggaattgaacaatgagaacacttggacacaagaagggggatatcacacaccagggcctattgtggggtgggggaggggggagggatagcattaggagatatacctaacgtaaatgatgagttaatgggtgcagcacaccaacacagcacatgtatacatatgtaacaaacctgcacgttgtgcacatgtaccctaaaacttaaagtataataaaaaaaatttctattctcactccctctatggaaataaaaaagggtatcattcctctgctggtagatacttttttatgattttttcacaaacttgacaaagccttcagtgtaatggtattctaccatctaattggcagaacttagatcaactatttgtgagactaaatggtatttttgaccagtactttccattatgtcattggatcatgcagtggtttttcagagtactctgataggtgttataattttactcacaaaaacctcaagacttagatagggaaggtgctgttattgctgttttaaggagccagaaacacagaaatgcatgtgacacgggtgtttgataagacccaagaaaaaagaaagagcagagaccagtgtcctggatgactccttacaggctttcagttctatgaggtgggcatgggttggggtggggtctcatagtctgagtccaatgtggatgcccaaagggtttttaggaatccaagagactctaccagggttcaatggaaagagacttttatctaacaaataaagaaagattagggagagataaggaaacattatcaagagttggaaaatacttgaatgtaatctacgatacgagataggagatatccagaaaaatagagccagaaaagagaaacagagaggcaatatgaaaagtatatgtagcacatcactgaaggaggaagagacagtaagggagaggagatgttaagaagagaaagtccagaaagccgaaaagaaccatagatgccgtcatagagtaataaaaagatatcactagtagaaggggctatcacttaggctgggtgcagtgggtcacccctgtaatcccagcaatttgggaggccaaggcaggtggatcacttgaggtcaggagttcaaggccagccgggccaacatggcaaaaccccatctctactaaaaatacaaaaattagctggttgtggtcgagcacacctgtagtcccagctactcgggaggctgaaacaagagagttgcttgaacccgggatgtggaggttgcagtcagctgagatcacatcactgcactccagcctggtgacagagcaagattccatctcagaagaaaaaaagaaaaaataaggggccaccacttaatatcaaacgaaaggctgaatttattgttcagttaagggatagttgtgcttgtgggtcagtttctctgaacagagaacgtttgtggaagtgtggatctcggtgactggcggccttcaaaagtgagatttgttagtggttagctgacctttagtgaaagcagggtcactggagtgtggctgttactgactgtctgactttcagaagcatggggaagtcaatggttggctggctttcagaggcctgtgtactggccagaagctattgttgattaattgggatgattctggttgttattgaccatatggccaaacaataatgagttttcctagaagtgtagcaactttcaattatcagtttcccctttaggaaatctctcatctaaagctgcaggaggcaccatcaagtattttccccatccaagatgtcttttctggaagaggaccctggaaacaaaatcctaggattccccttcactgagtaggagttatagagttgctagattgagagtgttatccttgcaaaggatgacataagaaaaagtaatgatgttttacaatacgttaatggaatggcagacaactgttgaaagtttttaattagcagcagaattgtgctgcttgcaatactatcctatttattcccttttgctccaagaatactcaccagccacccttgtggctgcagcgtttatcccaagtaaatttgccatgaaatatcttgcttttattattattttcacatcactctaatatattgactttggaaacaaaagacattcttctaattatagcattctggttttagtagtggtatttccatttacaaaatacagtaattgttgatcactgaaaatgtcaaatcctggaaaacgtggctttcccacatgtgctgttaacattgttactgaacaattgttggccgaagattcatttgatgaatcatatatttttaaaatagatgattctgatatggttctgtttagaaataactccaagaacagtttatatattttattttcacattgaaaatcaatcatgtttgcttcagcctcaaagaatgtgtttacgtaaaattaaatgagtgcagcaagctgcacttttttttttttctaaacgggaacagagttaaagttgatccaagtacaaaatctccagaaccatggactaatgcagtcacctgcaattgctttgaggcaactaggatgagatgtggctactagcaatggctctttgatgtctgtcacgttttgaagtgatacccctagagcatggcctgtttgtttatttatttatttatttatttttatttttccgtaagttattggggtacaggttgtatctggttacatgggtaagttctttagtggtgatttgtgagattttggtgcacccatcacctgagcagtatacgctgcaccatatttgtagtcttctatccctcgcacccctcccactcttccctccaagtccccaaagtccattgcatcattcttacacctttgcgtcctcatagcttagctcccacgtatcagtgagaacatacagtgtttggttttcctttcctgagttacttcacttaggatgatagtctccaagccgggcacggtggctcacgcctgtagtcccagcactttgggaggctgagatggatggatcacctgaggtcaggagtttgagaccaacctggccaacatggcaaaaccccgcctccgctaaaaaaaaaaaaatacaaaaattagtcaggcatggtagtgtgtgcctgtaatcccagctactagcaggggctgaggcaggagaattgcttgaacccgggaggtggaggtggtaatgagctgagatcacaccactgcactccagcctgggtgacagaacgagactccatctcaaaaaaaaaaatagtctccaatctcatccaggtcactgcaaatgctgttaattcattcctttttatggctgcgtagtattccatcatatatatatatatatatatatataccacatacatacatatataccacagtttctttatccacttgttaattggtgggcatttgggttggttccacaattttgcaattgtgaattgtactgctataaacatgcatgtgcaagtatctttttcgaataatgacttcttttcctctggatagatacccagtagtgggattgctggatcaaatggtagttctatttttagttctttaaggaatctctacactgttttccatagcagctgtactagtttacattcccatcagcagtgtagaagtgttccctattcactgcatccatgccagcatctactgtttttgattttttgattatggccattcttaaggagtgaggtggtatcgcattgtggttttgatttgcatttccctgatcattggtgatgttgagcaattttttcatatgttcattggccatttgtatatcttcttttacgaactgtctattcatgtccttagcccactttttgatgggattgtttgtttttttcttactgatttgtttaagttcattgtagattatggatattagtcttttgtcagatgtatagattgtgaagattttctcccactctgtgggttgtctgtttactctgctgactgttccttttgctgtgcaaaagctcttaggtttaattaagtcccagctatttatctttgtttttctttcatttgcttttgggttcttggtcatgaaggccttgcctaagccaatgtttagaagggtttttctgatgttatcttccagaatttttatagtttcaggccttagatttaagtccttgatccatcttgagttgatttttgtataaggtgagagatgaggatccagtttcattctcctacatgtggcttgccaattatcccagcaccatttgttgaatagggtgtcctttccccactttatggtttgtttgctttgtcaaagatcagttggctgtaagtatttgggtttacttctgggttctctgttctgtttcattggtctacgtctatttttgtaccagtaccactctgttttggtgactatggccttatagtatagtttgaaatcatgtcgtgtgatgcctccagatttgttctttttgcttagtcttgctttggctttgtgggctcctttttggttccatatgaattttagaggtgttttttctaattctgtgaagaagatggtggtattttgatggggattgcattgaatttgtgattgcttttggcggtatgatcattttcacaatattgattctacccatccatgaagcatgggatgtattttcatttgttcaggttgtctatgatttctttcagcaatgttttgtagttttccttgtagaggtctttcgactccctggttaggtatattcctaagtttttgttgttgttgttgttgttgttttgcagctattgtaaaaggggttgagttcttgatttgattctctgcttggtcactgttggtatatagaaaagctactgatttgtgtacattaatcgtgtatccagaaagtttgctgaattcttttatcagttctaggagctttctgggggagtccttagggttttcaaggtatacagtcatatcatcagcaaacagtgagaatttgacttcctatttaccaatttggatgctctttatttctttctcttgtctgattgctctggctaggacttccagtactatgttgaagaggagtggcgagagtgggcatccttgtcttgtttcagttctcagagggaaagctttcaacatttccccattcagtattatgttggctatgggtttgtcataggtggcttttattaccttaaggtatgtctcttgtatgctgattttgctgagagttttaatcataaggagatgctggattttgttgaatgctttttctgcatctattgaaatgatcatgtgatttttgtttttaattctgtttatgtggtgtatcatatttattgacttgcatatgttaagccatccctgcatccctggtatgaaacctacttcatcgtcgtggattatctttttgatatgttgttggattcagttggcaagtattttgttaaggattttagcatctatgttcatcaaggataccagtctgtagttttcttttttggctatgtcctttcctggtgttggtattagggtgatgctggcttcacagaatgaattagggagggttccttctttctctatcttgtggaatagtgtcaaaaggattggtaccaattctttgactgtctggtagcattctgctgtgaatccgtctgatcctgaacttttttttgttggtaatgtttaaattaccatttcagtcttgctgcttgttactggtctgttcaaggtatctaattcttcctgatttacactaggagggttgtatttttgcaggaatttatccatctcttctatgttttctagtttatgtacataaaggtattcatagtaaccttgaatgatcttttgtatttcactggtgtcagttgtagtatttcctgtttcatttctcagtgacgttattcgggttttctctcctcttggttaatcttgccaatggtctatccattttatttaccttttcgaagaaccagcttttgtttcatttatcgtttgtattttttttatttcaatttcatttagttctgctctgatctttgttatttcctttcttctgctgggtttgggtttggttttggtttgttcttgtttctctagttccttcagatgtgaccttagattgtcagtttgtgctctttcagtctttctgatgtaggtgttcagggccatgaactttcctcttagcaccgcctttgctctatcccagaggttttgattgtcattcagtttgaagaattactgtcattcagcttgaataattttttaatttccatcttgatttcgtttttgacccaatgctcattcaggagcaggttatttaattttcatgtatttgcatggttttggaggtgccttttggagttgatttccagtcttattctactgtggtctgagagagtgcttgatataattccaattttcttaaatttattgaggctcgttttatggcctatcatatggtctatcttggagaaagttccatgcactgttaaatagaatgtatattctgtggttgttggatgaaatgttctatatatatctgttaaatccatttgttccaaggtatagtttaaacccattgtttcattgttgactttctttcttgatgacctgtctagtgctgtcagtggagtattgaagttctccactattattgtgttgctgtctatctcatttcttaggtctattagtaattattttataaatttgggagccccaatgttaggtgcatatatgtttagaattgtcgtattttcctgttggacaaggctttttaccgttgtataatgtccctctgtgtctcttttaactgctgttgccttaaagtttgttttgtctaatataagaatagctacccctgcttgcttttggtgtccttttgcaagaaatgcctgtttccacccctttactttaagtttatgcgagtccttatgtgctaggtgagtctcctgaaggcagcagatggttggtgagttcttatcggttctgtggttctgtatcttttaagtggagcatttaggccatttacattcaatgttagtattaaaatgtgaggtaccattgcattcattgtgctttttgttgcctgtgtactttttgtttttattttttaacttgtattttatttttgttttataggtcctgtgtgatttatgctttaaagaggttccgttttgatgtgtttctaggatttgtttcaatattgagagctccttttagcagttcttgtagtggtggcttggtaatggcgaattctctcagcatttgtttgtctgaaaaagactgtatctttccttcgtatatgatgcttagttttgctggatacagaagtcttgtctgataattgttttgtttgaagaggctgaagatagggccccagtccctcctgtcttatatggtttctgccaagaaatctgctgttaatctgataggttctcctttggaggttacctggtgcttctgtctcacagctctaaagattctttccttcgtcttaaatttggttaacctgatgacaatgtgcctaggcgaagatctttttatgatgaatttccctggtgttctttgtgcttcttgtatttggatgtctaggtctctagcaaggccagggaagttttctttgattattcccccaaatatgttttccaagcttttagaattctcttcttcctcaggaacaccgattattcttaggtttggtcatttaacataatcccagacttcttggaggctttgttcatattttcttattctttttactttatctttgttggattgggttaattcaaagaccttgtctttgagctctgaatttctttcttctactttttcaattctattgctgaggttttccagagcatttcacatttctaaaagtgtgtccaaagtttcctgaattttttattgattttctttaagctatctatttgcttgaatatttctcccttcacttcttgtatcatattttggatttccttgcattgggctttgcctttctctggtccctccctgattagcttaataactaccctcctgaattcttttttgggtaaatcagggatttcttcttggttcggatccattgctggtgaactagtgtgatttttggggtgtgttaaagagccttgttttgtcatattaccagggttggttttctggttccttctcatttgggtaggctctgtcagagggagggtctagggctgaaggttgttgttcagattcttttgtcccataggatgttcccttgatgtactattctcctcctttttctatggatgtggcttcctgtgagccaaactgcagtaattgttgtctcttttctgggtctagtgacccagtgagtctaccaggctccaggctggtactcggggttgtctgcacagagtcctgtgatgtgaaccatctatgggtctctcagctgtggataccagtgcctgttctgctggaggtgaagggggtgcaatggactccatgggggtcctttggtggtttaatgttctatttttgtgctggttggcctcttgccaggaggtggcactttccagagagcatcagctgtggtattatggggaggaaccggtgatgggccagccctagaattcctaaggttatatgccctttgtcttcagctgccagggtggataaggaagagccgtcaggtgggggaggggctaggcatgtctgagctaagactctcgttggacatgtcttgctgcagctgctgtgggggatgggggtgagattcccatgtcactggagttgtgtacctgggaggattatggctgcctctgctgagtcatgcaggttgtcagggaaatgggggaaagctggcagtcacaggtctcacccagctcccatgcaaaccaaagggccagactcactcccaccatgccccgccccaacagcccccagaccatttccaggcttgaaaacctgccccaggctatctgcctcccagctgcagaagaaaaaggcttggttcttccccacctgtggagtctgcacaccggatttgcgccctcacaagagttctgtccaggaggcgtctcaccctgttcaaattgttacaaagttcagctagagattggcttctccctgtgtagttttaccccctgctcctctcccattgggtccctgtggtgccaggcaggaatggccttctaggggacccagccacctcccaggccctttccgctgcttccccctacacctgtatttccctcatctcttcagattgactcagctccaggtaaagtcggaaacttctcccacaaacagaccttcagcttctccagtgggggtgtgtgttcgggagaggagggtctccttttcccacttctgcagttggggcactctcagttttacgggggggggcggtctcctgggtcctgcaggtgcaatctgcttccttcagagggtcatgttgcctaggctggtcacgaaccatggcctattttttatgtacgtataaaagaaaaggattatgataaaggagaaagggagacaggagacctgtctcctgataatgtgataatagaagattcagtgtgggtgactgatgaaggagtattttaaaatcgtgaagatctgttccatttctgtgttccatgagaatggccccaagatatttgggtcaaatgtagggaggcctggtatttcagaaaagattgacccccattgtcttcaagactcagttaatcctagaaatcctcttatctttccttcagtcattggtcttgggaaactctgaagacattgtaacatttctttatataatattatttcctcagccaatagattatgtctgagaaaatagcctagtttttgttttgtttcattttgtttgttttacaaacttggagtttttccttagaagttttatgtccatttttgcccaactcaatgaatagattaagaaatgtctagatctatagagtataatagaggtgacctatgcatcagatcagagaagatgcaggtatgagctttgtatcccttaggccgtatttaaaacttggaagaagatggttgtgttcgtttttcattgctgcatgacaaataaccacaaatgtaatggcttactacaatacccacttgttatctcacagtcctgccagcagaagtgtgggtgggctcaacttagttctctgcttagagtctccttaggctgaaattaagatgtcagcccagctgaagtcttggctgaaggctctgagaatcttgcaatcgagctcacccaggttgttgacataatccagttcctcgtggttgttgaaccgaggtcacagctttgttgctggttgttggtcacggaccactctcagctcctggaagccaatcatattccttaatacattgcccctccatcttgaagccagcaatcttgtgtggaatccttctcacactttgaatctctgacttcctcttctgctgctggctagagaaaactccctgctcttaaaaggctcataaggttaaaccagatccactctattagtctctcttaaggacagctctgccatatcacataaggtaattatggaagtaatatctcattatgttcacagtcctcaggattagggaaagaaatatttgggggccatcttagaattctgcctatcgtcaaggaaattcctagaaaataactgtccagataagccactgattttcccaagcaaataatatttatctttatcaagtgagacattaaacaaagctgaacataaatatattaaaaattttggctttaggtgagactgaagagattgtagtaatctggttaggaggtacagggaagtgaggtatacctattttgtttattgcttgcagacctcaaatcatccgtagtgtaggtatactaatggtcaggtcaactatacatagatcatgtgtcagagaattttccaggacttctaaaattagtccttcttctgaacctttaatctggtagttctatttgcagaatagatccctacctattacatttatagaggttttgttgaaaacagtgttcctcagataatggtctgaaagtaatagattactggttgagatgtggaaacattcagtgatttttttctcttcttttatagacctacttgtcaaatgtgttacttactttggacatgacaaaacctccccattgcaagccagagtcattttagggaaaattttgccagttattaagaaaagtacaagagttagaatcatgatgaaagtatacagaggaagtgaacattttgtcggggagattatggctttggcaaagacaatcccgtgacaaacagcaaagaggccactatatttcagtataagtgtgaatggtgtgttccacatgaatgaagcagaaactgaaaaggggacatatgattaattacatgattgtagttgactccagattacatactaaacaaaatgattttctttcacaaattgacaagacactaggtgccctcatgaaggttttgatgagggacccaagaaaaaatgtgaccgaacatctttgcacagtttggctactgtctaatggacccacatccattagttttaggggctggcttgaattgaggacttatcagaccttgaccaccagctgtttgctttggatcactgtcttctaacattcagaaagcacaggaaaatcaggaacaagcacacatgaaataagactttttgtttttttggtggggttttgctatgttgcccaggatagtctagaattcctgagctcaagccatctgcctgtaatatgacctattaacaggcataagccaccatgcctggcagagataagactttttaaaaatagacagaagaggccgggtgtggtggctcatgcctataatcccagcactttgggaggccgagatgagtggatcacctgaggtcaggagttcgagaccagcctggccaacatggagaaatcccctctctactaaaattacaaaaattagccaggcgtggtggcaggcacctgtaatcccagctactttgggaggctgagacaggagaatctcttgaacccaggaggcggaggttgcagtgagccgagattacgcggttgcactccagcctgggcgacaagagtgaaactctgtctaaaaaaaaaaaaaaagacaaaagaaaggtaacagtagatgaagtagtgaaacaagtaaataagtaaataagcacattaattgagaaaatgtttgctaagtggtgtacttccaactgaaaatatctaattgtatctaattgtatacccatgtttaaataagataaattcagaactaggagctcagtgaaacaagtcagagttcgagttgttgttgagaaagattcacttggcagtaggtcagaaaaatgacctgagctggacacagtggcctgagattcatgcctgtggttccaagggtcccacaggacactccccagcaagaatcttcaagataatctcggcaggaactccaatttttgaagggctaggctactactcataatctgaaactaaaagctgatttattcctagctaagcaaggcacctagtgggaggaggccctgtgcttgtaagacacagtctctatagaaaaggaaactgcagttttatagagagttttaggaagcatattgtgtagggactccagaccttcagaaacaggagtgtttatgagtaatttagcatttggccatcaatgcaggctttgtggagggggtgttgctgactggctgggcttcagatatgtagaactgccagtaatgggctcgctttcagaaatgtgactggggatataagtagtcagtggccaattgggatgagtttaaatagttgcttttcactattgtcaaagaacagtagtattttctggaatgataagagtttccttgctttattctcaggactacaagtacaaaaataaaagtagagaaaaggaggatgaggtgcataacatggggagagcgtggctctgttatgtgtcaaatgtgattattggagcaggtatatttttttccagagaacagttcatcttagctcagaatatcagtgtgcagtatagcagcactggaaactcttctgtggtcattgtctcaggatccttggacaataattttcttgtttctcattagtgtctagtgaactagaaaatcacccaatgaatgaagaaggagaatcagaagagcttgcttctagcctgctatatgataatgtaccaggtaattatgacttaaaaatagtgaaaacagaaacagagttctgataaagagaaaaaggaggagaaaaaatagacttaaaggaagagtcaaatataaggaggagcagtgaaaggagaagatttcagaggaaaaagtaaagaagggggagcaacaagggtgcagaaaatagagtcactgggtcaaactgaaagtcttcatgaatcacaattttggcccaggagcggagcaatcagcatatgaaaatgagaagtgttcctgtgtcatgtgtttctcagaagaggtgccaggaagcccagaagcaaggacggaaagtgatcaagcgtgtggcacaatgggtaaggctgtctgagggccgtgggatgggggtggctcagtgggccccacagacccccagtagggtggaggtaggtgctccagtctgtccagaattctattctccgcatttgcttgacctgagcctttggggagctgcagggaggcaagagatcgttataaagtactatttaagaggatggactctgttgattagacatagatgatgtcatagaagtatactctttgcaatggcacttatcttgtgtattgcattagtatattaagttacacccaatcttccatgaagcccaggataccccagtgaacttctgctggtagataatagtgtcactttgctacaacttagaaaggccacactcaaaagacaactaatcccggtacttaattgtcaggaggaaagactgcaggtctactcttcttagcccaacacgtatttttgatagaagacccagggcccatcctagactcctagttctcagttcggtgggtttttggttcccctagaagaaagagaggaatgattatccaagcatctgtataaactcaagccttctgtagtatacattgtcctaaaatctataacttttatttattaatttctgtttcctcaccaccacttgttattttccagatactgtggatattgcaaacaactccactttgggaaaacccaagaggaaaagaagtaagaataaataagaatttatttgcttttggtattacaaatacgtttttaatgccagagttttaattttgtcattgttactatttctgttattatttgtaatactgtggtagacagaaggatgacctccctaagatgtctacctcctaatccctggacctgtaatctgctatcttacatgacaaaagggactttacagatacaattaagctagagaccttgaaatggggagatgatcctgggttatggggtgggcacaatctaatcttgtaggccttaaagagtggaaaacttttcctggctgtggagaaaggaagatgtgactatggaagaatcatcagaaatatgtcatgttgcaggctttgaagatggaagaagggaccaaggaatatgggtgacctctaggagctgaaaagacaaggaaatagcttgtcctttccagctcccagaaaggaattactttagccagtgagacccatgtcacacttctcactgacataactggaagaaaatacatttgtgttgttttaaaccactaaattggtggtaatttgttatggcagcaattaagagtaatacagattttggtacttagaagtagggtgtggctattaacatattcctgaaagtgttggcatgcctttgggattgggcaatggacagaggctggaagaattttagattatgatcggaaaagcctatattgccttgagtagtccttagtagaaacatggatgctaaagactgtgctagtgaggactgagaaggaagtgaagaacatgggagagaaagcctatattgcgttagagaaaacctggatcatcatgagcagactgttagtaaaaatatggaggttaactgtgttactggtgagcactcagaaggacataagaaagatgtggaaagggcctccttattatatagtggtctgtcctgtactcatgtgaaaagcagaactttctggatctatagctaaggagatttccaaacacagtgatcatggtgtgttgtggtgtcttttgctaattatagtaaaatgcaagagggaagaggtatattgaaggaagagctgctaaacgaaaaagaatcaagtcttgatgatttagaaaattcccagcctatccaggtcaaaaaacatgataaaatgaggagattcactgtcagggacgtgtgcttggtagaaacaacaaagactttttgccagttccctgggaagtagtgaaaggtcagattatacattcacaaaaaaagttatttgaagagacgtagcatgtgactcataagtccctcagccatctcagcagaagtcaaaaatagatgtgcgttgctacaaaaagaataaaatacctaggaatacagctaattagggaggtgaaagatctctacaaggagaactaaaaaccactgttcaaagaaatgacagatgacacaaacaaatggaaaaacattccatgttcatggataggaagaatcaatatcattttaaaatggtcatactgcccaaagcaatttataaattcaatgctattgccattaagctaccattgacattcctcacataactagaaaatacgattttagaattcacatggaaccaaaaaagagcctgaatagcaaaggcaatcctaagcaaaaagaacaaagctggagatatcatgctacccaatttcaagccatactacagggctacattaactgatatggtttggctgtgtccccactcaaatctcatcttgaattgtatctcccacaattcccaagtattgtgggagggacccagtggcaggtaattgaatcataggggccggtttttcctgtgctattctcataatagtgaatatgtcttcatgagatctaatagttttataagggggagtttccctgcacaagctctctctctttgcctgccatcatccatgtaagacgtgacttgctcctccttgtcttccaccatgattgtgaggcttccccagccacatggaactgtaagtccattaaactctttttcctgtataaattacccagtcttgggtgtgtctttatcaacagtatgaaaacagactaatacagtaaccaaatcaagatggtactggtacaagaacagacacatagcccagtggaacagaaaagagaacccagaaataagaccaaacacctacaactaactgatctttgacaaacctgacaaaaacaagcaatgggaaaaggattccttattcagtaaatggtactgggataatcagctagccatatacagaaaattgaaactggaccccttccttacaccatatacaaaaattatctcaagacagattaaagaattaaatgtaaaacccaaaactataaaaaccctggaagatgacctaggcaataccattcaggacataggcatgggcaaagagttcatgacaaagatgccaaaagcaattgcaataaaagcaaaaattgaaaaatgggatctaattaaactaaagagtttctgcacagcaaaagaagctatcatcagagtaaacagacaacttacagaatgggagaaaatttttgcaaactatgcatctgacaaagatctaacatccagcatctgtaaggtacttaaacaaatttacaagaaaaacaaacagccccattaaaaagtgggcaaaggatatcaacagataacttttcaagagaagacatacatgcagccagcaatcatatgaaacaaagctcaacatcactgatgattagagaaatgcaaatcaaaaccaaaatgagataccatctcacaccagtcagaatgactattattaaaaggtctaaaaacaacagatactgacgaggttgtggagaaaaaggaatgcttatacacactgttgctgggagtgtaaactagttcaactattgtggaagacagtgtggcaattcctcaaagacctaaagacagaaataccatttgacccagcaatcctattactgagtatatacccaaaggaatataaatcattctattataaagacatatgcacatgtatgcttatctcagcactgttcacagtagcaaagacatggaatcaacctaaatgtccagcaatgatagactggataaagaaaatgtggttcatgtacaccatggagtactgtgcagccataaaaaaagaataagatcatgtgctttgcagggacatggatggagctggagagtattatccttagcaaactaatgcaggaacagaaaactgaacaccacatgttctcacttataagtggtaacgaaatgatgagaacacatgaacacctagaggagaacaacacacactgaagcctatcagaaggttcagaaggtgaagggttggaggagggagaggatcaggaaaaataactaataagtatgaggcttaatacctggatgatgaaataatctgtataacaaacacccatgacacatgtttagctttgtaacaaacctgcacatatatccttgaacttaaagtataaaaaaaaaaaaaaatagatgtgtgaattcctaggaaagatctgtagggaagcttcatgtctaatggaggaaatcagaaatccccatgatatatgcaggagatccataagactcttgagggttttgtaccaagagaaacaaagatttccatgtcctatctcctagaacctataatctgttactttacatggcagaagggactttgaagatgtaattaagttaaggatcttgagataagatcacatgggccactaaagtcagagaacatatccttctgtcgagagagggatgtgtgactatggaagaatggtcagagagaatagagctggatgtggagatggatgcaggggtccatcaactaaagaatgtgggcagccttccgaagctggaaaaggctcctctgtggcctccagaaaggagcaaagccctgcagacaccttgattgattttagccctgttaggtgcatgtcagatttccaaccctcagaattatgagaccacaaatctgtgatttttttgtcactaaatttatggtaatttattacagcagcaataccttttgtaagacaaaaaaaaaatttcaccctatacggttatattcaatcttctaaactaacaatttatattttttcaaattacttacacctttatgctttttttttctgattttaaaatacttgttccctgtaaactttgctgtacatatttctatatttttttctatgctttgttagcacatttagaattatgtgatatatctaaatgaatacatttaaactgttacatttctttttaaatcaatataacatgcactggatattataaacatttaatatcttgccaacttaactgtaaaaaaaagttttatttcattcctgttttaacttacattgctttcatttttggtgcagttgagcattcttcatttgttattggccatttttgtttcttctcctacgagtgcctggaacttatattttgccagtgtgttgtctttttttccccatgctttaggacaacaggaatacttatatatgatatatactaagggttgactacgtgtgttgtcatatttgatgttattcttttacgtttctttgtggtataggcacatctcgtttgattgcacttcactttattgtactttgaggatattgtgagttttacaaattaaatgtttgtgacaaccctgtgtcaaaaaaagtctgttggtgccctttttccaacagcatgtgctcactttgtgtctctgtcacattttggtaattctcgcaatatttcaaattttattattattcttcttcctgttatggtagtatgaacagtggtaacaatgatctttgatgttactattctaactgtctatggcaccacacactgtgttcgtataagatggcaaacctaataaatgttgtgtgtgtttcaactgcttcactgaccagctgttcccctgtctctctccctctctttgactttcctctttcctgagacaaaaaaatatggaaattaagtcaattaataatcctacaatggcctctaagggctcaagttaaaggaagcgtcacatgtgtctcactttaaataaaaagctagaaatggtgaggcttagttaggaagccatgtcaaaagctgagaggctgaaaactaggcctgttgcagcaaacaatcagccaagttatgaagtgctactccagtgaacatacgaataataagaaagtagaacagtcttatcgctgatatggagaaagtatgagtggtctggatagaagatccaaccagccacaacattcccttaagccaagccttaatccagagtgaggcctaaactctcctcaattctatgaaggctgaaagatgtgagaagctgcataagaaaagtttgtggctagctgatgttggttcctgaggttgaaggaaagaagctgtctcataacattaaagtgcaaggcgaagctgcaaatgctgatgtaaaagctgcagaaggttgtccagaagatctagccaagatcctagatgaagatggctacactaaacaacagttttacagtgtagactaaacggccttttattggaagaagatgccatctagaactgtcatagctagagaggagaagtcaatgcctggtttcaaagctccacagaacaggctgagtctcttgttagaagctaaggcagcaggtgactttcccttgaagccaatactcattcaccattctgaaaatcctagggcccttaagaattattctaagtctactctgcctatgctgtataagtaaaataaagcccagatcatagaacatctgtttacaacatggtttactgagtattttaaacccactgttgagacatactcctcagaaaaaaagattcctttcaaaatattactgttcattgacagtgcacctagtcatccaggagctctgatggagatgtacaaggtgattagcattatttccatgcctgctaacacaacgtccattctgcagcccatggatcaaaaagtaatttcaacttgcaagtcttaatatttaagaaacacatgttgtaatgctatagctgtctctatacataatgattcttctgatgaatcttggcaaagtcaattggaaaccttctggaaaggattcaccattttacatgccataataacattcatgatatatgagaggaggtcaaaatatcaacattaacaggaatttagaagaagttgattacaatcctcgtggatgactttgaagtgttcaacacatcagtgaagaagtaattgcaagtgtggcagaaatagccaagagaaccagaattagaagtggagcctgaagatgtgattgaattgctgcaatctcatgataaaccttgagtggacaaggagttgcttcttaagaatgagcaaagaaagcagtttcttgagatggaatttatacctggtgaaaatgctgtgaacattgttgaaatgacaacaaaggatttagaatatattagttgataaagcagcagcaagatttgagaggatctaccgtgataaaatgctactcaatagcattgcatgctacagagaaatctttcaggaagagccaatcaatttagcaaacttcattactgtcttattttaagaaatttccacagacacctcagccttcatcagtcaccaccctagtcagtcagtagccaccaacatccaggcaggactttccaccagcaaagagattatgacttactgaaggctcaagtgatcatgagcattacatttagcaataaagtatgtttaagatatgttcattttattttagacacaatgctattgcacacttaatataccacagtatagtgtaaacataactttcatatgcactgggaaaccaaaacatttgtgtgatttaccttattgcaatattcactttattgcagtggtctgaaaccaagtatttctaagatatgcctgtatctttatcccaaagaagcttgaaatttttatctgatcaaatctgtcagccttttcatttatggtttccaggttttatgtaaaatttgcaaatatattgtccacctcataatttagaaacatgtttacttacttctagaatatttggaatactttttaatgtttaaatctataacacacatggaattcatttattggtatatgatgtgagatggtaattaagagatataacactggtagtttttttcttcatgattcaaaatactattttatgtatgttttccagtatatacagaactgtgtcttatcacatttctttatccattcatctgttgatagagacttaggttgtttctatgtcttaactactgtgaattatgctgcaatgaacatgtggatgcagatacctctttaagatattggtctcatttcctataaattcataccccaaagtgagatttctggattgtatgtatttctgtttttaactttttgaggaacctccatactgttttccataatggctgtaccaatttacattcccacttagagcatacaagagttccttttccccacaacctcaccaacacttgttatctcctgcctttttgctaatagctatcctaataggtgtgaggtgatgtttcattatggttttgagttacaattctctcatgattagtaatgttgattgctttttttataatccattggccattatatgtcttctttgggaaaacatttattaagatcctttgcccatttttaaatcagattatgacatgcttttgttttgttttgtttttttgctattgagttatgtgagttccttatatatatttaggtagtaacccttatcaaatacatggtttgcaaatgttttctcctattccgtaggttgccttttcatttttacaattatttcatttgctgtacaaaagctttttagagtgatgtaggtccacttgtttatttttgcttttgttcctgtgcttctggtgtcatatctaaagaataattgcccagactaacctcaaggagcttttcctctgttttcttctaggaattttatggttttatatttgacatttaagcctttaatctattttgagttaatttttgtatatggtgtaagccaagcgtctaatttcattcttttgcttgtggatattcagttttcttaggaccatttattgaagagactgtcttttctccattatttattcttggcacccttgtcaagattaaatgccccttcttgacatctgtattcagcatagtgatgtaagtcctagtcagagcaagtaagaaagaaagaaaaggcatccaaattggaaagaagttaaattgtctctgtttgcaggtgacatgatcttctatgtagaaaaccctatagactccatcaaaaaactgttggaactaacaaatgaattagtaaggttgcagaattcaaagatcagttgtgtttctatgcactaacaatgaactatccaaaaaataaattaagaaaacaatcccatttacaatagcaacaaaaagaataaaataggaaccaagttaacaagaggtgaaatatttgcacactgaaaactatgacattgatgaaagaaattgaaaaatatacaaataaatggaaagatatctcatgttcatgaactggaagaatagtgttaaaatgtccatattacccaaagtgatctgaagagtcaatgaaatctctatcaaaatttaaatgacatttttcacagaaataggtaaaaggaatcctaaaatttgtattgaatcataaaagactccaaatagtcaaagtaattttgaaaaaaaaggaaacaaactggaggcatcatactgtctgattttaaactatgttacaaagcaagagtaatcaaaaccatatggtactgtcataaaaacagacataaaccaatgcaattgaatagggaacccagaaataaacactcatgcatgtatgttcaagtaatctttgataaggacaacaattacagaattttctttatgtagatgttccacgcatccacttttcttatctgctttattgagctgtaatttgcataaaacaaattcatcaccttaaggtataacctaatttgttttaacaaatgtgtgcagttatataaatacctccacaatcatgacatgtatcattttcatcaccccaaagtccacttgcattcttctctccattctctggttctcgacaacagctgatctgttttttgctagtttgttttttaaaagatggggcctcactgtgtgttccaggatgaccttaaactcctgggctcaagtaatcctcctgcctcagactcccaaataagtgggaatacaggcatataccacccctaaaccaaggtgtttttttttttaatttgcaacctaatgtgtggtcaatatttgtaaatgttttctgccccttgagaataatgtacatttgaactatttgttaggctctggcttcactccatatatatcttttttatcaagcacaactttcttgtttaaatttgtgtccatagtaatttaaattttatttgctccatcagatttgcatacaaatgtgttaaattcttgcacatggttgtatatttgccaattcctctttatcttgttgctttactttaaatattttgaggctatttatgatttgtaactttttaatggatgtttttcttttatcattatacagcattctgctttatccctgttaatgcttttgccgtaaaatctcttttgccaagtactaacattgttacacaaacttttatgattttttaaaaatattttccactcactttatgtgatgcccttttgttcagttttcttttatgtctcttgtaactgcacttaacttttgtagttttgtctgatattcctagcttcttaataggtaaatttcaatttgtttacatttattgagtttccagatgtatacggacctatatcttctgtggtattgttgaccattctctatttgtatctttcgtgtctccttcctgctttttaatggattggtataaaactatatattctcccctttctccctgctggtttggaaattaaagataaaatttctgtaagcttttaaattatgccccaatcccaaaagatgacaaggatcttatcatggtttcactacaaactgaacaccccatctctaccattttggctattgtttaatattttatttttaactataaattttgaaactattatcatttttacagttgatatttacttaatttaaaaaaatattttgtatactcaccattgttctttttctttggtttcactttttgtctagctgaagtaaattctttgttttttctagtgagtgatctctaagtggtaaactctgtaagtgttgggtgtacaactttttctttactttgatagaactttttagctacattaaaaattccaggtcgataatttatttcttctcagtatagtaaggtgattactatattatttcctggaatctatggtgtggctaataacaattattctcttattgtaactaactgtaacttcttggtaaatattctgtcctttctctctaaaagcttttattccccaaaatttaatcacgaaaattttaagcatacagaagacttgggagaattgtacactaaacatcaatatactttcacatagattcacaattaacattgtatcattcctgctttatcacttttctattcatctatgcatttctctatccactcactaaccggtggtcaagtttgaaacatttcaaggctgcagacgttagcactattccccctcaactacgtcagaatgtatatcattaagtagagttcaatgtatgtttagagttcttttgttaagataaaatttacaatgaaatgcacaagtattaagtgtaccatttgatgagttcttataactgcatttttctgcaccatcaaaattcttatcaagatacagaacatgatcatcaccctggaaaggttccttacgccctttctggtgtatctccacccactatccatcagggcaatcactactcttctttttaactatgataatttggcttttaaaaaactttatataaataaggttttatagcatattctctttagagtgggatttatttcacacagcatgtttttgagattcatccatattgttggatgtctcagtagtttgttctttttcattgctaagtagtgtacattatctggatataccaaattttgtttataattctcctattgatggacacctcgagttttttaagtttttgctattatgaaaactctgctgagtacattcttgtaggagtcttcctgttttttcgtatctcctgcataaatacctagaaacaaaattgccgggatatagagtagatgcatcagttctttcccccaggacccatgaaaaggatggtgcagagcaagcccaggtggatgctgcactcataggtgtgtgcagcagcagaagaatgcttcactgaggaaacctatgggattataaggggaccaatagcaaacctgcccaaaccttacctctgagggagacattatctttttagctggaatttaagcaattctcctctggggatattaagcaaatctcctctggggatcttaagcaaatctcttctggaggcatctcctctggaaaatttctaaggagggagatgttctctactttatactggtcagggatacatttgccctataatctggaggctacatgatctctagcttccaaggccgctttggtattcaaatatccttgaagtgatactctgaggcacgtagaaatgccatggagaatggcctcccagcaaattcaccccacatttttgcttctggcaaatttccccatgaagacaccaccccatcagccactctgattattcggacccatgggtccacatccattcaatttttttcctgcaacatttaacaaatcttgacccagtgcagcggctcactcatgttatcccagtactttgggaggccaatacaggaggatcacttgaggtcaggagttcaaaaaccagcctggacaacatagtgagaccccgtatctacacacacacacgtacccacacacatttcataaactgtaaacgatctaggtcccttatgagcacctctaaggtacaagtccttatgtgagggaggcaagttagtgcctggctttcatacaagaagcacaatcccaagggcacacgtggtgctcccagaagggaagtgtatacaattgttgggcttccctgagtgggatgtacattagtaagggagaaggtgaacagtgtctcttacgtggctcctggctggctgtaagccttggggttcccagttctgtttatccttgatttgtttgtgtgtggctggggagagggtgggcatatgggggactgcttgaggacagtctgtccaatctgtcctatttgtccatgtcaccaaccaggtggcagtcccccctaacaaatgactgagaatagtggtggagactatgtctagagggttctgtgtgggacctcagaagctgggcccagcccctgccatctcatggctggtgcagagaggctgactcagcattctcagaggcgggagcgctggagtagtgtgttttccttctggacaaagcatccttgggttcttctgaaagacagatatcaccaatgctcctgttttctcccatacctctttagatgtctggatttttgctcttgcttcactgctgcaaaatctgctataccattccagtggctgtaccttcatcttttgccctaattatctccttttctcacttagactttccatctacaaaattagatagaagtagaggaaaagcattttataaaatgtgcctggagttaaatctgaatccctaggcactttgaaggccatagccaccaggctggtaggggaaagaatgaggcatcatccctaggaatgaccagggtcacaacagaatcctgaattttcaagataggtctacagaacactcgcaatccccaccacttttgtcctggtcactatccaggaaggagatgatccctttctggagattgctcccttcaatgagcctactgccctcccatagtgtgcggacaggaggagatgagggacagtcagaaaatcagtgcactgtggagtcacttttctgataaagggcacgtcagactgcaaatggcccagatggccagtttgaggacactgatgagtttctggggtcaccatagcgttcctggagtcagctgctctgcagcctgaaggagggctgacagtgtggaggcagtgctgagattatttaaggaaactatatagaaattctataatgattatgtaattacataatgaaaactctccatatcagagttcagaatatctcccaatttccaacacagaatattatccataacaccatcaacctcaaggaggatgtcctctcattgcacatttgaatttacacaacaaacacttgaaaaagcaacatgaaacagcagttatcattcactttaaggtgccagcaagagttaattttccattaaaaattttgttcaaaggaacgtcatctcctgtagtctctcccaagcccatggcccaaggctcatgcagaggtaaaatataactctgtactcaacctccacgctgctacactgatcataaagtattttgccccattcctgcggaccaaagtatgaaaaaaaatctttaatactattggcatataaaactcagagaattatatttatacctctgcataattaactttattctctttggtttgaaggaaaaaagagggggcatggctggagcagaatgagaatgagaaggcaggaaaacagccaacaaaatggtaagcaggcaaagtgaagtagttacagcttttgagtttattagggcactgtccattgtattctggaaggcctgcagttccccagagccagagttctatacctcctgtatccattaggatgtagactaacaggctgtgacaaagaggcctgagaatgcaatggcttcaacaaaatggtttctaatgcatgtaatagtccagaggcccacagttaatagggaggtgttatcatcctcagtatgactttctttcctagctcaaagtatttttattaatttggaaagacattcctaagagggctaaatgaagaaatcagggtgtatgtgtatgtgtgcacaatagtaaacatacatatatgtataaccatattttatgtgaaattcatacttgtgaagtatatttttatgtatcctgatatacacatatgtaattatttatctgtacatataaaaagacataaatatagaaaaatagatggcagttcattcataaaaatatatgcagtggttacatttggtcagtgtaatagaggtgatgtttatatatttttatctgtggtttttaaatgtatgtgtatatattaaaatattataaatcttcaacatttttaatgaaaaagtgttattcaaaaagtaacatatgcaaaaagaaaagactaggagaatatttttgcacaaatcatcatctggagatagccatcctcatctgtggctatctccaatggtgatgtttcatatcattttattttctgaatttcctgtaaatatatttattctttataatcaggcccctgaaattttcaaaatttattttagccatggtctgaggacttccattcttctagacgatgaaggctaagtctcattttctaaatgattgtcaattttgaatcagtggatctaaatagtaagattttagagtcctattgaaagttattaatttttaccaatcttgccagttgatgtggcttcctggttggtggatgtgacagctttgtttggaaagaaaaaaaagtggctgcgtgcattttaagaatggctgttttcaaattgaaaatttgtttggactcaatcattataacattttcatttaagtctgaatcattataacattctcatttaagtctgtgtgtatgtagacaaattctaagagacttcaatgtgcaattaaatcctgtgtgtaacttaaaagtcgacactcccaaaagcaaaaaatgctctggacacctgctcgaggggatccagaatgagacccaggactccctcacttgcgtttgttcctgcctgacagctgttgttctgcccagttctattaatacattttcccctgcctatccccagataatagcaaagccgacggccaggtggtctccagtgaaaagaaggcgaacgtgaatctgaaagacctttccaagattaggggtaagataaagtttgtccgctttccctttgccctacaggtcaatacaaattttactgaggtattgacgagcctagatccaccttaattgtttactcatcaagcttagtcaattggagagcagtgaaatctaaaagagcaaactcattataagcaggggttgtaagttgattgtattcatatcatagatcttatctgcccagtttctaaaatagttttcctctgtgttttatctcattttcctggaaattcctttgcctcaaatcattgttttattaaaatggctggacctggtaaattgtaagccgaatacaggtttattctctcactgccctttcaagtcctcctcctagatgagttctttcctgtcttgagcaagctctgtcgctttcttgttcccttttaaaaacagtaagagtctcatttcagtagttgggacctttctgacctagtattaaactacaatgtcttccccagtttaaagcaccttcgcttcttcagcctaggcaagccttagtctggaacacatatagttgggggtgacatggtcagtgtcttctcttattctgtcttggccctacccccactccatagctgttggcttggtcccatccaggattggggaggtgagagagatgggtgagatcagagtgtggaagtgtcttgcctgacaggtgcagccgtgaaatgacattgcaagtggttgatgcacaatcactagctctttcttccatgagatgctttcatcaagtccactgcaagggaaggggaggggtcaggcatcacagcttgacttattttgaaagaaatagagctttacttctacaacctggatgtgagtgaagggctgaacctggcataatcagttccaccaactctttctaaggttacatatgtggcctggtgcattgtcctaggatgcgggtgctcaactcaacctacttgcttgggactttctcaattttcccaatgaaactctcatttccaagccataggtccactttgggtctgattggtcctttttactttggtggcctaatatgctcatgatatgcttagaacttatagtacttaggaatgcataggctggaaaatatttcctcatgggcctacatgaccctgatcagcacccccagatggtggtcattggatggtggacatccagcacaagaaggaaggaacattttgctttcctgccttggaaaataaaacacatttggacaatagtaaacattgagatgcccattcacagccaattaacatgcacttgggagaatatcatcggctgcagtgtctgccatgtcaatccttaattactatttggaatgaaggctgcggaaatctcaattctacccattcctcatggttaaccttcttctgattagtttcttagatcctaatatttattttgtccaaagccatgtggacaaagccctggtcacatttactattactttcagcacgagggtacaaatatcttcccccaatgtgacatgtgcagcatacatctcacctatgggacacctaatagggtttcccttaagtcacagaactgtcatttatttgtgtctctgctgagagaaactgaaacgccttcacttaattttgtagttttgtctcaattttctctgaatattttagtttctgtaatgacggtaatcatcattttgatcttgcaaagattaaataaattaatggatatgtaagtgtttaatgtgtattatatgtcatatatatttcaaatatatatgtttggaatgaaatatgaaatgaaccttcaaaatatggaatgaagcatttatacttttgcttgagatatacgtgaaatactgatttcaattagtttttttcctaacataagaataggaaaatgaaatataaagtgaacctaacattagctatctaattcttcataccttaaaggctagggtttaaatctttttatttatacattaaacaggcttttggaaagttacatttaaatggaatttttgaaaagctgtaatatgtgtaatacagctgctcataaatgactgtgattatattattctactttctcagggagaaagagaggcaaacctggaacccgcttcactcagagtgacagagctgcacagaaaagagtccgatcaagaggtaaaaaagaaaacaggaatgaactttcaataactaaacatctaatttcctgtgcggtacactgtactttcagtaataaacccatttccttaattgttttatgaagctgtactaactagtgagaaatgtatcctatttagtcattttccaaaatgtgtcaaggaaagaaggaagtaagttggtgatggatctacaaccagatcccaggggcccaggggccactaaagtgctactttcactgaaatgataaatttcaaggctggagatagttcattgccgtataaagggtataacccataagtgatttaactgaccttcctctgactactcagaaagccacaggttgcacactaagggtgaaaaagagttgtggttagagatctgtgtcctaagactttctttttctttgtgtgggcttaggctgatcatttgactttctttgtctcagttttctcatctggaaagcaagagcatgaattaggccaactatctttctttctttctttctttctttctttctttctttctttctttctttctttctttctttctttctttttttattctttaagttctgagatacacgtgtagaatgtgcaggttctacaacccatcatctacattaggtatttctcctaatgctatccttcccctaacccccaaatcccgacaggccccggtgtgtgatgttctgtccctgtgtccatgtgtccttattgttcgacttccacttatgagtgagagcatgtgatgtttggttttctgttcctgtgttagtttgcccagaatgatggtttccagcttcatccatgtccctgtaaaggacaggaactcattctttttcatggctgcatagtatttcatggtgtatatgtgccacattttctttatccagtctatcattgatggacatttgggctggttcctagtctttgctattgtgaacactgctgcaataaacacacgtgtgtgtgtctttatagtagactgatttataatcctttgggtatatatccagtaatgggactgctgggtcaaatggtatttctggttctagatccttgaggaatcgccacactgtcttccataacggttgaactaatttacactgcaaccaacagtgttaaagcttacctatttctccacatcctcttcagcatctgttgtttcctgactttttaatgattgccattctaactggcgtgagatggtatctcattgtggttttgatttgcatttctctaatgaccagtgatgatgagcttttattcatgtttgttggccagataagtgtcttcttttaagaagtgtctgttcatatcctttgcccactttttgatggggttgtttttttcttgtaaatttgttttaagtttcttgtagattctggatattagccctttgtcagatagatagactgcaaaaattttctttcattctgtaggtaggccaaccatctttcttattagtccatcctggtcctaatagtctgcctttctaaaaatttgtctcaggaccaaggacagctcccccgtttatcatgacttctgttgcccaggctggagtgcagtggtgtgatctcactgcagactccacctcccaggatccagcaattctcctgacttagcctcccaagtagctgggattacaggtgggcaccaccatacctggctaatttttgtatttttggtagagatggagtttcgccatgttggccaggctggtctcgaactcctgacgtcaagtgatccacctgccttgccctcccaaagtgctgagattacaggtgtgagccaccacgcctggccctacacctttggttggaagggaaggattcactgctcaccctcctggagttcctttgaagacctttcacccccttctctgtgaaatcaggtctccagtcccccacctgcaaccccatataattttcagattattctagagctccctgagctcttctcttagctacggggaaagcagacaggacagagaaatgaactaaaggagagaacaaaaatagaaggcagacatcatctccattaggttatcccatcattaccctctccctgcttgccccgtcagtgctcaaatggggagactgaatatgatctctggagtcatctaaggctacccacctgcagcaaaacagcatagctggagagcttctgtcagaacagtgacagcaactgtgtttcattgtcatataagaatcagtggagcttacgagattaggagttaaaccagttttactgaagtctaatttctctgctaaagcattctattttgtatgaaatttgaaaggtgaaattggggtagacattctgtaattatgtatcaaaaatgccacttggaagaaagactttgaaactctagagggttttggaatagaatttcctaagtatccctcgtgtctttataggaattacctcagtagggaggggggacgtgcctttgcaaagtgagacagaatgaagaaatcctctctttcagcttcaagaaagcacaaagatgaaactgtggattttaaggctcctttgcttccagtgacctgtggtggggtgaagggaattttacataagaagaaattgcagcaaggtaggttttatggtcttctttaatttgcagctcctatctgaaggcatcacaagtagtggggaattatcatgtgaattacacatcattcaaggagtttggtcccagtttggcttgagggaaggaggaagggatttctaagatgacgtttacagactttaagaaatcgcaaccaccagatgctcacttgcacatggaatgtccagagggtgcccaaagaaccaaagagaaggcaggaacatcaattcacagatgaaaaatgtcacgtattttactttgaatcagacagaaaaatgaagaggccctcaacctcgaccttcatattctctctcccttctggagtgccatcaccagggcagggtgcttggtatagggagatgatcacagaatttgggatcagaaagcctgagttccagcctttgctgtttcaggagtgactgttccattctgagtagagaagggaacctttctgaacctgaaatgtctcatccaagagagggaacaataatgaaaaacctgcctcatgatgtagctgtgagaattaatttgcatattgatgtaaaatatgtaaatttacatgtttttactgtaaattataaaactttgccaaaaaatgtctattagaatggccatcatctcagaccaatcttaatatgactctttggatgtcaattaacagaaatgtttgcattgtgactatttctaaacagctttactgagatatagttcacatatcatacaactcaccacttagagtgtacaaatcaacttttttttgtatagtcacagaattgtacagccatcattatcctctaattttggaacaatttgttccccactgaaagaaaagcccatgtcaattagcagtcagtgcctattcccacctaagcagccactaatctattttctgctctataagtttgcctactgtaggctttctagaagtggaatcctataatacatgccctttcctgactgccttcattcactaattgtgatattttcaaagttcatccacaatgaatgtattagtatttcatttcttttattgacaaataatatatgtcattgtatagatataccacactttgtttataaactcatcatttggaactatttccactctttggctattataaataatgctgttctgaacatttgtgtaacaagttttgtgtgaacatatttcagttcttttgggtatatagtcaagagaggaatgactacatcgtatggtaattctatgtttaatttattgaggaatcaccaaagtgtttccacagtggctgcactattctgtattcctaccagcaatgtatgaaggctccaatttctctacatgctcaccaactttgttatcgtctgtctgtctttttttattacagtcatactgtcatcctagtgggtatgacatggtatctcattttggttttggtttgtgtttccttaatggctaatggtgttgagcatgtgactatcttttacatataaattaaattttttatcagataacatttcacaattagttttttaatatcagctacctgtgattgcagggatatgaaaatttctgtttaataatgccactagactgcataaaacatgttataattgagagtgcagatgttgcgggagtgaccccctgagccacagggcacccatctgagaccgtagccccaagttgaggattctgcctccaacattgccctcacagccatctggagactcaggcctggcctctacttccaaatttgaatagcaagttggagtcctctcatctttcagaatcacttgcttttccttctgtaagtgcttttgaaatgcttaaaaggttgctcttgatgataaccatcactctcctcatggatgaaggtcaaagaaatgtgcacccccaccaggaaatatccttagaggggattttcaggctggatttggggcctctgtagtctgagagggaaggccagactctcctgctattgatctgcatcacaaattgggtggctctagatccagtgtggtgagtggccatagtctgtgcgctgggaaaaaagagggctcaggatcaagttaccctggtcttacaggaatcttggtgaagtgtatacagactgaggatggaaaatggttcacccccacggaatttgaaatcaaaggaggccatgcaagatcaaagaactggaggctgagtgtgcgctgtggcgggtggcccctacgatggctgatggaggtattccaatgacaaggggccaggcctgtgttccttcttgttccctaataatgaggagactgtttattcaccaaatatttgttaggttatagctaaagccttgatgccagtgggtttatcctctcactcaggagagagggaccccacattcataaccacactacagtgcaacacattgacgttgtaccaggggctccgtcaggatagactcagcagcttggaggaggaaagggtcattctgactagggtgcatgcagacagctttgtgcactgaaagaaagaagggagttgacagtcaagcagtggaagaagacacttcagagaaagaatggcataaaagccagaatgccatgaaaaccagaaccatggcaaaagtagctctgtggatttaggtagcacaggttgtgtgcaattaggtataatttaacaattggggcaggttgtgcagggctttaatgccaggctaaggagtttaaacctgtaattgagataacaaggattcagtgaaatcttctaggattggaaatgacatttaaaacaatattttattttatttatttatttttaggagacagtctcactctgttgcccaagcaggagtgcagtggctcaatctcggctcactgcaacctccacctcccagattcaagtgattcttgtgcctcagcctctcgagtagctggaactacggttgtgcaccaccatgccaggctaatttttgtatttttagtagaaatggggttttgtcacgttggccaggctgatctcgaattcctggcgtcaagcgggaggcctcctcggcctcccaaaatgctggggttacaggcgacagccaccccgccccgccataaaacagtattttagacagccacggggctttccccctagcaaacctatactcaatctagaatgctcagttcaagtgttaccccttcctgaatgttcattgattgacctgtcatgggccattgaccaggccttcccagggctcctgagccctctactaaggcctttcattcactgttttatatttattattttgtgagtgctttttgtccgtagactcctttaggttgtcccatcttcatgtgcccaagattgatcagaattactgatacccagtagcaggcaatgtgtgtgctgcttggatagctctggtgtaaggactccagctggagtggcactggtgggactggaagagaggtgataggtggtatgagattgtgaaggaaaacctcttaggacttaggaaagaagcacaagagaagggaaaatggtcctgaagatgcttttctggcttctattgattgaagtctagaagaagcacaggtgaagacagggagatggtttctcattagacaccttggatttgagctggcagtggaacactcaggtagaaatatttgggaggaggttggaaatgccagactcacaaaacggaaacacaggctgaccatatacctgaatctttttgtctttcagaatggatttctgcctgatcctccaagaatacgttacaggaaaaaaaaggtgattattacatagctttatacagcttcttgtcacataactgatttagcatgcacaaaatcttattttatggggtctgaaattgggtaggaataattaagctttcaccttcttcactactcaccttaaaatactttttgcatgtattccttcagagtcgctaatttgaacactaaatgtatataaagctaggtcctgtttggattcaaccatttcatatgaagatgataaggagccatcagaatatacgtcctgggagtgttttagcaatagatgcagatgtcttaagagtgtccaagttggaaagtcaagcatggtcatgggatacataaaaatatttcatagtaaggtgagaggatcaccttcaactcaaaattcagatttttttcattgaagttactattttctaactttagtgaaataggatggagcagatatttgctcacatccatttgagacatgcatgaaaccatatatcatttaatgaaatcggcaacaaaaagaatatttcttttctgatccttcacattctctttcaccttccaaaaaaatgtacacacagacacacagaatgtcttctcaaggtgaaattatttcctgttaccacaatggtgccactgaggaggaagatctccagaggcaaatgtattttataggaggggctgaccaggaaaatcttttatgttgatgccacctctttggctctaccagagggactgtgcagacctgctttttatctgtgaaagtgatttttccctctcttgaagaatgcaacaaacaaataggttaagtgcagtgtatattcaggacaaggtgatggtttttccaagactgggtatgaatgagaacctgaggagggggaagagaaaaatgtcatccttatgcacttcaggtagaaatacgcattcaagacattcacagacttctaaaacagctcacacatagctagccactaagcttcatattccactgggaacctgagatgcaggcctttacattatctgatatactggctgatttgaattttcagccactgagacatttcatccactgggtttcccgaagggaaactatgatgtcacctattcagtgactacactaaagaccagcatctctacctttcaccgggtgccaagagtaactgagtctggatgacccaaatgagctggcaatttccgactaaccgactctccctctattctggggtgcaaaacttagcagcgacaaggtgcagttgcctctatatgttgtgtctcctcatgggggagaacagaaggtcccttaagtggcagatccaggatccattatgaactccatgggtcctctgtgcctctcagagcttctcttacttgcagagccatttggctttaggaaatttcagtgtcactatgagtgccacatgatagcatctctgctcatgacaagggccacatagaccttttggtggcacctgagatattgtaaagcaatctgatatactcacccagaataattgttgtatgctaatgtttgcttaagagcctccagtgatttctaagtgaatcaacattcatttattcacccactcaacatataattatcaagcacacactaaatgccaatggacattacagaagattgacctcaaaaattatttcaggccaaacatggtcacttgagcctataatgccagcattttgagaggctgagatgggagaatcattggagcccaggaatttgagaccaacctgagcaacatagtgagataccatctctaccaaaaaaaaaaaaaaattacccagacattgtggtgtacacctgtagtcccacctactcaggagactgaggtgggaagatcacttgagcctgaaaggtcaaagctgtactgggctgtgatttcatcatagcactccagcctaggtgactgagtgagactctgtctcaaaaaataaaaaaagttttaaatttattgtcaacatggatgaattacaaatggggtggggtgggagattctagaccagttggagaggcattcagtgacaaggtcatctctcaggtgcttgtcctttgaatcacacttgtttatggcctctgtgccctgggctacagacaaaagctgaggctgcttgtatcccagaagggaaggatgccaagtcatgccatggatatccaaaagcaatctaaataaatgtagtgggttacctcttaaaagtcagtcaacctggcatcttcttgtgatttggatagaagggagagggagagagtttcaggaaaaagagctgcagcacagaggaccttggaggcattttatcaccagggctgtgtccctaggggagctgcagaaagcagtgctcttcttgtctgggacacttgcatggcctctaggactctgagtcctgtggtcccaggaggctgtgggagataagtcctcagcctgattattattgaggctcctctgggtgggatgacacaaaggccaagtttaggaaatatgcctgagggccccttgaagtaagaggacaagtagagcttctctgacttggcctgtgcaaactaggtccagactccctgcagggaatgggacttgcattgggattaacggtagtacttgcacactttttattctttcagtagatatataggtccaaaaaatcagatatgaggtaaagggaagactgtttacaaaaataaaactttagacaaaataaaatttatagcatttatttgagcaaagagcaattcatgaattgggcagcactcagaacaaggagaggttcagagaactctgctgtagcagcccagacagtgaggccaacacaggagtaagacagagaaactatatttaatgggttatcatagaaagatgataattagaggttagatggcagattctagttggtaaaatctctagtttcattttactgtttacatcaggtttcagtttgcttacttagaaacttaaaccactggagccaccccagcctactggccttctctcttcccaattattttttaacaactggttcctgaatcccttcaaagaatactatttaaatttaaataagtgatagatggaaacaatgcattcaatatcataaatcaatctttctgttttttcaacagagaatactgaagtctcaaaacaatagctcagttgacccttgtgtaagtacaaattctgaactacgacccccagaatattccactcctttctccaggcatatgttctgtgtcatgactgctgttgcctgaatcatgttcagtctcagctggagtatgtggctgtgtgaattcagttgcatcacccaagccaggtagatgtgcctgggccttggatgtctcattatgaaagcaccctttccatctgtttcagtagaaaccttccaatgtccttatttcccctggaaagtgagtatgggaggctgagctccagaccactgaggtctcttgagacagagcctgaagtggtaatgggtagggctggcctggtgattagggggaaggaacaaatgtgagaggataacagcattttcaagtaagtggtgtggatgaaagggaaagtcctaaaaatgcactccaaggtgcaggtagagttgaagatggtcataagcatcagccagaaggaacagaccaggccaagctattatgttccaggtgttgatcctgtcattagccctgtaaaggagtacatacaaggcaaggggtcctttacagagctcatttggatggtttcagggaagccattagggtgctgagctggttaggactgaaaccatcacgacctagcaaatcctgaggcattttaactcaactgcttatctggtgctcagtactatgcaaactttctgatgccacaggccccatccattctctgcttgctatatgactgcctgctttggattctgccaaaatcatggatgagtcccttctctaaatgaaatcgtgatttgattcttttcattgcagtgagatgtctgttttaggccgggtcaccttcttgcacaactctgggggacagcactcacatagaatatcatgcaatagcactgacacatgatacttaacagaggagggatgctcaaatagttttatacacaccttacctccaaagcagtcctccaatcagatttaggtcttttccacactgattttgatgtctggccaactgagggacttttcaataattaaaacagccctggaagtcagtgtttgtgtggctgattttggatggactaggcatggaggtttaggtttcacagctcacagccagatatgtgtggggagaagagggaaacagttccagcaaaggtatggtcacccctgttaataatttttccaaggccagtaacaacattgacttataatatccccatgcgtccataaccagactttgcttaggttgaatctcatattgtcctgcagcctggaatcacttgaagagctttaaaaaaatattgtttcctggatcccacttctggggaaattataatttaatcattctggactatgtatgactggaacattaggatttgtttaagatccccagatgtactaattctgatacatagaattgcctattctgtcacctaaagaagaataccagtgcctgtgcctcaaccctgacccagtgattcagaatctctggtgttgggttcaggacattagcattttatatactctcctgagaggagtctaatgtacagccaggccaacaaccaaagaaccagagaaatcaaatctcttcttgaaaagatgggtttggagaacaaaatggcagataggaggcaggactaacttgctcctcctactcagatggacagaacagcgtgttgagactcacactgtgaacttttgctccaagaaccactgcaggaatataccagcaaaactgaaggaagtcacacaccctttaaaagaagtggcttgccaccgcaaactctgggagatagccaaaaaaccgtgagtcctcaaagtgtgagagggaaaaagtccacctctgaacacatatcctcactggggaacctggaaatccagatcacaggagaaggatttcacctaacctagagctgaaatgaatttagaaagctgggtgaaatataaaagtagaataagcagcaggaagaggtgccttccccaaggatccctataagcatttcagtccccagggaagccatttctgactttatctcacagtccttggggagggcagccagtacaatttgcagagagccatggggagaaggaggcttccagctgaactttgtaataattttaaccaagcacaaattttcctggtcagaatctgggggtgtgaacctgaagtacagatataagtgcagaagccatggcaggcagggaggggtgagatctgaaagccctgcttgctttctcaatgggggtgcttcttcctggggcaagatcttagctccaggcaaaggatgcctggatataaatttggctctgttggctgttgggcaccacagcgggagtgagactggccttgctggctgcctgggtgctgggtgaagcctgtcactgccggcttcccttacttatctggtgaactgtatgaagcagcagaggcaggcataatcccctctggaacataaatccattggcctgcaagccacccctcatcccccacagtggccacagcaagccctgtctgagaatctgagctcagacacacctaaccctgcccccagctgatggtctttctctacctgcccctgtagctgaagacaaaagacaggggctcatgggagctctatgacctcacccatcacctgagaaaaccgaatacttatccagtgaacttaggtcaagcttgtatccccctcatattacttgcagctgatggtctcttgaaagtgccacctcctcgccgaaggtcagccaactcaagtcattacagacactcatacgagaaccaccttgctccaggaaggagaaaacaacaactaattatactgcctgtaacatcctggctaaccaaagatcctgagtctgtccctgtaacaacctcactgctagcataaccaacatttgagaaaaccagtgtactaaacaaaactacaatcaaggactctcacagaatccacttcactcccctgctacctccactggagcacgtgctggtacccatgactgggagaactgaagacagatcacatcacaggaccctttgcagatactccccagtaccagcccagaacccagtagctcttctgggtggctagacccagaagagcaataacaatcacagcagtttggctctcgggaagcccatccctaggggaagggggagaacaccacattaagggatcaccctgtggaacaagagaatctgaacagcagctcttgagtttcagatctttcctctaacgtagtctacccaagtgagaaggaaccagaaaaacaattctgataatgacaaaacaaagttctataacacccccaaaagatcacgttagctcaccagcaatggatccaaaccaagaagaaatctctgaattgccagaaaaagaattcagaaggtcaattattcagctactcaaggagacaccagataaaggtgtaaaccaacttaaaggaattaaaataataatacaggatatggatgaaaaagtctccagagaaatagatatcataaataaaaatcaatcacaacttctggaagtgaaagacatacttagagaaatacaaaatacactggcaagtttcaacaatagactagaacaagtagaagaatgaactacagaactcgaagacaaggctctggaattaacccaatccaacaagaaaaaagaactttttaaaaatgaacaaagcctccacgaagtttaggattatgataaatgaccaaacctaagaataatttgtgttcctcagcaagaaatctaaaagtttggaaaacatattcgcgggaataatcaaagaaaatgttgctggcctttctagagatttagacatccaaatacaagaagctcaaagaacatctggaaaattcatcacaaaaagataatcactcaggcagagtcatcaggttatctaaagttaagatgaaggaaagaatctatgaagcaaaaacatcagctaaactacaaaggaaaacttatctaatgattaacagcagacttctcagcagaaaccctacaagctagaaggctttgggatcctatctttagcctccttaaacaaaataattatcagccaagaattttgtatccaagaaactaagcttcataaatgaaggaaagataaagtctttttcagacaaacaaatgctgagagaattcaccactaccaagccagtgctacaagaactgctaaaaggagttctaaatcttaaaacaatatatcaaaatataccaaaatagaaccccctaaagcataaatatcacaggcctattaaaaaataacacaatgaaaaaaataaggtattcaggcaacagctagcatgatgaatagaatagtacctcacatctcaatactaatgttgaatgtaaatgacctaaattcttcacttaaaagatacagaatggcagaatggataggaatttaccaggcacctgctgtcttcaagagactcacctaacacataaggactcacataaacttaaggtaaaggggtagaaaaagatatgccatgcaaatggacaccaaaagcgagcaggagtaggtattcttacatcatacaaaacagactttaaagcaacaacagttaaaaaagacaaagagcgaccttatataatgataaaaggactagtccaacaggaaactagcacaatcctaaatatgcacctaactgtggagttcccaaatttacaaaacaattactcactttgggaggccgaggtgggtggatcacaaggtcaggagatcaagaccatcctggctaatgcagtgaaaccccatctctactaaaaatacaaaaaaaaaaaaaaattagctgggcgtggtggcaggcacctgtactcccagctactcaggaagctgaggcaggagaatggcatgaacccaggaggcagagcttgcactgagccaagattgcaccactgtactccagcctgggcaacagagtgagactccatctcagaaacaaaaacaaaaacaatttctactagacctaagaaatgagatagatggcaacagaatgatactgggggacttcagtactctgctgacagcactagacaggtcatcaagacagaaagtcaaccaagaaacaatggacttaaactgtacactagaacaaatggacttaacagatattacagaacattctacccaacaactgcagaacatacattcttttcatcagtacctggaacattctccaagatagaccatatcataggccacataacaagtctcaacaaatttaagaaaattgaaattatagcaagtactctctcagaccacagtggaataaaattggaaatcagctccaaaaggaaccctcaaaaccaggcacgtacatggaaattaaataatcttctcctgaatgatcattgggtccacaatgaaatcaagatggaaatgaaaaaatcctttgaactgaacgacaataatgacacaagctatcaaaacctctgggatacaggaaaagcaatgctaagaggaaaattcatagcattgaatgcctacatcaaaaagtctgaaagagcacaaatagacaatctaagttcacacctgaaggaactagagaaagaagaacaaaccaaacccaaacccagcagaagaaaagaaataacaaagatcagagaagaactaaatgaaattgaaacaaaaaaaatacaaaagatatatgaaacaaaaagctggttatttgaaaagataaacaaaattgatacactattagcaagattaaccaagaaaagactagagaagatccaaataagcccaattagaaacaaaatgggagatattacaaccaacaccacagaaatacagaagatcacttaagtctactatgaacacctttatgcacacaaactagaaaacctagaggggatggataaattcctggaaatatacaaccctcctagattaaagcaggcagaaatagaaattctgaagagaccagtaacaagcagtgagattgaaatggtaattaaaaaattgccaatactagaaaggccaagaccagatggattgattcacagctgaattctatcagacattcaaagaagaattggtatcaatcctactgaaaccattccaaaacatagagaaagagggcatcctccctaaatcattctatgaagccagtatcaccctaataccaaaaccaggaaagggcatagctcatgtcaacaaatgtgatataccacataatcagaattaaaaacaaaaattgtatgatcatctcaataaagacagcaaaagcatttgacaaaatccagcaccttttataattaaaaccctccacaaaattggcatagaggggacataccttaaggtaataaaagccatctatgacaaacccatagccaacataatactgaaatggcaaaagttgaaagcattccctctgagacctggaacaagacaaggatgcccactttcaccacttctattctacatgatactagaagtcctaggcagagcaatcagacaagagaaggaaataaagggcatccaaatcagtaaagaggaagtcaaactgttgctggtcgccaatatgatcgtatacctagaaaaccctaaggactcatccaaaaacctcctagatatgataaatgaattcagtaaagcttcaggatacaaaatcaatatatacaaatcaatagcactgttatatactaacagagacaaagctgagaatcaaatcaagaactcaaccccttttacactagctgcaaaaaaataaaatacttaggaatgtacctaaccacagagatgaaatacctctacaaggaaaactacaaaacactgctgaaagaaatcacagatgacacaaacaaatggaaacatgtcctatgctcgtggatgggtagaatcaatattgtgaaaatgatcatatggccaatagcaatctggaaagtcaatgcaattcccatcaaaataccatgatcatttttcacagaactagaaaaaacaattctaaaattcatacagaaccaaaaaagagctcatgtagccaaagcaagactaagcacaaagaaaaaacttggaggcatcacattacctgacttcaaactatactacaaggctatagtcacccaaacaacatagtccaggtatgagaatataccagtacacatagaccaatggaacagaagaaaggacccagaaataaagccaaatatttgcagccagctaacctttgacaaagcaaacaaaagcataaagggggaaaggacaccccattcaaccaatagcactggcataattggcaagccacatttagaagaatgaaattgaatcctcatctctcaccttatacaaaaatcaactaaagatggatcaaagacttaaatctaagacctgaaaccatataaattctagaaaataacattggaaaaactcttctaggcattggcttaggcaaagagttcaggaccaaaaacgcaaaagcaaatgcaagaaaaacaaagataaatagatgggatttaattaaactaaaaggcttctatacagcaaaagaaataacagaataaacagacaacccacagagtaggagaaaatatttgcaaactatgcatccgacggaggactaatatccagaatctacaaggaactcaaagcaatcagcaagaaaaaatcaaataatcccatcaaaaagtgggctaaggacatgaatagacaattctcaaaagaagatatacaaatggccaacgaacatgaaaaaatgctcagcatcactaattatcagggaaatgcaaatcaaaaccgcaatgcgataccaccttactcctgcaagaatggccataacttaaagatcaaaaaataataggtgttggcatggatgtggtgaaaatggaacacttttacacttctggtgggaatgtaaactagtacagccactacagaaaacagtacagaggttccttaaagaagtataagtagatctaccatttcatccagcaatcccactactgacggcagcggcaggcagtctgaagtggctgctgccatgaagctggctgcagtgaggtgcaggcgctggccgtgggtcttagggggcagacacagaggcaggagatccccagagccagttgccctgggagccttcctctgggagccgctgcaatggggctaggcccagctgcccgtagggcgtggtcaggcagggaggggtgagcagagagaggtcccaagatggagctgggccagtggtggttcggcacttgcacacgtagcgtgggggtcgggcccgaacgcggagcagtggccacacttcaggggccggggtgggaagtgggagtggcgcccacttccaggacccagccagcaatgcggcccctgcacccaccctgcccacagcgccaggttcccgcccctcacaggaggctgaacaaagggccgccagaggccgtgtccctaggatctgccccgagttagagtgactgctgtgcctggtgctttcagcagctgagactggggaggcaatccggtcctggaggtttcccccaggcagggtcacaagccaggagagggggtgccccaagccatccctgagccttggggccacaggaggaacttgagccaacatcacccctgcaccagatgctggcctgggcctggcaagggctggagccaccaacccaggctgcaaggaggcagacagggcagcaggaacggccagaggagcagcagtggcagcagtgggtccctgtgccctgtgtccctgaggcagggaccctcaccctcacacagccggcaggacctgctctcaggcccagagcctctatcacagcctggacctctttccccactgcatcctgggaacctgcaagcacctggccaaaggtgcagccgagactcacagaactggcccctgagtgtcaggttcctttgtgtgaggttggctggggcactgtgccacctgcacctcatccacaactgctgcaggagacacagagagggggcatggctgaggccgccccactctgcagagccaaggacaagcaggagccctgcctctcccaaattggcagggcaggagctcgccatgcgcaactgcaggtgcccaggttgcagctgtaggcctgggcctcccagtgctcttgggggcccaggaggctaccctccacctgccagaacagaagcttctgctgcctggccattccctgctcccagcacctgctgcaatcttggagcagggttggggctgagcccaggtgcagttgcagccctgttgggtgtgcacatgcttggggcagagctgacacaccaggcccctgctgcctgcacccctctggattttgggtgctgacgatcataggagagaggccaagaatgggctggggccagctcagcactggcctgcaggtgcccctttgggcaaggggcctgggcaccatgggtggtggggaaaggcagacaggctcctgggtgggaaggggcaggtccctggtgaggcaccaccttcaggcaagagagggcctgaaggctgggaactgggctgccaatcctatggaccagagtgggaacttgtaatgcctttcaaaggcctgctcatggtaacccatggaccaatcagcatacacttcctcccctctgaagcccataaaagctctggactcagtcagacttggagagaacatcctggacaaccagcagcagagaagagcttcacactccagggactacctgccagcagagagaagccacccaccctaggacctcctcctctttgctgagggctgaacactcgtcaggacacattggctgcagaaaggagctacccacagtgggtctctgagctgttctactgctcggtaaagctcctcttcgtcttgctcaccctccatttgtcagcgtccctcattcttcctggttgcaggacaaaagaacttgggatctgctgaatggtgaggctaaaagagctgtaacacaaacagggctgaaacatgccccttgatcaccgcattgtgggtgaagagaaggagagaagagctgcagccctttggggagcccagacctggaagctccctgagccagggctgtgactcccttttggaggctctgaggttcctggcatcttcaagcttctaggtgccagcacatcccctgttgccagccatggaagctgtttgcagtgtgcctggtccagacacagccttgcagagagccagtgctcatgccagcacctggagttgcctgcccttatgcaatagcaggcatgtctgactgtatgcagtggctggaccccatgcttgctcacacgcctctcccactccatgcctgacctgccccatggcaggcccttggtaggtatgcgatccaggccagtagcctgagccaagtgcagcctgccaggccaagtgggtggaaggagcccagtgggcctgagcaaaactcaggcaaaggcacaactgcttacagaggtttctggcaagaaaaagcaataccccaaggattccgtaacactactgggtgtctacctagtggaaaaaaagttatatgaaaaagacacttggacatgcatgtatatatatatatatatatatatatatatatatatacacacacacacacacacacacacacagagacacacacacacacacaccatggaatactactcaggtataaaaaggaatgaaataatgacattcacagcaacctggatggagttggagaccattattctaagtgaagtaactcaggaatggaaaaccaaacaacgtgtgttctcacttataagttggagctaagctatgaggatgcaaaggcataagaatgatacaatgggccttggggactgagagggaagggtggaggagggtgagggataaaagactacacattgggtacagcgtacactgctcttgtgatgagtgcaccaaaatctcaaaagccaccactaaaaaaattatccatgtaaccaaaaaccacctgttcccccaaaactattgaaataataattttttaaaaagattaaggattcgacatacttaaacatttggtacttcattccctccctagggttttggagatggtggaacacacagcatctgacactggacagatgagattgacagcagtgtattagtcacatttactcggtagcccggtgggggtgggcaggcatcccacgccacgcagggccacatgggggctgcgctcaggaacagaggaaacagccagtggctgtggagggcgggctgtcccctgcttccagagggagagtgtgattggcttgtttgaataattccatggctggcagggaaatgaaatcagctattcaaaaatacgcagaaggtgcaagcggtcctcttgatcagaagtgttggtaggaaaccttacctgcagcagcagagccggcggaggacttgtagatagaccattctaggccctcccagtgttaccagatgtccaggctgcacataatattgaactctaattttagtccttacagcacttttcacttgaacggcaaagggctcagtcacagactggttctttgttgtaaatacacatgtatttgtctacaatacagcatgtatgtattggtctctatatttgctctataaattctgttggtttttaatgaccgggatttgctccacaacacgtggatgcaaataccatcatattttaatttccccaaatgaaattaaatctggctaaaggtgtcacatattgagacttgtaagaaatggagaattcgttgatttaccattccttttatagaacaaagcaccagctcttttatgggcccaggaaatgaggtgagggcctctgtcttcaacactgtatggtgctgttaccattgtccttggtcatcagagatggcaccttcgcaccttacaatccaagttagctaagtcaagggggatgtatgccaggctcccagagctgaagagctctgtgcttcctggggcccacctggtcatctccacccacggtccttccccctcagaggtcggcgtagagccctccaggcacaaaacgtacagtctaggaatccctaactaggccctctcttcaactcatggggaacttatggccaagaatatgggatgtggtgatatctcagaagcttattccatcatatgtaattagctaggtctccttttcactagttgatttgtggtataggcaaattgatttaacacttcatttcaaaacctggttttatctgcagaataaggaaattattcagattcctataaaatcatcatcttgctttgttgctagtctttcttcattacaatctctggtttcataaggaagacttttcaattctgacccataccccttcctcctgaacttcactgcagaccaggatttgttctgaaatctccatgccatgtttttccttcatatcccagggagaagcatttgcctgtccatgcaggttcacacaaaggcagtgtgttctagttgcccagagggttggccttcctgaatcttgcggttcccagtgacgtggacactgttttatcttctagatgagaaacctggatgagtgtgaggtgtgccgggacggaggggagctgttctgttgcgacacttgttcaagagtcttccatgaggactgtcacatcccgcctgtggaagctgagaggtaagtgacatgcaggcgtctctctttttgtcctttaagggatcttccacctgccatgcgcactctccagcagagtgccggcttgtgtctagatggggaaagagcaggttcatcgggtactgggacccagcagtgtgatccagagagcagtgggagacgctggcagcaggaggttaatgtcctctgtgctctcagggacacctcctctgatatgctgagggcagtgttggggacctttgcctacataccggcattgtcctttccttgaagttttgcagctgggtgggttggagacaagaaacaccagttgtttatattttgtgcttattcatacaagacaggaagcacgatctcattgggctgttggaggcccgaggtccctggggctgaaaacccagtttctgaaactcaggcctgacagacagggttccctgtgctcccagcagctcagacagagaaaggagagtccacactcacggtgacaccaccttcctcagacttcctgcctgctgctaccactgatgcgagggaaaggccaatggctggagaccccatgtgtgaatcttgcatactttgggaggtgttcccctccctcccatgactgagcccatcagccattcctgaaggaagacagtggtagccacaggaacggtggccatttccaagctccctgccctctgctcacccatgtccaatctctcaggaccccgtggaattgcatcttctgcaggatgaaggagtctccgggaagccaacagtgttgtcaggaatctgaggtcctggagaggcagatgtgtcctgaggaacagttggtaaatcagatgcaaaccccaagccttctcctttcccctcacacgtgagaaccatgaacaagcgcaagggcaggggaatgtactgaaaggagcctgctcttccgcgccacacttcaatggcactgatagaacaccacaccttgtttgcacaaaaaataactcagccatgacatgtctgtttccaagagccacacatgttagagaaacttgaggaagaagggtgtgagttctgtgctgtgtctcatgcatgtgggctcattctctccaagctgcttttcatttacggcctctttcttttgcagaaatgtgagttcctcctcttgaaagtctattgctgttctgagagctccttttttgccaagattccatactattattatgtaagtaacaacagcaacccatgattacaggctgccatgacattacctgaccctgaaatgggccctcgtgagatttgtgatcttaatcccacggggcaagagcacacgctgtcgttagttgccttcaccttgttgtatttctgctggattttatgggaatccacagaaggtagacactgaactatgctggtagcttttccattggtatatttgtcaccagattagagaggcgtgtcaaggcctgaaggagcccatgtggttggataaaatcaagaaaaggctgaatgagcacggttacccccaagtggaggggtttgtacaagacatgcgcctcatcttccagaaccacagggcctcttacaaggtaggtggctcttcctgcttccatttcatttctttccatccttcccctcattttctggtgccaagaaaaatttagtttccctcatcctgtaataagcttgcacgagcaagggttctggaagtgattgattggtttcagttcagaacttaagctcttcttagcaaagaaacagtgaatcaaaaggtgtccctgcaaccagaaccccaggtccctgagagctcctcccccacctgccccagaggagacaggagctcagagagagcaattgaatcctgcctgctgcagcatataaagaggagagaatttcatcttaaagtggtattgtgcttcttatctgctcccaatcccagaaatcccaaactccagattctttgcatgtgaatagaccatatcccaacaaggattgccagcaaggagtagaagtgacagagaaaggaacagatcagtgatcttaccttatacccttccactatctgaattgttgaaagaacctagattgcttttctaacccactgaaataagcaaccaaaggcaaagaagtaataatcccagctgtggaaatgatttcacttttctgccctgttaataagaaaggatcatgctggtaagaaacggaagttactcttagctgcatgagttttcaagtttaacctggttaatgtaacttagggtgtttaagataagtgttctacttaataatagtgtatttcacacttcaacattgttaagaaagtaaatttcaaatgtactcaccacaaaaaaatgataactatttgaggtgatgaatatgttaattagttcaatttaattattccacatagcagtcataaatcacaacattactttgtactccaaaatatatgccattataaattgtagacttacagtacttttttttttaaagacaagagtcctgatcattctcagttgaaaggtgtctcatgacgctaatgatgaggagcattgtttttgtctttattattttttcagtacaaggattttggccaaatgggatttagactggaggctgagtttgagaagaatttcaaggaagtgtttgctattcaggaaacaaatgggaacaattgactggattagtggatgctgaaagcattcagcaaatggcaccctaaaatatgccgctggtttgccactgacttcaaaatgaggtcacttgggcacagcacatgcagggaggggcttttctctgagcctccttcatctgcccaaagacaaatcctcaaaaggaaattcaatcatcatgaatcacaaccccaagtatctcatcagccagggaagagtaagtgggatcacagggaaggatgttggcagcgacaccatcccatacaggctcttacctcttctcctgagggctgctccagacaacatttattacccagaagaccttttgtctgaaaaccagccaagctttattcaggacacacttcttgccttcactttcccacttccgtggccacctccatgcagaagccctaagcccacattctttcgatagctcacggtggtgcatgagtgtccatcatctgactcttctcggagtctcatattttgtgggactcctgtgcaaacatatgttattaaaatttttttcctcctgt

SEQ ID NO: 15823 - DNA, 87486 bp, Homo sapiens
acttttcttttcctctttgactgagcaccgaggggcagttggcagcttcacctcagagctgcaggaaggaacggggcagtgaaaatcgaatcgggtgtgatcctaggccaagctcatggcccagcagggccagcaggggcagatggcaagtggagacagcaatctcaacttcaggtgggtcatcgtctcctttcccgtctgtccttcatctctggtagggttccctttcatacttgttatttaatgtctacccagcttcactctacaggtatacaatagaattcagttacaaataaataacgaggcaatcagattttttaaattgcagggattggctgttggagaaactcaaggatgccgtgactcacatcatcttcctattctcttacatctgcaaatggctggactggagctgtttgaacatcatgcctgttctgaggctttgtgtaggattggatgattccccgtgacctctgaaccctctcttctcccccaggcctcctttatccccactccaaaagacaactctgtctaaaaaggatctttttagaagaattaaaatccaaacgcctgtctgttgtcacactttccaggctgtgtagttggggaccggttctgctctgagcccatctatgtggctcttagccctagaatcacttcaggatctctgaatacttggtaggaggaagtgaaagcagatgagacccaacaaaaaaggcaagcaggtagagagtgagtgctgcttctgctttttttattcttctgttctggtattttttacatatctggtcagagaagcctggaaatcatctttaaaaaatgtaagacaatgagaccagtctgaccaacgtggagaaaccctgtctttactaaaaatacaaaattagctgggtgtcatggtgtatgcctgtaattccagctactcaggaggctgaggcaggataatcgcttgaaccagggaggcagaggttttggcgagccaagatcacaccattacactttagcctgggcaacaagagtgaaattccatctcaaaaaaaaaaaaaaaaaaagacaagtacatcaatacggtcatttcttcttatctgtggattctgtatccatggatctaaccaaccatgaatgcaaaatattttctaaaaattaaaaacataaataacaacaataaaaagtaatataaaaatttaaaatacagtataactatttgtatagcatttacattgtattaggtattataagtctagagatgatttaaaatatacaggaggatgtgcataggttatatgtaaatactacaccttttatatcagggacttgagcatccatggattttggtatccatggagggtcctggaaccaattccccctggataccaagggatgactgtacattcttgataaaaatgaaaatgtgtggaatgtaaaaatgtatggaaacttgtctaattgggactctgtgctaaggctacttctggcgctggtacagccccaagaaagcaaaagctattgctattatcagcagtagtggtggcaccagactggttttcagtgcccagtgccaccactcccagacaggcatccctgtcatctctctttcacttgctctctagtgaagggaagatgagccagcggagctcaaagtccagccagcccatggtcaccaagcaggaagaagacggcactgagaggtgacaatgggctaatgctaacctcaaagaatgagttaggaagtgttgcctctgctcttatttttggaggaaattggggaggatgatgtcatttcttccttaaatatctggtaggattagctagtgataccatctgggcctagtactttcctttctggagggctattaattatcgattcaaatttctttaatagatgtaggcctattcagacaacctatctcttgtgcaagttttggttagtttgcctcttaaagaatttgttcatttcatctgtgaccaaatttgtaggtgtagagtccatagttttcctttattacctttccattgtccatggaattcgtagtgatgacccttctttcattctgatgatttccgtcttctctatttttttctttgttaggctggctagaggtttattaattaactctttgaaaagaaaatcagcttttggtttcattaagtttctcgaatgttttcctgtttcaatttttttaacttccactttaattttaattttttttcctgcttgcatcaggcttaaattgctccttttttctctagtttcctcagatgaaagcttagattattgacttagatctttcttcttttctattgtatgcatttaatactatacatttccttctaagtgctgcttttgttgcatcccattcattttaataagttgttttccttttcatttacttcaaaatatttttaaaattcttttaggacttcttatttgaccctagaactcttttggttaatctggaaatattttggaattttccagctatttttctgttactgatttctagtttatggtctgagaacaaacttttaggatttctattcttttaaatttgttaaggtatgttttatggcccaaaatgaagtacatcttggcaaatattctatgtgagcttaaaaagtacatgcattctgctattgttaaatggagtaccgtataagtgtcagttagaccaagctgattgctattgctcatcaggtcaactacacccttactgatttttctgcctgtgtgatatgtcaattaataaaaaagaagtgttgaagccttcaataatagtagtgaatttgtctatttctctttatagttctatcagtttttgcctcatacattttgccattagtttgttagttgcatacacattaaggattgtgtaccttcttggagaattgacccttttatcataatgtaatgtccctctttaatccctgacaattttccttgttctgaagcttctttgtctgaaattgatatagctactataccttttctttgattagtgttggcatggtatatcttgctccatccctttatgtttaacctatctgtatttttatatttacaatgactttcttatagacaacatatagtcgggtgttttgtgttttttatgtactctgttgatctcttgtcttttaattggtgttttagaccattggcattaaagtgattattaatatagttagattaatatctaccacatttgtaaatgtttcattgtacctatcgtttttatcttttcttccttttttcctgccttttctggtttaattgagcattttatgcttctattttctctcccttcttagcatatcaattatacttcctttaaaacatttttagtggttccctgaagtttgtaatatatatttacagcgaatcatgcccattttaaattacactatatcacttcatgagtagagaatacaccatgcaactgaatgtcccaaattctgccctcctgttctttttaacattgtgaaatgactgacaatgttaaaaagaacaggagggcttccagtcattccatttatttatgtcccataaccactcaatatgttgttgattctattaatttgaataaatggcttcattttaggttaacttggagtaggaaaaatgaaaacattttattatatctgcatttatttcttctctggtgctctttctttctctatgtaaatctgagtttctggcccacatcatttttccctttgcatgaagaaattctttttttttttttttttttttttttttttgagatggagtctcactctgttgcccaggctggagtacagtggtgcaatctcggctctctgcacactccgcctcctgggttcacgccattctcctgcctcagcctcctgagtagctgggactacaggcgcccaccaccacgcctggctaattttttgtatttttagtagagacgggatttcaccatgttagccaggatggtcaagaaattcttttaacattttcacatggagtaggctttctggcaaagaatttcctcagtttttgtttgtttgagaaaatctttatttctactttacttggaaggttaatttcacaggatatggaagcctacataggctttttttttctttcatcactttaaatatttctttccactttctttgcttgcatggtttttaatgagaaatctgatgtaattttatccttgttctttcacaggtaggggttttttgttttttttccctaccccctggcttttttcaatattttctctgtctttcgtattctgcagtttgaatataaaattgtaattgccaaactagactcttcttgtccattgcccagaaaagccacacattgagaatagtaggagttgcaggagagagagaatttaataatcgcagggccagccaagcgggagatgtttctgaaatccatctccccaagaattcagagactaggctttttaaaggatagttaggcagacagggggctggggaacagggaagtgctgattgcttaggttgggaatgaaatcacagggggttgaagctgtgttcttgtgctgagtcatttcctgggtaggggtcacaggacctggttaccaatcctgtggtattagctgttccattagaatgcaaggtctgaaaaatacctcaaaccccagtcttaggttttacaatactgaagttatctataggagcaattgcggtggttatggatcatgtgacctccagctacatgactcctgaaccataattctaatcttgtatccaatttgttagttttacaaaagtggttttggtcccagagcaaggagggggtaagttttgggaagggattgttataatctttgttttaaagttaaactataaactaaattcttctcattgttagcttggcatacacccaggaatgagcaaggacagcttgtgaggttagaagcaagatggagtcagttaatttagattcctctcactgtcatgatttttgcaaaggtggtttcaatatgtctaagtctagatcatttgatatttatgcagcttggtgtttgatgagtttcctgaatctgtggtttgttgtctgtcattacttttggaaaattcttggctatcactacttgaatatttcttctgctctattttctctttcttctccttctcgtattccaattacatatttgtcacactttctgaaattattccagcattcttggatattgtgttctgttttgttttttcctttttttttcctctttgcatttctatttgagaagtttcttttgacatatcttcaattcactgattctttccttggccatgtccaggctactgatgaactcatcaaaggtattcttcatttctgttacattgtttttcatttctagcatttcatttttcattatgtctttgagttgtcatctttctgctcacttaaccatctgttcatgcgtattgtgtgcttttttctttagagcccttaacatattaactaaccatagttattttaaatttctgtctaaaaacttgaaaatccatcatatctgagtctggttttgatgattactttgtctcttcacactgtgttacttcttgccttttggcatgtcttataattttttttttaagtcagacatgataagtcaggtaataggaactgaggcaaataagccttcaatgtgaggttttatattaatctgggtaggaaatgggccatatctaatgtttgttctagctgtaggtggcagaggtgtcaaattcctctagcgttcttgtttttctttcccctgctttctctgggtttctctgagaactcctttttaaatagtctgtttcttgtagttcttccagctgtaatctgctcttattatacaggaaccctgttgatggaatggtaacgtgtcagagggggaagtggtctataatcttatgattacatctcgatcttttaatggaactgcaccttgggctattacttttaaaagaatttctccctccacccttttttttcaatttttttgagatggagtcttgctttgttgcccaggctatagtgcagtggcgtggtctcggctcactgcaacttctgcctcctaggttcaagtgattctcctgcctctgcctcctgagtagcagagattacaggtgcctgccaccatgcccagctaattttcttttgtgtttttagtagagacggggtttcaccatgttggccaggctggtctcaaactcctggctttgtgatccacccgtctcagtctcccaaaatgctgggattacaggtgtgagccaccgtgcccagcctcacctccaccctttttagaagtgacaagatggccagaaggggctagattttggtagtcacccttcccctagaatggttaaagcattttccctggagagcaggcccttgtcatggagaatgctttggctttttaaaaacttttcttttccctcttcttgccagaaggataaagagatttttcttggggtttgtggaggtaaaatccataaaaggttgggggcctgccctgagatgatgacccccaggagtttctcatgctcatgctcctccacactcagcctccagcaattcatcaaacataccaggctatgacttcagtgcctgctgcctcagatagttgatctcggctaattctctggatttgcctgtatctccagattttggggcagtttgccttgtgactttggttatttgagagatagaagaaaagttgttaattcatagtttgttcagcagggttgttgttgttgttgtgaggatgggagcgatgacttccaatgtctttgcgtgttgaagctgaaaccagaggtctagtgaacttttacatttttgaagtttagacttttttcttaagacaaactttctttttgttttaaattttggttttattatagtattatcttatagccagagcatgtaacctgttcaatttctcttcattattatttattgaaattacttcagggccaaatacctggtatgatcttgtgtgtttaacacagtgttattaaaaatcaattttgccagtttttaaaacttacattttgtgtatctttgttcttttatttttatctacttgagaagctaaggactggaagtaagatgttttttaacagccttgaaagatttccccattagtaatctttaatcttactttttaaatgtgagtattgagaattttaccttctttctcatttgtatttgcttaatgaaacttatccatcttttgactgttaacatttttaatgttattttatctctgttatgtctcttgtagttagattctattttgaccatttataatttaagatggtagcttaatctgttttaaatatcttgttgcttatggattttttatttttatattttatgcctctttattttctataagaaaaagagcatgtttttctttctcattattttgtaaagtttgtagcctcattttgactctatttgttacacttgggtttctaattaattctttaatgtatatttctctaactgagaccatcaaatttataactatatcatttgaatttgtatttgaaataagttacttaactcaattttttacttgtcctcactcaatttaaaaaactttaccaagatatcgcaccactgcactccagcctgggtgacagagcgagattccgtctcaaaacaaaacaaaaaaaacattaaaatagaatctaaagtttaagattgaaattactataattttattatatgcagtatatatcctctctttttagaacagtgcttctcaagtatttgggttcaggatatttttatatttttaaaaattatcgagaaccccaaagaactggcttttgtttattgggttatatctgttgctatttacgatattagaaattaaaactttgaacacttaaaatatgtatttattcatttagaaataatagtagtgaatttattacccgtgaatatgtgatgtgtttttatgaaaaataataaaacttttcaaaatagaaataaattagccagaggattagcattgctttacatttttatacgtcttttaaatataagtagaaggcagctagaccctcctatctgcttctgcattcaatccgttgtgacatcacaggccatttagcctctgaaaaatttcattgtatattcatgagagaatgagaaagataaagggaaaataatatgttattatgtgaagagttttacttggtgacacctgaaagggtcttgcacaatcctagggggtccctaaccccactttgagaattactgttctaagataatttatacatttgagacatcagtattgtaactggttttaatgatgcttccagttcctctacaataaggctttactgatactgatttcttgattctgttaatgtagtacatcatcaaataattcgtcctacacagtgtcagtaaaaatggagtagggtgatctataggaacaaacaattcccaaatctcaacgggtcaccagccctctgcacagaggaccctcatcctggactctgtctctggctgaggagcagccaccccatctgaaatgacagtcactgtggtagaggaacagagagcatgcctaaccaggtgctgcctctgagctcttctgccagagtgatacccattgctccaagggaggtacaatcttaccttggcccagaagaaaagaacattgaaaaatgtgtgaccaacacagaaggtgcatgagcaaaatattctttgagtccttgtctatctaagtattgattctgccctcatacgtgaatcattgaataaggtatacatttttccattttaatttttttggacccattctcaagaactgaatgggtatacactttttttagtagtttcctcttacctctaggtttataggtttgcatcattgctttagacatttagggtttcaaattcacttatttttccctttagggcttttccccatatgttctgggaaattctccctcctttatcttataaaaattttcattcactttttaaaaatttcacaatcattttgaatttccaaggtcgttttattttctggttgtttcttttctgcatggaatttttggtacaatatattctctttctgtgtgataatatttgttgtttagaaattcttttttgttccctgaaacatctgtatttccgctagggtaattttttgccttttgcttatcttggttttactccttaatgttgtaggtttccacaaatgctgtggtctgttgtagtctgttcatgcttaccagcaagatgctgaaaagtaaacttgaaactccatttaatgagatgggcttgcaaacttgtgggcttcactgagcaaataccaaatccctgaaggtaaaggccttttctctgagtcatttatatttttcttaagaggaaacctccagtcttctgcctgattgtgggtgttctgtgtcgtagagcaaactgtttttaattttgcctttggaacaatctctcgattttcatctctgcatctccttctcaaccaccactgcatctctgggaggctgcaggacacgctggatccttttctgacctcaggaagcatcctccaccttcaatagcaatgagtacccctcagaccactttttctctttcatacttaggttaaaatttctcatctaattcctttctcttcatcattgtaactttaattcctttactgtcattttaggagatattctagtgaaagaggagaaaaacagttgtcattaatcaacgattttaaaccagaaggctttttcttttttaaaagaattcaatggataaatggtgcatgtctggagaatgggaaattttagtgatcctctattctatcctgatgcatgtttaaggaatggaaagtcccaatgaccatttcctggtgggataaaaaaaatcctggaagtcttcataccgtttagaaatacagataaatttgttaaggcctattagcaaggggaacaatttagcaagtaggaatcagaactacaaacttttgtgattaaaaattagtttcccaggcacagccttaatgtctgaaatccagaggtctccaagtttagacagattaatgtgtcctagttttgcatatccacacaaatctccatgttggaccagagaaagagtgattttcttgtgactgtttttttttttttttttttttttttgagatggagtcttgcctctgtcactcaggctggagtgcagtggcacgatctcagctcactgcaagctccgcctcctgggttcacgccattctcctgtctcagcctctcgagtagctgggactacaggcacctgccaccatgcccggctaattttttgtatttttagtagagacaggtttcaccatgttagccaggatggtctcgatctcctgaccttgtgatccgcctgtctcggcctcccaaagtgctgggattacaggcgtgagccaccgcgcccggccttcttgtgtattcttaatcaaaccttaccagatgagagtctttgaaccaattttatgatgcagaatgccaccctccttttgcagttacagatggaggagatacatctcctttacatctcctgagatttcctctctttgttgttaactaagaagacttgcagttcagtgttaggttctgtaatatctcagccagatttttatttctttctctgtaagttaaagttctccagagaaacagaaccaataggatgtgtatatacagagaaagagatttgttataaggaattggctcttgcaattatgaaggctggcaagtccaaaatctgtagtgtgggcctgctgtttggagacccaggagagctgatggtgcagctccagtctgaatgcagtctactagaggattctttctttcttggggacactagtcttttggttctattcaggctttcaattggttgggcaagccccacccacattatggaaggcaatctgccctactccaaattcaccaatgtaaatgttaatcttatccaaaaacaccctcaaagttggcatataaaattaattaccacagtatcatgtcaattcctataaagattttgacatcttttaattgcatattttccctagagagttcaggtgaaggtctctttataatagtttgattggaacagggtgagcctttttacttctatgtacaggtctttcttaagttcactgttttcatcttttccaccttgatttttcccaaaataaataaattccattcattctggtctccctacaagaatgcttattttatacatgttggctctccattggccatccttcatgtctaaaatcttctaaccaccacaaacctcttggaaactcagtgtctacttccacgttgtatctttgtttcttaggatggtcgcagagatccagaacgtagagggtcagaacctgcaggagcaggtttgccctgagcccattttcaggttcttcagagaaaacaaggtggagattgcaagtgcaataacaaggccatttcctttccttatgggcctccgagaccgctccttcatctccgagcagatgtatgaagtaagtaagaatttccaaatgatgataaaccaggtccatactcaattatgccaaacttcaagatgcaatgagcaggctaaagggcctcctgtgagtggggaccttcaccattctgtaggttaggaggtgacaggagaagcaggcatcacagaaaacctcccttcttctgtagtaaatgttgggggagggccacagtgagggaggtggggcaggagagagaatgggaatgctgtatgggtgcagatcatcctaggtacttgtaaacaatctactaatggtagccataattaaaataaataagtgacctaggcagcattttattccaaagcctacttatttgaaacacttgaaactgagatttttttgaaactcacagtgaagttgtgtcattttaggttacatttggaagtggatgcttgctactgtctctccaaatcattgtttgatctttggacatttctagagccctagaatgcaagttaatgttagcagtggatgcccttagggatactgaggacaaggcttcttcttgtctttgtgaattttctgtgccctttggccaggagtcatagtgggggctggttgattggtttcctggagctcgtcaggccaggccaatcctagtagtggttattgtccatgcaacagaacagccttgttaaggccactcctgaaataacctggccaggctctaaagccatacacaacattcaactttgaacccacacttattatttaaaattactctctccccttaagtgtacaacaatgtcagagagtcaggttcaaaaaattagagtgtatttttatggtggaggacatttaagaagtcatccaaatatacgcaaaattctaacatttcacaagagaacagatgttctatctacaacctaaaagtcttttgtaacccataaatctctagctacataattctccatttaatatttttaagcattttcaagaagcttttagaaacctggtcccagtgacaagagtgatgtattgtgtactcagtgaactggagaagacatttggctggtcacatctggaagcattgttcagcaggattaacctgatggcctatcctgatttaaacgagatttacagaagcttccagaatggtaactatagctctcaacagctttgggggattcaagcccatttcattcattgattcattcattcactcttcattcatatttgacaaatatttgactgagtgactattacatgccaagcccagggggaatataatgatgaaaaaacacacatgtcccatgtccttatggagtttacatacagtgggagtgacagacgttaaccaagtaatcctgcaaatggttgctcagccaggacttgattttgatgctgtaaaacatagggttgaagtctctatttttttgaaggaatacatgagtgatgtcttttcatgggaaaggaggaagccttctctgatatttgcagatatgttcaaagataaaacaattttctttgtattagaaaatttatcatccagtgcagtcctgtgtcaacttgtttctccaaacaaagactggagaagtcacgaagagagcctagcacatactggtacactgaggaggagctgcatgtgaaagctatgaagacagaaaagggggttggtgggggcctttccgaaccatgtggttgaattgcagactgtgggaggcagggtgtgagagctgactctggagaaagaagttgaagtggattctggaaggcttgacaccctgtgctaaggaatctggagtttaatttttggaaaataaagaaggaataaagggcatttaaacgggaaaagtaaaagaagtcagtatgaagaatgggatgtgttgatttgtgaatactataccttgattcaaaaaagaggtatcttgttttcatattatgatacatccaagtcagagaaaggtctagaggaagtcaaatactgtgcatgcctcctttggtatccatgagggattggtttcaggaatacccaccactctcagtcctgaatgcttaagtcccttatataaaatggcgtagtatttgtgtataacctatgcacattgcaccagtatactttaaatcatctctagattacaatacctaatacaatgtaaatgctatgtaaatagttgttaaattgtatttttcatttgattatttttaatttttgtattgttattttatttatttatttattgagatggagttcactctgtcacccaggctggagtgcagtggtgtgatcttggctactgcaacctccacctcctgggttcaagtgattttcctgcctcagcctcctgagtatctgggattacagtcacccaccaccacacccggttaattcttttgtatttttagtagagacagggtttcgccatgttggcaaggctggtcttgaacccccgacctcaggtgatctgcctgccttggcttccccaaatgctgggattacagacatgagccaccatgcctggcctgttattatctttaacttttgtcccacgtttttaatctgagggtgggtgaatccacagatcccaagccaactgtacctaggcacaaattttgagtcaatatttgtattttaaccagggtgttccaggctgtggcaatgaagggaatgatgttacttctactgcccacatctcaggggctctgattctgtctgtggactgtggggatcctcctggccccagcatccacatctcatatgttagtatctggcacttcctgtgtttgggtgacaggtacctgaggctcacgactgcccactgcctcagactatgagtagaaatgtgagaaatgggcagaagtagaatgaattgtaaaaagattgaaaaaagaaaaaataaacctctacttatactacacaacatccacaaaaaaataattcaagttggatcacaaatctagaagttaagactacaagtataaagctgctaaaagagaaaacataagacagtgtgtttgcaaactgagagtaggcagtaatttgctatacaggacacaaaaaaacatggatcataaaagaaaaacttggtaagttagatgtcaacaaattaaaaactatgcatccaaagtcaccattaagaaaaggaaaaaacaagccatagactgggagacaatattttgcaatacacatatctaacaaaggattgtactcacaaaatatgaagaactcctataaatgaataataaaaggacacatcaccaattcaaaaaatggacaaacgatttgaacagacatttcaagacaggagatataaaatgtccagcaagaatataaagtgtatgacattattaatcatgagggaaatgcaaattaaagttatagtgagatatcattcactcactagaattgctaaaattaaaaagactgacaataccaagtgctgatgagaatatggaacaattggacctcccatcccttgctggtaggaatgtaaaatgataacgaccactttgggaaagtgcctggcaatttcctataaagttaaatctaacctatgatcttggcagtttcactcctaggtatttacatgagagaaatgaaaatatgttcatgcaaagatttgtttaagaatgtttatggcagccttattcataataactaaaatctggaaccaacccaaatgctcatcaacggagggtagataaactatgactaatttatagagtataatactattcagcaataaaaagaatgaactgttatcacatagagcaacatggataaatctcaaaaacattatgttgagcaaaataagcaagttgtaagagtacatactgcatgatcctatttatataagtacaagtacagacaatacagacaagtacagtgccagaaaggaaggcgccattgctggtgataggaaccagaacagtggtgtcttaagcacaaagcaattttctgggatggtggaaatgttctgaatcttgactgggatgttggtttcacaatgatttacacttaagatatgtgcctctcaatgaaaaaaaggggaacaaggctctgttggacctcgggggtgggagatcctggggcttggacatcaagttcatcttgagcacactgaggtctctcctctggtcactgtctgagtttggtaattttcacattgttttcctcagtatgctatgaacactcacctctccaaatgaataatgtaaacgatttagaagatagacccagattactaccatatggtaaacaaggtaactatcatttagctgatcaatgcccttattaaagttttgcttccttgccttcatggaggcaaatcttgtatttcctctcctgtcttagccctctgttatctcccagtcctcctcccctcacacagccatgtacctgcccttatctgccaacagatgtgagagaaccaatgaaaaaggagatctgatctcttgaatagatggagtctccattggtggagaatataagaagagaaaatgggaaaggtagacagagaataatacaggacaaattacatgaatggattccatcttctaaaggaacataaaagtcctaccctccgaggttgagataaggggattatttttaattaatttcatagaactattaagagaaactcagaaataacctaagccatatcagattcaggtgagagatattccttacggagatgaccagttaggggtctctagtactgtggtcacagtccaagaggggagtttggatatggagagagaggggagcctgaaagatagaattgcgcagggagacaaaactgaaatagtgttggcagatagaagatcaaagtgaaatgggagaaacagaaatggaaagagaggaagtataagacacagcagagaaaaggtaaaccgaaacatctgccaaggatcagaggtaaaaatggagagagaagtatatggaaaaggaaagatgagaggaaaataaataccaagaaatggggaaagtagagaggtacagaggcaactatgtagataaagagttaagaaaaaaagggtgtaaaacacttgagagtgaaaagtggataaaagggagagagaaacagactgggacagtgtaggtttgaggtaagagcactggatatccataactttacaagggtttattccattaaccgtaagttttcagaatgaactgttcccacatcaaagtggcacttgcatgatactcagatttcaatagatctctcccagaatagtccaatgattcccaagcacaaatctccactctaaattatctttagagtacatttattcatggacctgaggacctttactcaagggtcagatagacatctacacttgatttttttcaagaaccttaaacttggtactttgagaactgaaagccacatcttcattgctcaagttagatcgaactcctctgcagcactctttctctcagagacggatcactattatcccatggtttttcaagttggaaacctagtcaagtcatcatggatgactcctcccttgccctcaaatacatgccagttatgcagccaatgtaatcatttcatcttcaggttgcccctggcctgtccatctttgcatccccaagaccaggtctctggtccagatctccatcaccctcatgattctcagggcaacatcctttgctcatctcctccctctaatcttgcttccatcaaatgtgttatttgcacttcaactagatgggatattttaaagtgcacatcagattgtatcattttcctacttacctccttaatacactaaggattaaataaatgggtttttaagtagcatccaaaggcatccacaatgagccacctgcttacttctccagcttaatccctgcctcctgaaatattacttcaaggtggaataaaatttcccccaataatttcaattgttaaatctctctttcaaactgagcctttccctatgttttctctatgctgccttatttagaattgttttcctgtcccactatcctccatttacccttctccaatccagctaaatcctacttagaatatatgatcaaagggaggtctttctttagagaaagctagaaaggcacaattgggagaccaaggatgggagagaaagagcagtatcagagaaagcaagagaaaaaatttgcaggagcagagaagagagaaatgcatctaggaaagagaggctccaagaaacatccgcagaaaaaaacagaggcagagattgaggaaatgtacagaaacaggtggaaagacatgagtgagaaaatgggaaagagaacaaggtataaggaaaggaagactcccccacagtggatgaattattctcagcctctggtgaaggttactgaaggactgaatcctcaggtcaggttgtttggggagaggggaccttccagattatcaggttttcttagttttctcattatttgttttcttgttttgatggctttttgaccataaatcaagacatctaagggatttcattcctttcggcagagaacagcaatgcctgtcatgaaatggatgatatagcagtgcctcaggaagccttgagctcctcgccaaggtgtgagccaggtaaggaaggagtgacttgctctccctgacctgcagggtgtcaggaggtggaattcagagctggtgtttcctaatgcattttactctgagtacatgccacaggcaaaagatccattttgtccttggatcctataattctgctaaattttcctaagtgtatgttatagtagaaatatgctagagaaggatgatgtctttcatgtctactaataataaaaacttgattatacctacccaccacttactttctctagagaataaaaacgattattgtttgttactattattattttgtcccttactatagaaagccttcaaaagaaacatgttccatcagaccaactactcgaaaaactaaatgataatttttgccaaatattttccattgtgttactatcttatctagttattgttcaaagaattttggcaaacaagatgtcattttatctccacagcttatgaattttgatggataaacttttgcttatttgtattttatagctaaataaagtagaagtagaagcatagcaatgtgtaaggtcttttaccaggtcaaattagtcaagcaagaacatgacccacatccctgctgactcactgcggtgatggttgtgtgaatttggcagagatcagggtagccagggtcatggattggagttcacacaggagacccaaggaggcctgcaggttcttaggggagtgggccagggcctggtgcaaggagactcttattcagcaaaagcatttccatggccagagcagggaaaagcagagagaaacggtaagattggaatctgccatgtgggatgcaagaaatccagaagaagagaaccagaaagaaaaatggagacacaagtaggaaaatgtgatggagggcattgaagagcaacagaaaagaaaaagagagggaatcccagggagtcaaggagatggacggtgcttcatggcgtagaagcaagagtgtgtggtaaccaaaaagtgagaaggagaaaggaggtagcagagagatgatcagaaggaaaacaggcagagcaaggctgtggcggggctcaggcgaggtccttggagcaatagtgtttttttgcaaggagaagctcacttgagtgctgaacaccaggattcagcaggagcatcctgaggtctgtgctctcatcactgtgccttgtttatttccaggtttctcttcagagtcttgtgagcagttagctctcccaaaggctggtggaggagatgctgaagatgcacccagcctactaccaggtgggggaggtaattatgatttaaatgaccaattatctcattaaattagttggcctatctctatgcaaccaacacttccttctctctccaccaccaaccctgtaacacacttttgttcagcctgtggttgttttccccaggtgtgtgggaggcaagaggtaaaggacggctaagtcctttagtggaggggctcctgggcagagagcttaagggtacagagtaataaaaattactctgattggaggcaccaaatggtgttgcctaagtgggcccaattttatctacatgaatattgaatctaaatcctaccaggatggggtttgagaaaagagagagaattttaaacttacttgccagggattatttaggaataatgaaatactgtatatagaagagacaaagtggaagtgacaaagttagaagaatgaatagggatataacggggcaaagaggtaacaaacatcacgaaggaagaaagagacagaaatgcaaagaaatggtagaagtcagggagaggaagtcaagtcaaagagatcctggagttggtttatggtgcagatgcagcaatgtgtaaagacagggttagagggagaaaaaagaaggagagagagggagagaggggaaaggggcctgacaaggtgctagaagaagtagagccacttttgtttggtgcaaagatacctttattcccagggagcagttctacacccgaatattagagctcagcatggatccaggtaggtgtccaggtcactgccaattgtctgtcatgttcctctttcactctgcagtgtcctgtaaacttgctatacaaatagatgaaggagaatcagaagaaatgcccaagttactgccttatgatacagaaggtaattaggatttaaattaaagctttatttttctgtcaacatacaaaaacacctactctttcatctcccttcccattcccccatctattcatgtattcatccatatatccatccatccatccattcatccatccatccatatatccatccatccatctgtatattcatctgtccatccatccatccagccatccatcaatccatgcatccctccccacatacagacagagacagtctatgtccagcttcttcctgctttccttaagaggcacaagtagcaaaagaaggatgagctcagactggttggggctttcctgcatataggacatagggaaagagagagagaaagaaaaatatagtttgaatcgttaaataaagagagatctgagtgattgccagttttacctcaatagttgtgggatccaaatattaccacgttgggtaacatttgggtaatattaccacattgggtaacatttgggtaatattaccacattgggttataaggaaggggagataattttcaacttattttctcgaggttatgccaacagcatggatataatgagtatattgcaatatagaaaactcagtgaaagactgttgaaatgaacttcacaaagggaagggtccctgcccctttgttaatggcaaaagatgaggcctttgatactatggcagaaaaataagacagaatatacagaaagactgaagtttaaatttttagatttaaattttggattgaaaaattaggaacagaaagctaattagagagaacagatagaggcatggaaatgagcaccatggaagaaaggagataagcttgattattaaatatggcacaggaattaaaaggtggagaaaatactgtgagaggaacagagagaagaaaaatgctcgaagacagagacagtggaggagaggcacaaaagttgtacacagagaaaaagagaaaggagaataagtgaagttagcagagagtgaaaactgcttgcaagagatggggaacaatatgggacattgtagggatggagggaagattcactagacagaaataacttctggcccaagaatgagacatgttagcagcgagttttcacattatggtgtccccagcctatcaaaatggcacctgtaatgtcctcagaggcagtcgacctccccctgaggctttcatgtctctcccatctataacttaatgatttcaaaacacatatgtccagatttatcttctaagttcattcatctgagtacctgaatacgttcatgaagatatctgaaagacctctccatttggatgtttttcaggaacctcaatacaagacacctccaagagtacataccatctttcctgacacagatctgactcctctcccagtgttccctatctcaggatgaaacactattactccattcttgaagcagaaacctaggagccactcatgactcaccccacctccctcaacttaaacaccccatcaaccatccagtagacttttagtgagttctacatatctcacctgtccatttccttccaccccaacacaaaaactctggtaagatctctctcttggactggagcaacagcctctagactcacatctttcctctgatcttgtacctctcacatccattctttccaactcaaacaactctttcaaaaattgaagttggcttatcttacatttctactttaaatcaataactacttggggtcataaggattaaatctattttttcccccagggctccagcttcatgtctgcctctcctgcaattacttcaaggtttatatacaaattttctagtcattgtcattttctgatgactctttctcatctgagctttcctaaaggcttagccctgtgcttgaaaaagtcaccttgtttcactacaatctccatcatgctcactaatctagtgaaattatatggaaattacatacactctcagagatgccttttttgatccctagttctagaaagcaacgggatgatagatgcggcaaggacatacagcacagcaccaggggagaaacagggagaggaggaaggcaggaacagtcccagaaaaagaaaccaagacaaggagaagtaccaagagagtccagagggaagagacaaaggtaggaacagaagaagcagagacatgtgtcaagggtgaaaatgagagtgccaacatggggtgggagaccaggtgggcaaggtttctgacagtctctatcagattactggattgcacaagagcttcttttaccctcacaaaatctttaacatcgatatgcaaacagctgtatgtctatcttacagactgagaaataaagcacagaaatgcaagcaggatattatcacaaaggcaaagtagaaaaggaagagtgggcaccagtgtcctggatgtgtcactgggtgatggttgtgcaaggccagctgggggttcagggccaggtcacagggtcagaatagaaagaagtccaaggagttctgcaggttcccggaggagtggaccagggatcaatgtaaggctttaaggaaaaaaaatgctaatgggagggaagggaaatcatggaaacacagcatggaaatagagcctgccctttggaataggagagggatctagaataagagctaaagaaataatagaaaagggatatggtatcactgaaaaagaaaaaagacatagaaacaggagacaagagaagccagttggagagaagatcagacaatccaagcgctgctcagctaggagggaattatgtggaggcagaacggtgaggaggacactgagaattacagagaaggagaaagaggagctgcaacaaggtggagaaaaggcggaacaagacaggggtggctctcagcatttgcccatcttggatggcatgaacacactgaggcctgtgtccaagtcaccctctgtggtctgtcaatttcttgtttatctgcagagacctttgatctaaaaactccccaagtcactaatgaaggagaaccagagaaggggctctgtctactaccaggtgaaggagaaggtaattatgatttaagtttttaaatatttgagtacatctttgttttctagttggcatggaaaaaaagtttccctttctcccatcctacccttcccttcttcacattcgcatacatacagatggaattatgtcaattttctgttgtgcctttttgaaaactgtgagagagacaaaggatcaaggtgagctgagcccctgagtggggaccatatttctgcatggggaatgtagggagaacgaatataccagaggtaggctggggcgccagagaagtgcgtgggtgatgttattaaacacacattaaacctaaataacagcagattatggcaactgacgcaggggagaatgttttcagcctacttccagaaggatctggagcacagacatgttttgtgaaagaccgaaggcttgcaactgaggaaagtcatgcaggagacccttgggatggtgctgacaagggaaggacctgtggtgctatagcccctgcgtgaacagaagatcttttccaacctggaagaagataactttgagaatgaggaaaatatataaaataagggacattttaccagcatctaggagcataagataaaacccaaagaaacagaaaaggagaaagtagaagacacatagaaaggtgataacctcaaggagaaaagttagagaaaattgtacaaatggtagcaaatacaataacaacagcaatatgggaaggaagcacagaagaaattatgcagagaaagaaacagatcaaaataattaaagaacccatgaagagtgaaaactgttgtccaaggaaaggggcaggtcgagggcctatggagctgaagtcagtcactagatagaagcagctcccagcaaagggcacctctatcaatagtgagttttccaatccaggcccccctaggtagacagtggcacagaagcatactcagagagtaagagtactctttccccagtctcatctgctcaggtagtggaatgattctcatgtacatgtctgcgatgcagacctgctttccaagctcttccatccatgtgcctgaagatatttatcccaggaccctgccccttgcaatgtctttcaggaactacacacatccaaaagggaaaccaacacctcctccgaacctagaaactcccctttctccagggtttactctgtcagtaaagggatgaatatcctgtttgctcttctactcatcagactctttttctctgctttagcacaattgttctctgctttagcacaattggcaattgcaagatgtcaatcagatcattttcttttccccttagacgcggtgatctttgctgcacaggattagatgaattatccttcctgtggatttctgtggcttccacccttcatgggtccccagcccatatcatctgtcccatctctactaatggcatcaattgtttcaggagctgcaatgatctgatctttcttttatatgtgggcccttgagccacatttcccctgtactctgtattgttgccttggcccactcttctcctgatccctttccttatctggttcatttccaccatcccaaggatgcctttcctgatgcccagtatgagaaagggggtgacaaggaaataaatgagatggggaaagccaataaaaagcagagtcaggggtgcaagagaaaaaggcaggagcagagaatggagcagaaacacatggaaacaaagagaagcacctggagccactggcagcaggaaagcagggcaaaggcagaagaaatgtgcctaggaaagggggagggggagaaggagagagaattaggagtccaggcagcaagtgagctgatggatggttctcagccttggtgacagcaactggagtgcatccacttacaggccaggtgaacccacctacagaacccacctacaggccaggagggcctgggtgatggacagccccacctaggagatacttcagcttcccacgtcttcactaagttttctcttcataatttcttgagggatttcttttctttctgcagagggcagtgatgactgttcagaaatgtgtgatggagaagagccccaggaagcctctagctccctagcaagatgtgggtcaggtaaagaaggggaggatttctggccctgggctgcagagtgtcaggaggttgaatttggagcttgtgtttcctgattgtctttcctccaagtatacttcacagtgaaagaatgcaattaaatctgagatttttcacattttctatacatggatatttgagaaatgcagggaggaatcttgatatagaagtctgtgtttaacggaatgggttttattgtttgaacatatgtgtttagataatcacgtggtagttggattatgtcaaggcaaggcaatgtgttctccccttcatattctcatgcctattaatactgaagcattaaaatattttactgaataagatctcctgataccctcacaaaaccttaagatggggccagacaaactgggtaatcctattttacagatgaagaaataaaggtcagaatatgctaggaggaaaaaatgctctttgcctttatttttcttcactatcaatagtattacttgaatttaaaattctattctcactcactttttctatgggaatgaaaaagcttatcatccctctgctggtagatactttttatcattttattacaaacttgacaaagccttcaaagaaatggtatcctaccctctaattgacagaattcagatgatctctttatgagactaaatgctatttttgaccaatactcttcattatgttattggatcatgcagtatgtttttagaggactctgataagtgttacatttttaccctcagaaacctcaagatttaggcagggaaagtgctgttattgttgttttgaggagccagaaacacagacgtacatgtgacaccggtgtttgttaagacccaagaaggagggaaatgcggagaccagtgtcctggatgactccttacaggctttcagttctgtgaggcgggcatgggttagggtggggtcccatagactgagtccaatgtggatgcccaaagggtttttaggaatctgagagactctacctgggtttaatggaaagagacttttattaacaagtaaagcaagcttaaggagaggagtggaaaaattattgagagttagaaagtatgtaaatataatccatgatacgagataggagatatccagaaaaatagagccaggaaagatacacagagatagaatgtgcatagcagatgtagcatatcactgaaggagaaagagacagatattcagggagagatgtttggaagagaaagtccacagagccaaagagaaggacagttgccttcatagagtagcattctatgaaggtgtatgaagatataagtgtataccttcatgtgccttaataggcatagagtggggcaaggacataaagcacaggaccagggatgcaagagggaaatgagggaggcaggagcagtcccagaaaaagaaaccaagacaaggagaagtaccaagagagtccagcggcaagagacagaggtagaaacagaagaagcagagacatgtgtcaagcatgaaaatgagagtgccaacatggggtgggagaccaggtgggcaaggtttctgacagtctctatcagattactgggttgcacaagagctccttttaccctcacaaactcttaaacatctgtatgcaaacagctaaacgtctattttagactgagaaataaagcacagaaatgcaagcaggatattatcgcaaaggcaaagtagaaaaggaagagtgggcaccagtgtcctggatgtgtcactgggtgatggttgtgcaaggccagctgggggttcagggccgggtcacagggtcagaatagaaagaagcccaaggagttctgcaggttccctgaggagtgaaccagggatcaatgtaaggctttaaggaaaagaaaaatgctaccgggagggaagggagatcgtggaaacacagcatggaaatagagcctgctctatgggataggatggatctagaataagagctaaagaaataatagaaaagagatacaatatcactaaaaaagaaaaaagacatagaaacaggaggcaggagaggccagttggagagaagatcagacaatccaagcgctgctcagctaggagggaactatgtggaggcagaacggtgaggaggacactgagaattagagagaaggagaaagaggagatgtaacaagatggagaaaaggcggaacaagacaggggtggctcttagcattttcccatcttggatggcgtgaatgcactgaggtctgtgtccaagtcaccctctgtggtctgtcagtttcttgtttatctgcagagacctttgatctaaagactccccaagtcactaatgaaggagaaccagagaaggagctcagtctactaccaggtgaaggagaaggtaattatgatgtacatttttaggtatttgagtacatctttgttttccagttggcatgggaaaaaagcttccctttctcccatcctacccttctcttcttcacattcgcatacatacagatggaattatgtcaattttctgttgggctttttttgtaaattgtgagagacaaaggatcaagctaaggtgagcccctgagtggagaccatatccctgcatggagcatgtagggagatacaatatgccagaggtaggctgggggcaccagagaagaagttcctgggtgatgttattaaaaacacatgaaaccgaaatatcagcaggttatggtaattgaggcagggagattgttttcagcctactttcagaagtatcaggaacacagacgtaagttttgtgaatgattgaatgcttgcaattgagaaaagtcatgtggaagacccttgggatggagctgacaagcaaagcgtatgcagttttacagcccctgcgtaaacggaagaacttttccaacctgggagaagagaactttgagagtgaggaaaatatataaaatcgtggacattttacaggcatctaagaggttaaggtaaaacccaaagaaacagagacagaaaaggagaaagtgaaagacaaagtagaaagaggataatctcgataagaaataagaggcagagagaaaagttaagagaaaattatacaaatggaggcaaatacaaatgacaacaatgttggaaggaagcacagattaaactatgcagagaaagagatcaaaataattaaagtacccatgaagagtgcaaactatgtcggaggaaaggagcgggttgagggcctgtagagctgaagtcagagttactagacagcagcaacatccagcaaacggcacctctatcaatagtgagttttctgattaaggtccttctaggtagagagtgacacagaagcatactcagagggtaagaattctttctctccccgcagcctcatctgctcaggtagtggaatcattgtcaagcatttaatatctgtctgttaggcaggcctcccttccaagctcttccatctgtgtgcctgaagacttttatcttgggaccttctttattgcaatgtctttcaggaactgaacacctcacagtggaaaccagcacctcccctgaacttagaaactcctctttctccagggtttgctgtctcagtaaagggatgaatgtcctgtttgctcttctactcatcagactcattttttctgctttagcacaattgttatttgcaagatatcaatcagatcatcttcctttccccttagatgtggtgatctttgttgcacaggattagaagagttatccttcctgtggatttctgtggcttccacccttcatggggccccagcccatatcatctgtctcatctctactaatggcatcaatcatttcaggagctgcaatgatctgatctttcttttatatgtgggcccttgagccacacttcccctgtactatgtgttgttgccttggcccactctgctcctgatccccttccttatctggttcatttccactatcccaggaatgcctttcctgatacccagtatgaaaaagggggtgacaaggaaataaacaagatggggaaagctagtaaagagcagagtcaggggtgcaagagaaaaggatagaaacagagaaggggggcagaaacgcatggaaacaaagagaagcacctggagccactggcagcaggaaagcagggcagaggcctgagtctaatgtggaaagggggagggggagaaggagagagaattaggagtccaggcagcaagtgagctgatggatggttctcagccttggtggcagcaactggagtgtgtccacctacaggccaggtgaacccacagggcagaccaggaggacctgggtgggggacagccctacctgagagatacttcagctttccacatcttcactaagttttctcttcatgattttttgttggttgtatactgagacctctgagggatttccttcctttctgcagagggcagtgatgactgttcggaaatgtgtgatggagaagagcgccaggaagcctctagctccctagcaagacgtgggtcaggtaaggacggggggggggatttctggccctgggctgcagagtgtcaggaggttgaatttggagctcgtgtttcctgattgactttcctctgcatatacctcacagtgaaaggatctaattaatcctgagatttttcacattttctgtacatgaatcttttgtgaaatgcagggaggaatctttatacagaagtccatgtttaacagaatgggatttattgtttgaacatatgtgttcaggcagtctagtggtagtcaaaatatgccaaggcaaggcaatgtgttccctcctttatattctcatgcctttcaatactacagtattaaaatattttaccaaataagatctctcgataccctcacaaaaccttaagatgggggcaggcaaactgagtaatcctattttataggtgaagaaataaaggtcagaaatacggtaggaagaagcaatgctcttttgcctttattttttctagctatcaatactattatttgaatttatataaaatttctattctcaggaacaattttacactgttggtgggactgtaaactagttcaaccattgtggaagtcagtgtggtgattcctcagggatctagaactagaaataccatttgactcagccatcccattactgggtatatacccaaaggattataaatcatgctgctataaagacacatgcacacgtatgtttattgtggcactattcacaatagcaaagacttggaaccaacccaaatgtccaacaatgatagactggattaagaaaatgtggcacatatacaccatggaatactatgcagccataaaaaatgatgagtccatgtcctttgtagggacatggatgaagctggaaaccatcattctcagcaaactatcacaaggacaaaaaaccaaacactgcatgttctcactcataggtgggaattgaacaatgagaacacttggacacaagaagggggatatcacacaccagggcctattgtggggtgggggaggggggagggatagcattaggagatatacctaacgtaaatgatgagttaatgggtgcagcacaccaacacagcacatgtatacatatgtaacaaacctgcacgttgtgcacatgtaccctaaaacttaaagtataataaaaaaaatttctattctcactccctctatggaaataaaaaagggtatcattcctctgctggtagatacttttttatgattttttcacaaacttgacaaagccttcagtgtaatggtattctaccatctaattggcagaacttagatcaactatttgtgagactaaatggtatttttgaccagtactttccattatgtcattggatcatgcagtggtttttcagagtactctgataggtgttataattttactcacaaaaacctcaagacttagatagggaaggtgctgttattgctgttttaaggagccagaaacacagaaatgcatgtgacacgggtgtttgataagacccaagaaaaaagaaagagcagagaccagtgtcctggatgactccttacaggctttcagttctatgaggtgggcatgggttggggtggggtctcatagtctgagtccaatgtggatgcccaaagggtttttaggaatccaagagactctaccagggttcaatggaaagagacttttatctaacaaataaagaaagattagggagagataaggaaacattatcaagagttggaaaatacttgaatgtaatctacgatacgagataggagatatccagaaaaatagagccagaaaagagaaacagagaggcaatatgaaaagtatatgtagcacatcactgaaggaggaagagacagtaagggagaggagatgttaagaagagaaagtccagaaagccgaaaagaaccatagatgccgtcatagagtaataaaaagatatcactagtagaaggggctatcacttaggctgggtgcagtgggtcacccctgtaatcccagcaatttgggaggccaaggcaggtggatcacttgaggtcaggagttcaaggccagccgggccaacatggcaaaaccccatctctactaaaaatacaaaaattagctggttgtggtcgagcacacctgtagtcccagctactcgggaggctgaaacaagagagttgcttgaacccgggatgtggaggttgcagtcagctgagatcacatcactgcactccagcctggtgacagagcaagattccatctcagaagaaaaaaagaaaaaataaggggccaccacttaatatcaaacgaaaggctgaatttattgttcagttaagggatagttgtgcttgtgggtcagtttctctgaacagagaacgtttgtggaagtgtggatctcggtgactggcggccttcaaaagtgagatttgttagtggttagctgacctttagtgaaagcagggtcactggagtgtggctgttactgactgtctgactttcagaagcatggggaagtcaatggttggctggctttcagaggcctgtgtactggccagaagctattgttgattaattgggatgattctggttgttattgaccatatggccaaacaataatgagttttcctagaagtgtagcaactttcaattatcagtttcccctttaggaaatctctcatctaaagctgcaggaggcaccatcaagtattttccccatccaagatgtcttttctggaagaggaccctggaaacaaaatcctaggattccccttcactgagtaggagttatagagttgctagattgagagtgttatccttgcaaaggatgacataagaaaaagtaatgatgttttacaatacgttaatggaatggcagacaactgttgaaagtttttaattagcagcagaattgtgctgcttgcaatactatcctatttattcccttttgctccaagaatactcaccagccacccttgtggctgcagcgtttatcccaagtaaatttgccatgaaatatcttgcttttattattattttcacatcactctaatatattgactttggaaacaaaagacattcttctaattatagcattctggttttagtagtggtatttccatttacaaaatacagtaattgttgatcactgaaaatgtcaaatcctggaaaacgtggctttcccacatgtgctgttaacattgttactgaacaattgttggccgaagattcatttgatgaatcatatatttttaaaatagatgattctgatatggttctgtttagaaataactccaagaacagtttatatattttattttcacattgaaaatcaatcatgtttgcttcagcctcaaagaatgtgtttacgtaaaattaaatgagtgcagcaagctgcacttttttttttttctaaacgggaacagagttaaagttgatccaagtacaaaatctccagaaccatggactaatgcagtcacctgcaattgctttgaggcaactaggatgagatgtggctactagcaatggctctttgatgtctgtcacgttttgaagtgatacccctagagcatggcctgtttgtttatttatttatttatttatttttatttttccgtaagttattggggtacaggttgtatctggttacatgggtaagttctttagtggtgatttgtgagattttggtgcacccatcacctgagcagtatacgctgcaccatatttgtagtcttctatccctcgcacccctcccactcttccctccaagtccccaaagtccattgcatcattcttacacctttgcgtcctcatagcttagctcccacgtatcagtgagaacatacagtgtttggttttcctttcctgagttacttcacttaggatgatagtctccaagccgggcacggtggctcacgcctgtagtcccagcactttgggaggctgagatggatggatcacctgaggtcaggagtttgagaccaacctggccaacatggcaaaaccccgcctccgctaaaaaaaaaaaaatacaaaaattagtcaggcatggtagtgtgtgcctgtaatcccagctactagcaggggctgaggcaggagaattgcttgaacccgggaggtggaggtggtaatgagctgagatcacaccactgcactccagcctgggtgacagaacgagactccatctcaaaaaaaaaaatagtctccaatctcatccaggtcactgcaaatgctgttaattcattcctttttatggctgcgtagtattccatcatatatatatatatatatatatataccacatacatacatatataccacagtttctttatccacttgttaattggtgggcatttgggttggttccacaattttgcaattgtgaattgtactgctataaacatgcatgtgcaagtatctttttcgaataatgacttcttttcctctggatagatacccagtagtgggattgctggatcaaatggtagttctatttttagttctttaaggaatctctacactgttttccatagcagctgtactagtttacattcccatcagcagtgtagaagtgttccctattcactgcatccatgccagcatctactgtttttgattttttgattatggccattcttaaggagtgaggtggtatcgcattgtggttttgatttgcatttccctgatcattggtgatgttgagcaattttttcatatgttcattggccatttgtatatcttcttttacgaactgtctattcatgtccttagcccactttttgatgggattgtttgtttttttcttactgatttgtttaagttcattgtagattatggatattagtcttttgtcagatgtatagattgtgaagattttctcccactctgtgggttgtctgtttactctgctgactgttccttttgctgtgcaaaagctcttaggtttaattaagtcccagctatttatctttgtttttctttcatttgcttttgggttcttggtcatgaaggccttgcctaagccaatgtttagaagggtttttctgatgttatcttccagaatttttatagtttcaggccttagatttaagtccttgatccatcttgagttgatttttgtataaggtgagagatgaggatccagtttcattctcctacatgtggcttgccaattatcccagcaccatttgttgaatagggtgtcctttccccactttatggtttgtttgctttgtcaaagatcagttggctgtaagtatttgggtttacttctgggttctctgttctgtttcattggtctacgtctatttttgtaccagtaccactctgttttggtgactatggccttatagtatagtttgaaatcatgtcgtgtgatgcctccagatttgttctttttgcttagtcttgctttggctttgtgggctcctttttggttccatatgaattttagaggtgttttttctaattctgtgaagaagatggtggtattttgatggggattgcattgaatttgtgattgcttttggcggtatgatcattttcacaatattgattctacccatccatgaagcatgggatgtattttcatttgttcaggttgtctatgatttctttcagcaatgttttgtagttttccttgtagaggtctttcgactccctggttaggtatattcctaagtttttgttgttgttgttgttgttgttttgcagctattgtaaaaggggttgagttcttgatttgattctctgcttggtcactgttggtatatagaaaagctactgatttgtgtacattaatcgtgtatccagaaagtttgctgaattcttttatcagttctaggagctttctgggggagtccttagggttttcaaggtatacagtcatatcatcagcaaacagtgagaatttgacttcctatttaccaatttggatgctctttatttctttctcttgtctgattgctctggctaggacttccagtactatgttgaagaggagtggcgagagtgggcatccttgtcttgtttcagttctcagagggaaagctttcaacatttccccattcagtattatgttggctatgggtttgtcataggtggcttttattaccttaaggtatgtctcttgtatgctgattttgctgagagttttaatcataaggagatgctggattttgttgaatgctttttctgcatctattgaaatgatcatgtgatttttgtttttaattctgtttatgtggtgtatcatatttattgacttgcatatgttaagccatccctgcatccctggtatgaaacctacttcatcgtcgtggattatctttttgatatgttgttggattcagttggcaagtattttgttaaggattttagcatctatgttcatcaaggataccagtctgtagttttcttttttggctatgtcctttcctggtgttggtattagggtgatgctggcttcacagaatgaattagggagggttccttctttctctatcttgtggaatagtgtcaaaaggattggtaccaattctttgactgtctggtagcattctgctgtgaatccgtctgatcctgaacttttttttgttggtaatgtttaaattaccatttcagtcttgctgcttgttactggtctgttcaaggtatctaattcttcctgatttacactaggagggttgtatttttgcaggaatttatccatctcttctatgttttctagtttatgtacataaaggtattcatagtaaccttgaatgatcttttgtatttcactggtgtcagttgtagtatttcctgtttcatttctcagtgacgttattcgggttttctctcctcttggttaatcttgccaatggtctatccattttatttaccttttcgaagaaccagcttttgtttcatttatcgtttgtattttttttatttcaatttcatttagttctgctctgatctttgttatttcctttcttctgctgggtttgggtttggttttggtttgttcttgtttctctagttccttcagatgtgaccttagattgtcagtttgtgctctttcagtctttctgatgtaggtgttcagggccatgaactttcctcttagcaccgcctttgctctatcccagaggttttgattgtcattcagtttgaagaattactgtcattcagcttgaataattttttaatttccatcttgatttcgtttttgacccaatgctcattcaggagcaggttatttaattttcatgtatttgcatggttttggaggtgccttttggagttgatttccagtcttattctactgtggtctgagagagtgcttgatataattccaattttcttaaatttattgaggctcgttttatggcctatcatatggtctatcttggagaaagttccatgcactgttaaatagaatgtatattctgtggttgttggatgaaatgttctatatatatctgttaaatccatttgttccaaggtatagtttaaacccattgtttcattgttgactttctttcttgatgacctgtctagtgctgtcagtggagtattgaagttctccactattattgtgttgctgtctatctcatttcttaggtctattagtaattattttataaatttgggagccccaatgttaggtgcatatatgtttagaattgtcgtattttcctgttggacaaggctttttaccgttgtataatgtccctctgtgtctcttttaactgctgttgccttaaagtttgttttgtctaatataagaatagctacccctgcttgcttttggtgtccttttgcaagaaatgcctgtttccacccctttactttaagtttatgcgagtccttatgtgctaggtgagtctcctgaaggcagcagatggttggtgagttcttatcggttctgtggttctgtatcttttaagtggagcatttaggccatttacattcaatgttagtattaaaatgtgaggtaccattgcattcattgtgctttttgttgcctgtgtactttttgtttttattttttaacttgtattttatttttgttttataggtcctgtgtgatttatgctttaaagaggttccgttttgatgtgtttctaggatttgtttcaatattgagagctccttttagcagttcttgtagtggtggcttggtaatggcgaattctctcagcatttgtttgtctgaaaaagactgtatctttccttcgtatatgatgcttagttttgctggatacagaagtcttgtctgataattgttttgtttgaagaggctgaagatagggccccagtccctcctgtcttatatggtttctgccaagaaatctgctgttaatctgataggttctcctttggaggttacctggtgcttctgtctcacagctctaaagattctttccttcgtcttaaatttggttaacctgatgacaatgtgcctaggcgaagatctttttatgatgaatttccctggtgttctttgtgcttcttgtatttggatgtctaggtctctagcaaggccagggaagttttctttgattattcccccaaatatgttttccaagcttttagaattctcttcttcctcaggaacaccgattattcttaggtttggtcatttaacataatcccagacttcttggaggctttgttcatattttcttattctttttactttatctttgttggattgggttaattcaaagaccttgtctttgagctctgaatttctttcttctactttttcaattctattgctgaggttttccagagcatttcacatttctaaaagtgtgtccaaagtttcctgaattttttattgattttctttaagctatctatttgcttgaatatttctcccttcacttcttgtatcatattttggatttccttgcattgggctttgcctttctctggtccctccctgattagcttaataactaccctcctgaattcttttttgggtaaatcagggatttcttcttggttcggatccattgctggtgaactagtgtgatttttggggtgtgttaaagagccttgttttgtcatattaccagggttggttttctggttccttctcatttgggtaggctctgtcagagggagggtctagggctgaaggttgttgttcagattcttttgtcccataggatgttcccttgatgtactattctcctcctttttctatggatgtggcttcctgtgagccaaactgcagtaattgttgtctcttttctgggtctagtgacccagtgagtctaccaggctccaggctggtactcggggttgtctgcacagagtcctgtgatgtgaaccatctatgggtctctcagctgtggataccagtgcctgttctgctggaggtgaagggggtgcaatggactccatgggggtcctttggtggtttaatgttctatttttgtgctggttggcctcttgccaggaggtggcactttccagagagcatcagctgtggtattatggggaggaaccggtgatgggccagccctagaattcctaaggttatatgccctttgtcttcagctgccagggtggataaggaagagccgtcaggtgggggaggggctaggcatgtctgagctaagactctcgttggacatgtcttgctgcagctgctgtgggggatgggggtgagattcccatgtcactggagttgtgtacctgggaggattatggctgcctctgctgagtcatgcaggttgtcagggaaatgggggaaagctggcagtcacaggtctcacccagctcccatgcaaaccaaagggccagactcactcccaccatgccccgccccaacagcccccagaccatttccaggcttgaaaacctgccccaggctatctgcctcccagctgcagaagaaaaaggcttggttcttccccacctgtggagtctgcacaccggatttgcgccctcacaagagttctgtccaggaggcgtctcaccctgttcaaattgttacaaagttcagctagagattggcttctccctgtgtagttttaccccctgctcctctcccattgggtccctgtggtgccaggcaggaatggccttctaggggacccagccacctcccaggccctttccgctgcttccccctacacctgtatttccctcatctcttcagattgactcagctccaggtaaagtcggaaacttctcccacaaacagaccttcagcttctccagtgggggtgtgtgttcgggagaggagggtctccttttcccacttctgcagttggggcactctcagttttacgggggggggcggtctcctgggtcctgcaggtgcaatctgcttccttcagagggtcatgttgcctaggctggtcacgaaccatggcctattttttatgtacgtataaaagaaaaggattatgataaaggagaaagggagacaggagacctgtctcctgataatgtgataatagaagattcagtgtgggtgactgatgaaggagtattttaaaatcgtgaagatctgttccatttctgtgttccatgagaatggccccaagatatttgggtcaaatgtagggaggcctggtatttcagaaaagattgacccccattgtcttcaagactcagttaatcctagaaatcctcttatctttccttcagtcattggtcttgggaaactctgaagacattgtaacatttctttatataatattatttcctcagccaatagattatgtctgagaaaatagcctagtttttgttttgtttcattttgtttgttttacaaacttggagtttttccttagaagttttatgtccatttttgcccaactcaatgaatagattaagaaatgtctagatctatagagtataatagaggtgacctatgcatcagatcagagaagatgcaggtatgagctttgtatcccttaggccgtatttaaaacttggaagaagatggttgtgttcgtttttcattgctgcatgacaaataaccacaaatgtaatggcttactacaatacccacttgttatctcacagtcctgccagcagaagtgtgggtgggctcaacttagttctctgcttagagtctccttaggctgaaattaagatgtcagcccagctgaagtcttggctgaaggctctgagaatcttgcaatcgagctcacccaggttgttgacataatccagttcctcgtggttgttgaaccgaggtcacagctttgttgctggttgttggtcacggaccactctcagctcctggaagccaatcatattccttaatacattgcccctccatcttgaagccagcaatcttgtgtggaatccttctcacactttgaatctctgacttcctcttctgctgctggctagagaaaactccctgctcttaaaaggctcataaggttaaaccagatccactctattagtctctcttaaggacagctctgccatatcacataaggtaattatggaagtaatatctcattatgttcacagtcctcaggattagggaaagaaatatttgggggccatcttagaattctgcctatcgtcaaggaaattcctagaaaataactgtccagataagccactgattttcccaagcaaataatatttatctttatcaagtgagacattaaacaaagctgaacataaatatattaaaaattttggctttaggtgagactgaagagattgtagtaatctggttaggaggtacagggaagtgaggtatacctattttgtttattgcttgcagacctcaaatcatccgtagtgtaggtatactaatggtcaggtcaactatacatagatcatgtgtcagagaattttccaggacttctaaaattagtccttcttctgaacctttaatctggtagttctatttgcagaatagatccctacctattacatttatagaggttttgttgaaaacagtgttcctcagataatggtctgaaagtaatagattactggttgagatgtggaaacattcagtgatttttttctcttcttttatagacctacttgtcaaatgtgttacttactttggacatgacaaaacctccccattgcaagccagagtcattttagggaaaattttgccagttattaagaaaagtacaagagttagaatcatgatgaaagtatacagaggaagtgaacattttgtcggggagattatggctttggcaaagacaatcccgtgacaaacagcaaagaggccactatatttcagtataagtgtgaatggtgtgttccacatgaatgaagcagaaactgaaaaggggacatatgattaattacatgattgtagttgactccagattacatactaaacaaaatgattttctttcacaaattgacaagacactaggtgccctcatgaaggttttgatgagggacccaagaaaaaatgtgaccgaacatctttgcacagtttggctactgtctaatggacccacatccattagttttaggggctggcttgaattgaggacttatcagaccttgaccaccagctgtttgctttggatcactgtcttctaacattcagaaagcacaggaaaatcaggaacaagcacacatgaaataagactttttgtttttttggtggggttttgctatgttgcccaggatagtctagaattcctgagctcaagccatctgcctgtaatatgacctattaacaggcataagccaccatgcctggcagagataagactttttaaaaatagacagaagaggccgggtgtggtggctcatgcctataatcccagcactttgggaggccgagatgagtggatcacctgaggtcaggagttcgagaccagcctggccaacatggagaaatcccctctctactaaaattacaaaaattagccaggcgtggtggcaggcacctgtaatcccagctactttgggaggctgagacaggagaatctcttgaacccaggaggcggaggttgcagtgagccgagattacgcggttgcactccagcctgggcgacaagagtgaaactctgtctaaaaaaaaaaaaaaagacaaaagaaaggtaacagtagatgaagtagtgaaacaagtaaataagtaaataagcacattaattgagaaaatgtttgctaagtggtgtacttccaactgaaaatatctaattgtatctaattgtatacccatgtttaaataagataaattcagaactaggagctcagtgaaacaagtcagagttcgagttgttgttgagaaagattcacttggcagtaggtcagaaaaatgacctgagctggacacagtggcctgagattcatgcctgtggttccaagggtcccacaggacactccccagcaagaatcttcaagataatctcggcaggaactccaatttttgaagggctaggctactactcataatctgaaactaaaagctgatttattcctagctaagcaaggcacctagtgggaggaggccctgtgcttgtaagacacagtctctatagaaaaggaaactgcagttttatagagagttttaggaagcatattgtgtagggactccagaccttcagaaacaggagtgtttatgagtaatttagcatttggccatcaatgcaggctttgtggagggggtgttgctgactggctgggcttcagatatgtagaactgccagtaatgggctcgctttcagaaatgtgactggggatataagtagtcagtggccaattgggatgagtttaaatagttgcttttcactattgtcaaagaacagtagtattttctggaatgataagagtttccttgctttattctcaggactacaagtacaaaaataaaagtagagaaaaggaggatgaggtgcataacatggggagagcgtggctctgttatgtgtcaaatgtgattattggagcaggtatatttttttccagagaacagttcatcttagctcagaatatcagtgtgcagtatagcagcactggaaactcttctgtggtcattgtctcaggatccttggacaataattttcttgtttctcattagtgtctagtgaactagaaaatcacccaatgaatgaagaaggagaatcagaagagcttgcttctagcctgctatatgataatgtaccaggtaattatgacttaaaaatagtgaaaacagaaacagagttctgataaagagaaaaaggaggagaaaaaatagacttaaaggaagagtcaaatataaggaggagcagtgaaaggagaagatttcagaggaaaaagtaaagaagggggagcaacaagggtgcagaaaatagagtcactgggtcaaactgaaagtcttcatgaatcacaattttggcccaggagcggagcaatcagcatatgaaaatgagaagtgttcctgtgtcatgtgtttctcagaagaggtgccaggaagcccagaagcaaggacggaaagtgatcaagcgtgtggcacaatgggtaaggctgtctgagggccgtgggatgggggtggctcagtgggccccacagacccccagtagggtggaggtaggtgctccagtctgtccagaattctattctccgcatttgcttgacctgagcctttggggagctgcagggaggcaagagatcgttataaagtactatttaagaggatggactctgttgattagacatagatgatgtcatagaagtatactctttgcaatggcacttatcttgtgtattgcattagtatattaagttacacccaatcttccatgaagcccaggataccccagtgaacttctgctggtagataatagtgtcactttgctacaacttagaaaggccacactcaaaagacaactaatcccggtacttaattgtcaggaggaaagactgcaggtctactcttcttagcccaacacgtatttttgatagaagacccagggcccatcctagactcctagttctcagttcggtgggtttttggttcccctagaagaaagagaggaatgattatccaagcatctgtataaactcaagccttctgtagtatacattgtcctaaaatctataacttttatttattaatttctgtttcctcaccaccacttgttattttccagatactgtggatattgcaaacaactccactttgggaaaacccaagaggaaaagaagtaagaataaataagaatttatttgcttttggtattacaaatacgtttttaatgccagagttttaattttgtcattgttactatttctgttattatttgtaatactgtggtagacagaaggatgacctccctaagatgtctacctcctaatccctggacctgtaatctgctatcttacatgacaaaagggactttacagatacaattaagctagagaccttgaaatggggagatgatcctgggttatggggtgggcacaatctaatcttgtaggccttaaagagtggaaaacttttcctggctgtggagaaaggaagatgtgactatggaagaatcatcagaaatatgtcatgttgcaggctttgaagatggaagaagggaccaaggaatatgggtgacctctaggagctgaaaagacaaggaaatagcttgtcctttccagctcccagaaaggaattactttagccagtgagacccatgtcacacttctcactgacataactggaagaaaatacatttgtgttgttttaaaccactaaattggtggtaatttgttatggcagcaattaagagtaatacagattttggtacttagaagtagggtgtggctattaacatattcctgaaagtgttggcatgcctttgggattgggcaatggacagaggctggaagaattttagattatgatcggaaaagcctatattgccttgagtagtccttagtagaaacatggatgctaaagactgtgctagtgaggactgagaaggaagtgaagaacatgggagagaaagcctatattgcgttagagaaaacctggatcatcatgagcagactgttagtaaaaatatggaggttaactgtgttactggtgagcactcagaaggacataagaaagatgtggaaagggcctccttattatatagtggtctgtcctgtactcatgtgaaaagcagaactttctggatctatagctaaggagatttccaaacacagtgatcatggtgtgttgtggtgtcttttgctaattatagtaaaatgcaagagggaagaggtatattgaaggaagagctgctaaacgaaaaagaatcaagtcttgatgatttagaaaattcccagcctatccaggtcaaaaaacatgataaaatgaggagattcactgtcagggacgtgtgcttggtagaaacaacaaagactttttgccagttccctgggaagtagtgaaaggtcagattatacattcacaaaaaaagttatttgaagagacgtagcatgtgactcataagtccctcagccatctcagcagaagtcaaaaatagatgtgcgttgctacaaaaagaataaaatacctaggaatacagctaattagggaggtgaaagatctctacaaggagaactaaaaaccactgttcaaagaaatgacagatgacacaaacaaatggaaaaacattccatgttcatggataggaagaatcaatatcattttaaaatggtcatactgcccaaagcaatttataaattcaatgctattgccattaagctaccattgacattcctcacataactagaaaatacgattttagaattcacatggaaccaaaaaagagcctgaatagcaaaggcaatcctaagcaaaaagaacaaagctggagatatcatgctacccaatttcaagccatactacagggctacattaactgatatggtttggctgtgtccccactcaaatctcatcttgaattgtatctcccacaattcccaagtattgtgggagggacccagtggcaggtaattgaatcataggggccggtttttcctgtgctattctcataatagtgaatatgtcttcatgagatctaatagttttataagggggagtttccctgcacaagctctctctctttgcctgccatcatccatgtaagacgtgacttgctcctccttgtcttccaccatgattgtgaggcttccccagccacatggaactgtaagtccattaaactctttttcctgtataaattacccagtcttgggtgtgtctttatcaacagtatgaaaacagactaatacagtaaccaaatcaagatggtactggtacaagaacagacacatagcccagtggaacagaaaagagaacccagaaataagaccaaacacctacaactaactgatctttgacaaacctgacaaaaacaagcaatgggaaaaggattccttattcagtaaatggtactgggataatcagctagccatatacagaaaattgaaactggaccccttccttacaccatatacaaaaattatctcaagacagattaaagaattaaatgtaaaacccaaaactataaaaaccctggaagatgacctaggcaataccattcaggacataggcatgggcaaagagttcatgacaaagatgccaaaagcaattgcaataaaagcaaaaattgaaaaatgggatctaattaaactaaagagtttctgcacagcaaaagaagctatcatcagagtaaacagacaacttacagaatgggagaaaatttttgcaaactatgcatctgacaaagatctaacatccagcatctgtaaggtacttaaacaaatttacaagaaaaacaaacagccccattaaaaagtgggcaaaggatatcaacagataacttttcaagagaagacatacatgcagccagcaatcatatgaaacaaagctcaacatcactgatgattagagaaatgcaaatcaaaaccaaaatgagataccatctcacaccagtcagaatgactattattaaaaggtctaaaaacaacagatactgacgaggttgtggagaaaaaggaatgcttatacacactgttgctgggagtgtaaactagttcaactattgtggaagacagtgtggcaattcctcaaagacctaaagacagaaataccatttgacccagcaatcctattactgagtatatacccaaaggaatataaatcattctattataaagacatatgcacatgtatgcttatctcagcactgttcacagtagcaaagacatggaatcaacctaaatgtccagcaatgatagactggataaagaaaatgtggttcatgtacaccatggagtactgtgcagccataaaaaaagaataagatcatgtgctttgcagggacatggatggagctggagagtattatccttagcaaactaatgcaggaacagaaaactgaacaccacatgttctcacttataagtggtaacgaaatgatgagaacacatgaacacctagaggagaacaacacacactgaagcctatcagaaggttcagaaggtgaagggttggaggagggagaggatcaggaaaaataactaataagtatgaggcttaatacctggatgatgaaataatctgtataacaaacacccatgacacatgtttagctttgtaacaaacctgcacatatatccttgaacttaaagtataaaaaaaaaaaaaaatagatgtgtgaattcctaggaaagatctgtagggaagcttcatgtctaatggaggaaatcagaaatccccatgatatatgcaggagatccataagactcttgagggttttgtaccaagagaaacaaagatttccatgtcctatctcctagaacctataatctgttactttacatggcagaagggactttgaagatgtaattaagttaaggatcttgagataagatcacatgggccactaaagtcagagaacatatccttctgtcgagagagggatgtgtgactatggaagaatggtcagagagaatagagctggatgtggagatggatgcaggggtccatcaactaaagaatgtgggcagccttccgaagctggaaaaggctcctctgtggcctccagaaaggagcaaagccctgcagacaccttgattgattttagccctgttaggtgcatgtcagatttccaaccctcagaattatgagaccacaaatctgtgatttttttgtcactaaatttatggtaatttattacagcagcaataccttttgtaagacaaaaaaaaaatttcaccctatacggttatattcaatcttctaaactaacaatttatattttttcaaattacttacacctttatgctttttttttctgattttaaaatacttgttccctgtaaactttgctgtacatatttctatatttttttctatgctttgttagcacatttagaattatgtgatatatctaaatgaatacatttaaactgttacatttctttttaaatcaatataacatgcactggatattataaacatttaatatcttgccaacttaactgtaaaaaaaagttttatttcattcctgttttaacttacattgctttcatttttggtgcagttgagcattcttcatttgttattggccatttttgtttcttctcctacgagtgcctggaacttatattttgccagtgtgttgtctttttttccccatgctttaggacaacaggaatacttatatatgatatatactaagggttgactacgtgtgttgtcatatttgatgttattcttttacgtttctttgtggtataggcacatctcgtttgattgcacttcactttattgtactttgaggatattgtgagttttacaaattaaatgtttgtgacaaccctgtgtcaaaaaaagtctgttggtgccctttttccaacagcatgtgctcactttgtgtctctgtcacattttggtaattctcgcaatatttcaaattttattattattcttcttcctgttatggtagtatgaacagtggtaacaatgatctttgatgttactattctaactgtctatggcaccacacactgtgttcgtataagatggcaaacctaataaatgttgtgtgtgtttcaactgcttcactgaccagctgttcccctgtctctctccctctctttgactttcctctttcctgagacaaaaaaatatggaaattaagtcaattaataatcctacaatggcctctaagggctcaagttaaaggaagcgtcacatgtgtctcactttaaataaaaagctagaaatggtgaggcttagttaggaagccatgtcaaaagctgagaggctgaaaactaggcctgttgcagcaaacaatcagccaagttatgaagtgctactccagtgaacatacgaataataagaaagtagaacagtcttatcgctgatatggagaaagtatgagtggtctggatagaagatccaaccagccacaacattcccttaagccaagccttaatccagagtgaggcctaaactctcctcaattctatgaaggctgaaagatgtgagaagctgcataagaaaagtttgtggctagctgatgttggttcctgaggttgaaggaaagaagctgtctcataacattaaagtgcaaggcgaagctgcaaatgctgatgtaaaagctgcagaaggttgtccagaagatctagccaagatcctagatgaagatggctacactaaacaacagttttacagtgtagactaaacggccttttattggaagaagatgccatctagaactgtcatagctagagaggagaagtcaatgcctggtttcaaagctccacagaacaggctgagtctcttgttagaagctaaggcagcaggtgactttcccttgaagccaatactcattcaccattctgaaaatcctagggcccttaagaattattctaagtctactctgcctatgctgtataagtaaaataaagcccagatcatagaacatctgtttacaacatggtttactgagtattttaaacccactgttgagacatactcctcagaaaaaaagattcctttcaaaatattactgttcattgacagtgcacctagtcatccaggagctctgatggagatgtacaaggtgattagcattatttccatgcctgctaacacaacgtccattctgcagcccatggatcaaaaagtaatttcaacttgcaagtcttaatatttaagaaacacatgttgtaatgctatagctgtctctatacataatgattcttctgatgaatcttggcaaagtcaattggaaaccttctggaaaggattcaccattttacatgccataataacattcatgatatatgagaggaggtcaaaatatcaacattaacaggaatttagaagaagttgattacaatcctcgtggatgactttgaagtgttcaacacatcagtgaagaagtaattgcaagtgtggcagaaatagccaagagaaccagaattagaagtggagcctgaagatgtgattgaattgctgcaatctcatgataaaccttgagtggacaaggagttgcttcttaagaatgagcaaagaaagcagtttcttgagatggaatttatacctggtgaaaatgctgtgaacattgttgaaatgacaacaaaggatttagaatatattagttgataaagcagcagcaagatttgagaggatctaccgtgataaaatgctactcaatagcattgcatgctacagagaaatctttcaggaagagccaatcaatttagcaaacttcattactgtcttattttaagaaatttccacagacacctcagccttcatcagtcaccaccctagtcagtcagtagccaccaacatccaggcaggactttccaccagcaaagagattatgacttactgaaggctcaagtgatcatgagcattacatttagcaataaagtatgtttaagatatgttcattttattttagacacaatgctattgcacacttaatataccacagtatagtgtaaacataactttcatatgcactgggaaaccaaaacatttgtgtgatttaccttattgcaatattcactttattgcagtggtctgaaaccaagtatttctaagatatgcctgtatctttatcccaaagaagcttgaaatttttatctgatcaaatctgtcagccttttcatttatggtttccaggttttatgtaaaatttgcaaatatattgtccacctcataatttagaaacatgtttacttacttctagaatatttggaatactttttaatgtttaaatctataacacacatggaattcatttattggtatatgatgtgagatggtaattaagagatataacactggtagtttttttcttcatgattcaaaatactattttatgtatgttttccagtatatacagaactgtgtcttatcacatttctttatccattcatctgttgatagagacttaggttgtttctatgtcttaactactgtgaattatgctgcaatgaacatgtggatgcagatacctctttaagatattggtctcatttcctataaattcataccccaaagtgagatttctggattgtatgtatttctgtttttaactttttgaggaacctccatactgttttccataatggctgtaccaatttacattcccacttagagcatacaagagttccttttccccacaacctcaccaacacttgttatctcctgcctttttgctaatagctatcctaataggtgtgaggtgatgtttcattatggttttgagttacaattctctcatgattagtaatgttgattgctttttttataatccattggccattatatgtcttctttgggaaaacatttattaagatcctttgcccatttttaaatcagattatgacatgcttttgttttgttttgtttttttgctattgagttatgtgagttccttatatatatttaggtagtaacccttatcaaatacatggtttgcaaatgttttctcctattccgtaggttgccttttcatttttacaattatttcatttgctgtacaaaagctttttagagtgatgtaggtccacttgtttatttttgcttttgttcctgtgcttctggtgtcatatctaaagaataattgcccagactaacctcaaggagcttttcctctgttttcttctaggaattttatggttttatatttgacatttaagcctttaatctattttgagttaatttttgtatatggtgtaagccaagcgtctaatttcattcttttgcttgtggatattcagttttcttaggaccatttattgaagagactgtcttttctccattatttattcttggcacccttgtcaagattaaatgccccttcttgacatctgtattcagcatagtgatgtaagtcctagtcagagcaagtaagaaagaaagaaaaggcatccaaattggaaagaagttaaattgtctctgtttgcaggtgacatgatcttctatgtagaaaaccctatagactccatcaaaaaactgttggaactaacaaatgaattagtaaggttgcagaattcaaagatcagttgtgtttctatgcactaacaatgaactatccaaaaaataaattaagaaaacaatcccatttacaatagcaacaaaaagaataaaataggaaccaagttaacaagaggtgaaatatttgcacactgaaaactatgacattgatgaaagaaattgaaaaatatacaaataaatggaaagatatctcatgttcatgaactggaagaatagtgttaaaatgtccatattacccaaagtgatctgaagagtcaatgaaatctctatcaaaatttaaatgacatttttcacagaaataggtaaaaggaatcctaaaatttgtattgaatcataaaagactccaaatagtcaaagtaattttgaaaaaaaaggaaacaaactggaggcatcatactgtctgattttaaactatgttacaaagcaagagtaatcaaaaccatatggtactgtcataaaaacagacataaaccaatgcaattgaatagggaacccagaaataaacactcatgcatgtatgttcaagtaatctttgataaggacaacaattacagaattttctttatgtagatgttccacgcatccacttttcttatctgctttattgagctgtaatttgcataaaacaaattcatcaccttaaggtataacctaatttgttttaacaaatgtgtgcagttatataaatacctccacaatcatgacatgtatcattttcatcaccccaaagtccacttgcattcttctctccattctctggttctcgacaacagctgatctgttttttgctagtttgttttttaaaagatggggcctcactgtgtgttccaggatgaccttaaactcctgggctcaagtaatcctcctgcctcagactcccaaataagtgggaatacaggcatataccacccctaaaccaaggtgtttttttttttaatttgcaacctaatgtgtggtcaatatttgtaaatgttttctgccccttgagaataatgtacatttgaactatttgttaggctctggcttcactccatatatatcttttttatcaagcacaactttcttgtttaaatttgtgtccatagtaatttaaattttatttgctccatcagatttgcatacaaatgtgttaaattcttgcacatggttgtatatttgccaattcctctttatcttgttgctttactttaaatattttgaggctatttatgatttgtaactttttaatggatgtttttcttttatcattatacagcattctgctttatccctgttaatgcttttgccgtaaaatctcttttgccaagtactaacattgttacacaaacttttatgattttttaaaaatattttccactcactttatgtgatgcccttttgttcagttttcttttatgtctcttgtaactgcacttaacttttgtagttttgtctgatattcctagcttcttaataggtaaatttcaatttgtttacatttattgagtttccagatgtatacggacctatatcttctgtggtattgttgaccattctctatttgtatctttcgtgtctccttcctgctttttaatggattggtataaaactatatattctcccctttctccctgctggtttggaaattaaagataaaatttctgtaagcttttaaattatgccccaatcccaaaagatgacaaggatcttatcatggtttcactacaaactgaacaccccatctctaccattttggctattgtttaatattttatttttaactataaattttgaaactattatcatttttacagttgatatttacttaatttaaaaaaatattttgtatactcaccattgttctttttctttggtttcactttttgtctagctgaagtaaattctttgttttttctagtgagtgatctctaagtggtaaactctgtaagtgttgggtgtacaactttttctttactttgatagaactttttagctacattaaaaattccaggtcgataatttatttcttctcagtatagtaaggtgattactatattatttcctggaatctatggtgtggctaataacaattattctcttattgtaactaactgtaacttcttggtaaatattctgtcctttctctctaaaagcttttattccccaaaatttaatcacgaaaattttaagcatacagaagacttgggagaattgtacactaaacatcaatatactttcacatagattcacaattaacattgtatcattcctgctttatcacttttctattcatctatgcatttctctatccactcactaaccggtggtcaagtttgaaacatttcaaggctgcagacgttagcactattccccctcaactacgtcagaatgtatatcattaagtagagttcaatgtatgtttagagttcttttgttaagataaaatttacaatgaaatgcacaagtattaagtgtaccatttgatgagttcttataactgcatttttctgcaccatcaaaattcttatcaagatacagaacatgatcatcaccctggaaaggttccttacgccctttctggtgtatctccacccactatccatcagggcaatcactactcttctttttaactatgataatttggcttttaaaaaactttatataaataaggttttatagcatattctctttagagtgggatttatttcacacagcatgtttttgagattcatccatattgttggatgtctcagtagtttgttctttttcattgctaagtagtgtacattatctggatataccaaattttgtttataattctcctattgatggacacctcgagttttttaagtttttgctattatgaaaactctgctgagtacattcttgtaggagtcttcctgttttttcgtatctcctgcataaatacctagaaacaaaattgccgggatatagagtagatgcatcagttctttcccccaggacccatgaaaaggatggtgcagagcaagcccaggtggatgctgcactcataggtgtgtgcagcagcagaagaatgcttcactgaggaaacctatgggattataaggggaccaatagcaaacctgcccaaaccttacctctgagggagacattatctttttagctggaatttaagcaattctcctctggggatattaagcaaatctcctctggggatcttaagcaaatctcttctggaggcatctcctctggaaaatttctaaggagggagatgttctctactttatactggtcagggatacatttgccctataatctggaggctacatgatctctagcttccaaggccgctttggtattcaaatatccttgaagtgatactctgaggcacgtagaaatgccatggagaatggcctcccagcaaattcaccccacatttttgcttctggcaaatttccccatgaagacaccaccccatcagccactctgattattcggacccatgggtccacatccattcaatttttttcctgcaacatttaacaaatcttgacccagtgcagcggctcactcatgttatcccagtactttgggaggccaatacaggaggatcacttgaggtcaggagttcaaaaaccagcctggacaacatagtgagaccccgtatctacacacacacacgtacccacacacatttcataaactgtaaacgatctaggtcccttatgagcacctctaaggtacaagtccttatgtgagggaggcaagttagtgcctggctttcatacaagaagcacaatcccaagggcacacgtggtgctcccagaagggaagtgtatacaattgttgggcttccctgagtgggatgtacattagtaagggagaaggtgaacagtgtctcttacgtggctcctggctggctgtaagccttggggttcccagttctgtttatccttgatttgtttgtgtgtggctggggagagggtgggcatatgggggactgcttgaggacagtctgtccaatctgtcctatttgtccatgtcaccaaccaggtggcagtcccccctaacaaatgactgagaatagtggtggagactatgtctagagggttctgtgtgggacctcagaagctgggcccagcccctgccatctcatggctggtgcagagaggctgactcagcattctcagaggcgggagcgctggagtagtgtgttttccttctggacaaagcatccttgggttcttctgaaagacagatatcaccaatgctcctgttttctcccatacctctttagatgtctggatttttgctcttgcttcactgctgcaaaatctgctataccattccagtggctgtaccttcatcttttgccctaattatctccttttctcacttagactttccatctacaaaattagatagaagtagaggaaaagcattttataaaatgtgcctggagttaaatctgaatccctaggcactttgaaggccatagccaccaggctggtaggggaaagaatgaggcatcatccctaggaatgaccagggtcacaacagaatcctgaattttcaagataggtctacagaacactcgcaatccccaccacttttgtcctggtcactatccaggaaggagatgatccctttctggagattgctcccttcaatgagcctactgccctcccatagtgtgcggacaggaggagatgagggacagtcagaaaatcagtgcactgtggagtcacttttctgataaagggcacgtcagactgcaaatggcccagatggccagtttgaggacactgatgagtttctggggtcaccatagcgttcctggagtcagctgctctgcagcctgaaggagggctgacagtgtggaggcagtgctgagattatttaaggaaactatatagaaattctataatgattatgtaattacataatgaaaactctccatatcagagttcagaatatctcccaatttccaacacagaatattatccataacaccatcaacctcaaggaggatgtcctctcattgcacatttgaatttacacaacaaacacttgaaaaagcaacatgaaacagcagttatcattcactttaaggtgccagcaagagttaattttccattaaaaattttgttcaaaggaacgtcatctcctgtagtctctcccaagcccatggcccaaggctcatgcagaggtaaaatataactctgtactcaacctccacgctgctacactgatcataaagtattttgccccattcctgcggaccaaagtatgaaaaaaaatctttaatactattggcatataaaactcagagaattatatttatacctctgcataattaactttattctctttggtttgaaggaaaaaagagggggcatggctggagcagaatgagaatgagaaggcaggaaaacagccaacaaaatggtaagcaggcaaagtgaagtagttacagcttttgagtttattagggcactgtccattgtattctggaaggcctgcagttccccagagccagagttctatacctcctgtatccattaggatgtagactaacaggctgtgacaaagaggcctgagaatgcaatggcttcaacaaaatggtttctaatgcatgtaatagtccagaggcccacagttaatagggaggtgttatcatcctcagtatgactttctttcctagctcaaagtatttttattaatttggaaagacattcctaagagggctaaatgaagaaatcagggtgtatgtgtatgtgtgcacaatagtaaacatacatatatgtataaccatattttatgtgaaattcatacttgtgaagtatatttttatgtatcctgatatacacatatgtaattatttatctgtacatataaaaagacataaatatagaaaaatagatggcagttcattcataaaaatatatgcagtggttacatttggtcagtgtaatagaggtgatgtttatatatttttatctgtggtttttaaatgtatgtgtatatattaaaatattataaatcttcaacatttttaatgaaaaagtgttattcaaaaagtaacatatgcaaaaagaaaagactaggagaatatttttgcacaaatcatcatctggagatagccatcctcatctgtggctatctccaatggtgatgtttcatatcattttattttctgaatttcctgtaaatatatttattctttataatcaggcccctgaaattttcaaaatttattttagccatggtctgaggacttccattcttctagacgatgaaggctaagtctcattttctaaatgattgtcaattttgaatcagtggatctaaatagtaagattttagagtcctattgaaagttattaatttttaccaatcttgccagttgatgtggcttcctggttggtggatgtgacagctttgtttggaaagaaaaaaaagtggctgcgtgcattttaagaatggctgttttcaaattgaaaatttgtttggactcaatcattataacattttcatttaagtctgaatcattataacattctcatttaagtctgtgtgtatgtagacaaattctaagagacttcaatgtgcaattaaatcctgtgtgtaacttaaaagtcgacactcccaaaagcaaaaaatgctctggacacctgctcgaggggatccagaatgagacccaggactccctcacttgcgtttgttcctgcctgacagctgttgttctgcccagttctattaatacattttcccctgcctatccccagataatagcaaagccgacggccaggtggtctccagtgaaaagaaggcgaacgtgaatctgaaagacctttccaagattaggggtaagataaagtttgtccgctttccctttgccctacaggtcaatacaaattttactgaggtattgacgagcctagatccaccttaattgtttactcatcaagcttagtcaattggagagcagtgaaatctaaaagagcaaactcattataagcaggggttgtaagttgattgtattcatatcatagatcttatctgcccagtttctaaaatagttttcctctgtgttttatctcattttcctggaaattcctttgcctcaaatcattgttttattaaaatggctggacctggtaaattgtaagccgaatacaggtttattctctcactgccctttcaagtcctcctcctagatgagttctttcctgtcttgagcaagctctgtcgctttcttgttcccttttaaaaacagtaagagtctcatttcagtagttgggacctttctgacctagtattaaactacaatgtcttccccagtttaaagcaccttcgcttcttcagcctaggcaagccttagtctggaacacatatagttgggggtgacatggtcagtgtcttctcttattctgtcttggccctacccccactccatagctgttggcttggtcccatccaggattggggaggtgagagagatgggtgagatcagagtgtggaagtgtcttgcctgacaggtgcagccgtgaaatgacattgcaagtggttgatgcacaatcactagctctttcttccatgagatgctttcatcaagtccactgcaagggaaggggaggggtcaggcatcacagcttgacttattttgaaagaaatagagctttacttctacaacctggatgtgagtgaagggctgaacctggcataatcagttccaccaactctttctaaggttacatatgtggcctggtgcattgtcctaggatgcgggtgctcaactcaacctacttgcttgggactttctcaattttcccaatgaaactctcatttccaagccataggtccactttgggtctgattggtcctttttactttggtggcctaatatgctcatgatatgcttagaacttatagtacttaggaatgcataggctggaaaatatttcctcatgggcctacatgaccctgatcagcacccccagatggtggtcattggatggtggacatccagcacaagaaggaaggaacattttgctttcctgccttggaaaataaaacacatttggacaatagtaaacattgagatgcccattcacagccaattaacatgcacttgggagaatatcatcggctgcagtgtctgccatgtcaatccttaattactatttggaatgaaggctgcggaaatctcaattctacccattcctcatggttaaccttcttctgattagtttcttagatcctaatatttattttgtccaaagccatgtggacaaagccctggtcacatttactattactttcagcacgagggtacaaatatcttcccccaatgtgacatgtgcagcatacatctcacctatgggacacctaatagggtttcccttaagtcacagaactgtcatttatttgtgtctctgctgagagaaactgaaacgccttcacttaattttgtagttttgtctcaattttctctgaatattttagtttctgtaatgacggtaatcatcattttgatcttgcaaagattaaataaattaatggatatgtaagtgtttaatgtgtattatatgtcatatatatttcaaatatatatgtttggaatgaaatatgaaatgaaccttcaaaatatggaatgaagcatttatacttttgcttgagatatacgtgaaatactgatttcaattagtttttttcctaacataagaataggaaaatgaaatataaagtgaacctaacattagctatctaattcttcataccttaaaggctagggtttaaatctttttatttatacattaaacaggcttttggaaagttacatttaaatggaatttttgaaaagctgtaatatgtgtaatacagctgctcataaatgactgtgattatattattctactttctcagggagaaagagaggcaaacctggaacccgcttcactcagagtgacagagctgcacagaaaagagtccgatcaagaggtaaaaaagaaaacaggaatgaactttcaataactaaacatctaatttcctgtgcggtacactgtactttcagtaataaacccatttccttaattgttttatgaagctgtactaactagtgagaaatgtatcctatttagtcattttccaaaatgtgtcaaggaaagaaggaagtaagttggtgatggatctacaaccagatcccaggggcccaggggccactaaagtgctactttcactgaaatgataaatttcaaggctggagatagttcattgccgtataaagggtataacccataagtgatttaactgaccttcctctgactactcagaaagccacaggttgcacactaagggtgaaaaagagttgtggttagagatctgtgtcctaagactttctttttctttgtgtgggcttaggctgatcatttgactttctttgtctcagttttctcatctggaaagcaagagcatgaattaggccaactatctttctttctttctttctttctttctttctttctttctttctttctttctttctttctttctttctttttttattctttaagttctgagatacacgtgtagaatgtgcaggttctacaacccatcatctacattaggtatttctcctaatgctatccttcccctaacccccaaatcccgacaggccccggtgtgtgatgttctgtccctgtgtccatgtgtccttattgttcgacttccacttatgagtgagagcatgtgatgtttggttttctgttcctgtgttagtttgcccagaatgatggtttccagcttcatccatgtccctgtaaaggacaggaactcattctttttcatggctgcatagtatttcatggtgtatatgtgccacattttctttatccagtctatcattgatggacatttgggctggttcctagtctttgctattgtgaacactgctgcaataaacacacgtgtgtgtgtctttatagtagactgatttataatcctttgggtatatatccagtaatgggactgctgggtcaaatggtatttctggttctagatccttgaggaatcgccacactgtcttccataacggttgaactaatttacactgcaaccaacagtgttaaagcttacctatttctccacatcctcttcagcatctgttgtttcctgactttttaatgattgccattctaactggcgtgagatggtatctcattgtggttttgatttgcatttctctaatgaccagtgatgatgagcttttattcatgtttgttggccagataagtgtcttcttttaagaagtgtctgttcatatcctttgcccactttttgatggggttgtttttttcttgtaaatttgttttaagtttcttgtagattctggatattagccctttgtcagatagatagactgcaaaaattttctttcattctgtaggtaggccaaccatctttcttattagtccatcctggtcctaatagtctgcctttctaaaaatttgtctcaggaccaaggacagctcccccgtttatcatgacttctgttgcccaggctggagtgcagtggtgtgatctcactgcagactccacctcccaggatccagcaattctcctgacttagcctcccaagtagctgggattacaggtgggcaccaccatacctggctaatttttgtatttttggtagagatggagtttcgccatgttggccaggctggtctcgaactcctgacgtcaagtgatccacctgccttgccctcccaaagtgctgagattacaggtgtgagccaccacgcctggccctacacctttggttggaagggaaggattcactgctcaccctcctggagttcctttgaagacctttcacccccttctctgtgaaatcaggtctccagtcccccacctgcaaccccatataattttcagattattctagagctccctgagctcttctcttagctacggggaaagcagacaggacagagaaatgaactaaaggagagaacaaaaatagaaggcagacatcatctccattaggttatcccatcattaccctctccctgcttgccccgtcagtgctcaaatggggagactgaatatgatctctggagtcatctaaggctacccacctgcagcaaaacagcatagctggagagcttctgtcagaacagtgacagcaactgtgtttcattgtcatataagaatcagtggagcttacgagattaggagttaaaccagttttactgaagtctaatttctctgctaaagcattctattttgtatgaaatttgaaaggtgaaattggggtagacattctgtaattatgtatcaaaaatgccacttggaagaaagactttgaaactctagagggttttggaatagaatttcctaagtatccctcgtgtctttataggaattacctcagtagggaggggggacgtgcctttgcaaagtgagacagaatgaagaaatcctctctttcagcttcaagaaagcacaaagatgaaactgtggattttaaggctcctttgcttccagtgacctgtggtggggtgaagggaattttacataagaagaaattgcagcaaggtaggttttatggtcttctttaatttgcagctcctatctgaaggcatcacaagtagtggggaattatcatgtgaattacacatcattcaaggagtttggtcccagtttggcttgagggaaggaggaagggatttctaagatgacgtttacagactttaagaaatcgcaaccaccagatgctcacttgcacatggaatgtccagagggtgcccaaagaaccaaagagaaggcaggaacatcaattcacagatgaaaaatgtcacgtattttactttgaatcagacagaaaaatgaagaggccctcaacctcgaccttcatattctctctcccttctggagtgccatcaccagggcagggtgcttggtatagggagatgatcacagaatttgggatcagaaagcctgagttccagcctttgctgtttcaggagtgactgttccattctgagtagagaagggaacctttctgaacctgaaatgtctcatccaagagagggaacaataatgaaaaacctgcctcatgatgtagctgtgagaattaatttgcatattgatgtaaaatatgtaaatttacatgtttttactgtaaattataaaactttgccaaaaaatgtctattagaatggccatcatctcagaccaatcttaatatgactctttggatgtcaattaacagaaatgtttgcattgtgactatttctaaacagctttactgagatatagttcacatatcatacaactcaccacttagagtgtacaaatcaacttttttttgtatagtcacagaattgtacagccatcattatcctctaattttggaacaatttgttccccactgaaagaaaagcccatgtcaattagcagtcagtgcctattcccacctaagcagccactaatctattttctgctctataagtttgcctactgtaggctttctagaagtggaatcctataatacatgccctttcctgactgccttcattcactaattgtgatattttcaaagttcatccacaatgaatgtattagtatttcatttcttttattgacaaataatatatgtcattgtatagatataccacactttgtttataaactcatcatttggaactatttccactctttggctattataaataatgctgttctgaacatttgtgtaacaagttttgtgtgaacatatttcagttcttttgggtatatagtcaagagaggaatgactacatcgtatggtaattctatgtttaatttattgaggaatcaccaaagtgtttccacagtggctgcactattctgtattcctaccagcaatgtatgaaggctccaatttctctacatgctcaccaactttgttatcgtctgtctgtctttttttattacagtcatactgtcatcctagtgggtatgacatggtatctcattttggttttggtttgtgtttccttaatggctaatggtgttgagcatgtgactatcttttacatataaattaaattttttatcagataacatttcacaattagttttttaatatcagctacctgtgattgcagggatatgaaaatttctgtttaataatgccactagactgcataaaacatgttataattgagagtgcagatgttgcgggagtgaccccctgagccacagggcacccatctgagaccgtagccccaagttgaggattctgcctccaacattgccctcacagccatctggagactcaggcctggcctctacttccaaatttgaatagcaagttggagtcctctcatctttcagaatcacttgcttttccttctgtaagtgcttttgaaatgcttaaaaggttgctcttgatgataaccatcactctcctcatggatgaaggtcaaagaaatgtgcacccccaccaggaaatatccttagaggggattttcaggctggatttggggcctctgtagtctgagagggaaggccagactctcctgctattgatctgcatcacaaattgggtggctctagatccagtgtggtgagtggccatagtctgtgcgctgggaaaaaagagggctcaggatcaagttaccctggtcttacaggaatcttggtgaagtgtatacagactgaggatggaaaatggttcacccccacggaatttgaaatcaaaggaggccatgcaagatcaaagaactggaggctgagtgtgcgctgtggcgggtggcccctacgatggctgatggaggtattccaatgacaaggggccaggcctgtgttccttcttgttccctaataatgaggagactgtttattcaccaaatatttgttaggttatagctaaagccttgatgccagtgggtttatcctctcactcaggagagagggaccccacattcataaccacactacagtgcaacacattgacgttgtaccaggggctccgtcaggatagactcagcagcttggaggaggaaagggtcattctgactagggtgcatgcagacagctttgtgcactgaaagaaagaagggagttgacagtcaagcagtggaagaagacacttcagagaaagaatggcataaaagccagaatgccatgaaaaccagaaccatggcaaaagtagctctgtggatttaggtagcacaggttgtgtgcaattaggtataatttaacaattggggcaggttgtgcagggctttaatgccaggctaaggagtttaaacctgtaattgagataacaaggattcagtgaaatcttctaggattggaaatgacatttaaaacaatattttattttatttatttatttttaggagacagtctcactctgttgcccaagcaggagtgcagtggctcaatctcggctcactgcaacctccacctcccagattcaagtgattcttgtgcctcagcctctcgagtagctggaactacggttgtgcaccaccatgccaggctaatttttgtatttttagtagaaatggggttttgtcacgttggccaggctgatctcgaattcctggcgtcaagcgggaggcctcctcggcctcccaaaatgctggggttacaggcgacagccaccccgccccgccataaaacagtattttagacagccacggggctttccccctagcaaacctatactcaatctagaatgctcagttcaagtgttaccccttcctgaatgttcattgattgacctgtcatgggccattgaccaggccttcccagggctcctgagccctctactaaggcctttcattcactgttttatatttattattttgtgagtgctttttgtccgtagactcctttaggttgtcccatcttcatgtgcccaagattgatcagaattactgatacccagtagcaggcaatgtgtgtgctgcttggatagctctggtgtaaggactccagctggagtggcactggtgggactggaagagaggtgataggtggtatgagattgtgaaggaaaacctcttaggacttaggaaagaagcacaagagaagggaaaatggtcctgaagatgcttttctggcttctattgattgaagtctagaagaagcacaggtgaagacagggagatggtttctcattagacaccttggatttgagctggcagtggaacactcaggtagaaatatttgggaggaggttggaaatgccagactcacaaaacggaaacacaggctgaccatatacctgaatctttttgtctttcagaatggatttctgcctgatcctccaagaatacgttacaggaaaaaaaaggtgattattacatagctttatacagcttcttgtcacataactgatttagcatgcacaaaatcttattttatggggtctgaaattgggtaggaataattaagctttcaccttcttcactactcaccttaaaatactttttgcatgtattccttcagagtcgctaatttgaacactaaatgtatataaagctaggtcctgtttggattcaaccatttcatatgaagatgataaggagccatcagaatatacgtcctgggagtgttttagcaatagatgcagatgtcttaagagtgtccaagttggaaagtcaagcatggtcatgggatacataaaaatatttcatagtaaggtgagaggatcaccttcaactcaaaattcagatttttttcattgaagttactattttctaactttagtgaaataggatggagcagatatttgctcacatccatttgagacatgcatgaaaccatatatcatttaatgaaatcggcaacaaaaagaatatttcttttctgatccttcacattctctttcaccttccaaaaaaatgtacacacagacacacagaatgtcttctcaaggtgaaattatttcctgttaccacaatggtgccactgaggaggaagatctccagaggcaaatgtattttataggaggggctgaccaggaaaatcttttatgttgatgccacctctttggctctaccagagggactgtgcagacctgctttttatctgtgaaagtgatttttccctctcttgaagaatgcaacaaacaaataggttaagtgcagtgtatattcaggacaaggtgatggtttttccaagactgggtatgaatgagaacctgaggagggggaagagaaaaatgtcatccttatgcacttcaggtagaaatacgcattcaagacattcacagacttctaaaacagctcacacatagctagccactaagcttcatattccactgggaacctgagatgcaggcctttacattatctgatatactggctgatttgaattttcagccactgagacatttcatccactgggtttcccgaagggaaactatgatgtcacctattcagtgactacactaaagaccagcatctctacctttcaccgggtgccaagagtaactgagtctggatgacccaaatgagctggcaatttccgactaaccgactctccctctattctggggtgcaaaacttagcagcgacaaggtgcagttgcctctatatgttgtgtctcctcatgggggagaacagaaggtcccttaagtggcagatccaggatccattatgaactccatgggtcctctgtgcctctcagagcttctcttacttgcagagccatttggctttaggaaatttcagtgtcactatgagtgccacatgatagcatctctgctcatgacaagggccacatagaccttttggtggcacctgagatattgtaaagcaatctgatatactcacccagaataattgttgtatgctaatgtttgcttaagagcctccagtgatttctaagtgaatcaacattcatttattcacccactcaacatataattatcaagcacacactaaatgccaatggacattacagaagattgacctcaaaaattatttcaggccaaacatggtcacttgagcctataatgccagcattttgagaggctgagatgggagaatcattggagcccaggaatttgagaccaacctgagcaacatagtgagataccatctctaccaaaaaaaaaaaaaaattacccagacattgtggtgtacacctgtagtcccacctactcaggagactgaggtgggaagatcacttgagcctgaaaggtcaaagctgtactgggctgtgatttcatcatagcactccagcctaggtgactgagtgagactctgtctcaaaaaataaaaaaagttttaaatttattgtcaacatggatgaattacaaatggggtggggtgggagattctagaccagttggagaggcattcagtgacaaggtcatctctcaggtgcttgtcctttgaatcacacttgtttatggcctctgtgccctgggctacagacaaaagctgaggctgcttgtatcccagaagggaaggatgccaagtcatgccatggatatccaaaagcaatctaaataaatgtagtgggttacctcttaaaagtcagtcaacctggcatcttcttgtgatttggatagaagggagagggagagagtttcaggaaaaagagctgcagcacagaggaccttggaggcattttatcaccagggctgtgtccctaggggagctgcagaaagcagtgctcttcttgtctgggacacttgcatggcctctaggactctgagtcctgtggtcccaggaggctgtgggagataagtcctcagcctgattattattgaggctcctctgggtgggatgacacaaaggccaagtttaggaaatatgcctgagggccccttgaagtaagaggacaagtagagcttctctgacttggcctgtgcaaactaggtccagactccctgcagggaatgggacttgcattgggattaacggtagtacttgcacactttttattctttcagtagatatataggtccaaaaaatcagatatgaggtaaagggaagactgtttacaaaaataaaactttagacaaaataaaatttatagcatttatttgagcaaagagcaattcatgaattgggcagcactcagaacaaggagaggttcagagaactctgctgtagcagcccagacagtgaggccaacacaggagtaagacagagaaactatatttaatgggttatcatagaaagatgataattagaggttagatggcagattctagttggtaaaatctctagtttcattttactgtttacatcaggtttcagtttgcttacttagaaacttaaaccactggagccaccccagcctactggccttctctcttcccaattattttttaacaactggttcctgaatcccttcaaagaatactatttaaatttaaataagtgatagatggaaacaatgcattcaatatcataaatcaatctttctgttttttcaacagagaatactgaagtctcaaaacaatagctcagttgacccttgtgtaagtacaaattctgaactacgacccccagaatattccactcctttctccaggcatatgttctgtgtcatgactgctgttgcctgaatcatgttcagtctcagctggagtatgtggctgtgtgaattcagttgcatcacccaagccaggtagatgtgcctgggccttggatgtctcattatgaaagcaccctttccatctgtttcagtagaaaccttccaatgtccttatttcccctggaaagtgagtatgggaggctgagctccagaccactgaggtctcttgagacagagcctgaagtggtaatgggtagggctggcctggtgattagggggaaggaacaaatgtgagaggataacagcattttcaagtaagtggtgtggatgaaagggaaagtcctaaaaatgcactccaaggtgcaggtagagttgaagatggtcataagcatcagccagaaggaacagaccaggccaagctattatgttccaggtgttgatcctgtcattagccctgtaaaggagtacatacaaggcaaggggtcctttacagagctcatttggatggtttcagggaagccattagggtgctgagctggttaggactgaaaccatcacgacctagcaaatcctgaggcattttaactcaactgcttatctggtgctcagtactatgcaaactttctgatgccacaggccccatccattctctgcttgctatatgactgcctgctttggattctgccaaaatcatggatgagtcccttctctaaatgaaatcgtgatttgattcttttcattgcagtgagatgtctgttttaggccgggtcaccttcttgcacaactctgggggacagcactcacatagaatatcatgcaatagcactgacacatgatacttaacagaggagggatgctcaaatagttttatacacaccttacctccaaagcagtcctccaatcagatttaggtcttttccacactgattttgatgtctggccaactgagggacttttcaataattaaaacagccctggaagtcagtgtttgtgtggctgattttggatggactaggcatggaggtttaggtttcacagctcacagccagatatgtgtggggagaagagggaaacagttccagcaaaggtatggtcacccctgttaataatttttccaaggccagtaacaacattgacttataatatccccatgcgtccataaccagactttgcttaggttgaatctcatattgtcctgcagcctggaatcacttgaagagctttaaaaaaatattgtttcctggatcccacttctggggaaattataatttaatcattctggactatgtatgactggaacattaggatttgtttaagatccccagatgtactaattctgatacatagaattgcctattctgtcacctaaagaagaataccagtgcctgtgcctcaaccctgacccagtgattcagaatctctggtgttgggttcaggacattagcattttatatactctcctgagaggagtctaatgtacagccaggccaacaaccaaagaaccagagaaatcaaatctcttcttgaaaagatgggtttggagaacaaaatggcagataggaggcaggactaacttgctcctcctactcagatggacagaacagcgtgttgagactcacactgtgaacttttgctccaagaaccactgcaggaatataccagcaaaactgaaggaagtcacacaccctttaaaagaagtggcttgccaccgcaaactctgggagatagccaaaaaaccgtgagtcctcaaagtgtgagagggaaaaagtccacctctgaacacatatcctcactggggaacctggaaatccagatcacaggagaaggatttcacctaacctagagctgaaatgaatttagaaagctgggtgaaatataaaagtagaataagcagcaggaagaggtgccttccccaaggatccctataagcatttcagtccccagggaagccatttctgactttatctcacagtccttggggagggcagccagtacaatttgcagagagccatggggagaaggaggcttccagctgaactttgtaataattttaaccaagcacaaattttcctggtcagaatctgggggtgtgaacctgaagtacagatataagtgcagaagccatggcaggcagggaggggtgagatctgaaagccctgcttgctttctcaatgggggtgcttcttcctggggcaagatcttagctccaggcaaaggatgcctggatataaatttggctctgttggctgttgggcaccacagcgggagtgagactggccttgctggctgcctgggtgctgggtgaagcctgtcactgccggcttcccttacttatctggtgaactgtatgaagcagcagaggcaggcataatcccctctggaacataaatccattggcctgcaagccacccctcatcccccacagtggccacagcaagccctgtctgagaatctgagctcagacacacctaaccctgcccccagctgatggtctttctctacctgcccctgtagctgaagacaaaagacaggggctcatgggagctctatgacctcacccatcacctgagaaaaccgaatacttatccagtgaacttaggtcaagcttgtatccccctcatattacttgcagctgatggtctcttgaaagtgccacctcctcgccgaaggtcagccaactcaagtcattacagacactcatacgagaaccaccttgctccaggaaggagaaaacaacaactaattatactgcctgtaacatcctggctaaccaaagatcctgagtctgtccctgtaacaacctcactgctagcataaccaacatttgagaaaaccagtgtactaaacaaaactacaatcaaggactctcacagaatccacttcactcccctgctacctccactggagcacgtgctggtacccatgactgggagaactgaagacagatcacatcacaggaccctttgcagatactccccagtaccagcccagaacccagtagctcttctgggtggctagacccagaagagcaataacaatcacagcagtttggctctcgggaagcccatccctaggggaagggggagaacaccacattaagggatcaccctgtggaacaagagaatctgaacagcagctcttgagtttcagatctttcctctaacgtagtctacccaagtgagaaggaaccagaaaaacaattctgataatgacaaaacaaagttctataacacccccaaaagatcacgttagctcaccagcaatggatccaaaccaagaagaaatctctgaattgccagaaaaagaattcagaaggtcaattattcagctactcaaggagacaccagataaaggtgtaaaccaacttaaaggaattaaaataataatacaggatatggatgaaaaagtctccagagaaatagatatcataaataaaaatcaatcacaacttctggaagtgaaagacatacttagagaaatacaaaatacactggcaagtttcaacaatagactagaacaagtagaagaatgaactacagaactcgaagacaaggctctggaattaacccaatccaacaagaaaaaagaactttttaaaaatgaacaaagcctccacgaagtttaggattatgataaatgaccaaacctaagaataatttgtgttcctcagcaagaaatctaaaagtttggaaaacatattcgcgggaataatcaaagaaaatgttgctggcctttctagagatttagacatccaaatacaagaagctcaaagaacatctggaaaattcatcacaaaaagataatcactcaggcagagtcatcaggttatctaaagttaagatgaaggaaagaatctatgaagcaaaaacatcagctaaactacaaaggaaaacttatctaatgattaacagcagacttctcagcagaaaccctacaagctagaaggctttgggatcctatctttagcctccttaaacaaaataattatcagccaagaattttgtatccaagaaactaagcttcataaatgaaggaaagataaagtctttttcagacaaacaaatgctgagagaattcaccactaccaagccagtgctacaagaactgctaaaaggagttctaaatcttaaaacaatatatcaaaatataccaaaatagaaccccctaaagcataaatatcacaggcctattaaaaaataacacaatgaaaaaaataaggtattcaggcaacagctagcatgatgaatagaatagtacctcacatctcaatactaatgttgaatgtaaatgacctaaattcttcacttaaaagatacagaatggcagaatggataggaatttaccaggcacctgctgtcttcaagagactcacctaacacataaggactcacataaacttaaggtaaaggggtagaaaaagatatgccatgcaaatggacaccaaaagcgagcaggagtaggtattcttacatcatacaaaacagactttaaagcaacaacagttaaaaaagacaaagagcgaccttatataatgataaaaggactagtccaacaggaaactagcacaatcctaaatatgcacctaactgtggagttcccaaatttacaaaacaattactcactttgggaggccgaggtgggtggatcacaaggtcaggagatcaagaccatcctggctaatgcagtgaaaccccatctctactaaaaatacaaaaaaaaaaaaaaattagctgggcgtggtggcaggcacctgtactcccagctactcaggaagctgaggcaggagaatggcatgaacccaggaggcagagcttgcactgagccaagattgcaccactgtactccagcctgggcaacagagtgagactccatctcagaaacaaaaacaaaaacaatttctactagacctaagaaatgagatagatggcaacagaatgatactgggggacttcagtactctgctgacagcactagacaggtcatcaagacagaaagtcaaccaagaaacaatggacttaaactgtacactagaacaaatggacttaacagatattacagaacattctacccaacaactgcagaacatacattcttttcatcagtacctggaacattctccaagatagaccatatcataggccacataacaagtctcaacaaatttaagaaaattgaaattatagcaagtactctctcagaccacagtggaataaaattggaaatcagctccaaaaggaaccctcaaaaccaggcacgtacatggaaattaaataatcttctcctgaatgatcattgggtccacaatgaaatcaagatggaaatgaaaaaatcctttgaactgaacgacaataatgacacaagctatcaaaacctctgggatacaggaaaagcaatgctaagaggaaaattcatagcattgaatgcctacatcaaaaagtctgaaagagcacaaatagacaatctaagttcacacctgaaggaactagagaaagaagaacaaaccaaacccaaacccagcagaagaaaagaaataacaaagatcagagaagaactaaatgaaattgaaacaaaaaaaatacaaaagatatatgaaacaaaaagctggttatttgaaaagataaacaaaattgatacactattagcaagattaaccaagaaaagactagagaagatccaaataagcccaattagaaacaaaatgggagatattacaaccaacaccacagaaatacagaagatcacttaagtctactatgaacacctttatgcacacaaactagaaaacctagaggggatggataaattcctggaaatatacaaccctcctagattaaagcaggcagaaatagaaattctgaagagaccagtaacaagcagtgagattgaaatggtaattaaaaaattgccaatactagaaaggccaagaccagatggattgattcacagctgaattctatcagacattcaaagaagaattggtatcaatcctactgaaaccattccaaaacatagagaaagagggcatcctccctaaatcattctatgaagccagtatcaccctaataccaaaaccaggaaagggcatagctcatgtcaacaaatgtgatataccacataatcagaattaaaaacaaaaattgtatgatcatctcaataaagacagcaaaagcatttgacaaaatccagcaccttttataattaaaaccctccacaaaattggcatagaggggacataccttaaggtaataaaagccatctatgacaaacccatagccaacataatactgaaatggcaaaagttgaaagcattccctctgagacctggaacaagacaaggatgcccactttcaccacttctattctacatgatactagaagtcctaggcagagcaatcagacaagagaaggaaataaagggcatccaaatcagtaaagaggaagtcaaactgttgctggtcgccaatatgatcgtatacctagaaaaccctaaggactcatccaaaaacctcctagatatgataaatgaattcagtaaagcttcaggatacaaaatcaatatatacaaatcaatagcactgttatatactaacagagacaaagctgagaatcaaatcaagaactcaaccccttttacactagctgcaaaaaaataaaatacttaggaatgtacctaaccacagagatgaaatacctctacaaggaaaactacaaaacactgctgaaagaaatcacagatgacacaaacaaatggaaacatgtcctatgctcgtggatgggtagaatcaatattgtgaaaatgatcatatggccaatagcaatctggaaagtcaatgcaattcccatcaaaataccatgatcatttttcacagaactagaaaaaacaattctaaaattcatacagaaccaaaaaagagctcatgtagccaaagcaagactaagcacaaagaaaaaacttggaggcatcacattacctgacttcaaactatactacaaggctatagtcacccaaacaacatagtccaggtatgagaatataccagtacacatagaccaatggaacagaagaaaggacccagaaataaagccaaatatttgcagccagctaacctttgacaaagcaaacaaaagcataaagggggaaaggacaccccattcaaccaatagcactggcataattggcaagccacatttagaagaatgaaattgaatcctcatctctcaccttatacaaaaatcaactaaagatggatcaaagacttaaatctaagacctgaaaccatataaattctagaaaataacattggaaaaactcttctaggcattggcttaggcaaagagttcaggaccaaaaacgcaaaagcaaatgcaagaaaaacaaagataaatagatgggatttaattaaactaaaaggcttctatacagcaaaagaaataacagaataaacagacaacccacagagtaggagaaaatatttgcaaactatgcatccgacggaggactaatatccagaatctacaaggaactcaaagcaatcagcaagaaaaaatcaaataatcccatcaaaaagtgggctaaggacatgaatagacaattctcaaaagaagatatacaaatggccaacgaacatgaaaaaatgctcagcatcactaattatcagggaaatgcaaatcaaaaccgcaatgcgataccaccttactcctgcaagaatggccataacttaaagatcaaaaaataataggtgttggcatggatgtggtgaaaatggaacacttttacacttctggtgggaatgtaaactagtacagccactacagaaaacagtacagaggttccttaaagaagtataagtagatctaccatttcatccagcaatcccactactgacggcagcggcaggcagtctgaagtggctgctgccatgaagctggctgcagtgaggtgcaggcgctggccgtgggtcttagggggcagacacagaggcaggagatccccagagccagttgccctgggagccttcctctgggagccgctgcaatggggctaggcccagctgcccgtagggcgtggtcaggcagggaggggtgagcagagagaggtcccaagatggagctgggccagtggtggttcggcacttgcacacgtagcgtgggggtcgggcccgaacgcggagcagtggccacacttcaggggccggggtgggaagtgggagtggcgcccacttccaggacccagccagcaatgcggcccctgcacccaccctgcccacagcgccaggttcccgcccctcacaggaggctgaacaaagggccgccagaggccgtgtccctaggatctgccccgagttagagtgactgctgtgcctggtgctttcagcagctgagactggggaggcaatccggtcctggaggtttcccccaggcagggtcacaagccaggagagggggtgccccaagccatccctgagccttggggccacaggaggaacttgagccaacatcacccctgcaccagatgctggcctgggcctggcaagggctggagccaccaacccaggctgcaaggaggcagacagggcagcaggaacggccagaggagcagcagtggcagcagtgggtccctgtgccctgtgtccctgaggcagggaccctcaccctcacacagccggcaggacctgctctcaggcccagagcctctatcacagcctggacctctttccccactgcatcctgggaacctgcaagcacctggccaaaggtgcagccgagactcacagaactggcccctgagtgtcaggttcctttgtgtgaggttggctggggcactgtgccacctgcacctcatccacaactgctgcaggagacacagagagggggcatggctgaggccgccccactctgcagagccaaggacaagcaggagccctgcctctcccaaattggcagggcaggagctcgccatgcgcaactgcaggtgcccaggttgcagctgtaggcctgggcctcccagtgctcttgggggcccaggaggctaccctccacctgccagaacagaagcttctgctgcctggccattccctgctcccagcacctgctgcaatcttggagcagggttggggctgagcccaggtgcagttgcagccctgttgggtgtgcacatgcttggggcagagctgacacaccaggcccctgctgcctgcacccctctggattttgggtgctgacgatcataggagagaggccaagaatgggctggggccagctcagcactggcctgcaggtgcccctttgggcaaggggcctgggcaccatgggtggtggggaaaggcagacaggctcctgggtgggaaggggcaggtccctggtgaggcaccaccttcaggcaagagagggcctgaaggctgggaactgggctgccaatcctatggaccagagtgggaacttgtaatgcctttcaaaggcctgctcatggtaacccatggaccaatcagcatacacttcctcccctctgaagcccataaaagctctggactcagtcagacttggagagaacatcctggacaaccagcagcagagaagagcttcacactccagggactacctgccagcagagagaagccacccaccctaggacctcctcctctttgctgagggctgaacactcgtcaggacacattggctgcagaaaggagctacccacagtgggtctctgagctgttctactgctcggtaaagctcctcttcgtcttgctcaccctccatttgtcagcgtccctcattcttcctggttgcaggacaaaagaacttgggatctgctgaatggtgaggctaaaagagctgtaacacaaacagggctgaaacatgccccttgatcaccgcattgtgggtgaagagaaggagagaagagctgcagccctttggggagcccagacctggaagctccctgagccagggctgtgactcccttttggaggctctgaggttcctggcatcttcaagcttctaggtgccagcacatcccctgttgccagccatggaagctgtttgcagtgtgcctggtccagacacagccttgcagagagccagtgctcatgccagcacctggagttgcctgcccttatgcaatagcaggcatgtctgactgtatgcagtggctggaccccatgcttgctcacacgcctctcccactccatgcctgacctgccccatggcaggcccttggtaggtatgcgatccaggccagtagcctgagccaagtgcagcctgccaggccaagtgggtggaaggagcccagtgggcctgagcaaaactcaggcaaaggcacaactgcttacagaggtttctggcaagaaaaagcaataccccaaggattccgtaacactactgggtgtctacctagtggaaaaaaagttatatgaaaaagacacttggacatgcatgtatatatatatatatatatatatatatatatatatacacacacacacacacacacacacacagagacacacacacacacacaccatggaatactactcaggtataaaaaggaatgaaataatgacattcacagcaacctggatggagttggagaccattattctaagtgaagtaactcaggaatggaaaaccaaacaacgtgtgttctcacttataagttggagctaagctatgaggatgcaaaggcataagaatgatacaatgggccttggggactgagagggaagggtggaggagggtgagggataaaagactacacattgggtacagcgtacactgctcttgtgatgagtgcaccaaaatctcaaaagccaccactaaaaaaattatccatgtaaccaaaaaccacctgttcccccaaaactattgaaataataattttttaaaaagattaaggattcgacatacttaaacatttggtacttcattccctccctagggttttggagatggtggaacacacagcatctgacactggacagatgagattgacagcagtgtattagtcacatttactcggtagcccggtgggggtgggcaggcatcccacgccacgcagggccacatgggggctgcgctcaggaacagaggaaacagccagtggctgtggagggcgggctgtcccctgcttccagagggagagtgtgattggcttgtttgaataattccatggctggcagggaaatgaaatcagctattcaaaaatacgcagaaggtgcaagcggtcctcttgatcagaagtgttggtaggaaaccttacctgcagcagcagagccggcggaggacttgtagatagaccattctaggccctcccagtgttaccagatgtccaggctgcacataatattgaactctaattttagtccttacagcacttttcacttgaacggcaaagggctcagtcacagactggttctttgttgtaaatacacatgtatttgtctacaatacagcatgtatgtattggtctctatatttgctctataaattctgttggtttttaatgaccgggatttgctccacaacacgtggatgcaaataccatcatattttaatttccccaaatgaaattaaatctggctaaaggtgtcacatattgagacttgtaagaaatggagaattcgttgatttaccattccttttatagaacaaagcaccagctcttttatgggcccaggaaatgaggtgagggcctctgtcttcaacactgtatggtgctgttaccattgtccttggtcatcagagatggcaccttcgcaccttacaatccaagttagctaagtcaagggggatgtatgccaggctcccagagctgaagagctctgtgcttcctggggcccacctggtcatctccacccacggtccttccccctcagaggtcggcgtagagccctccaggcacaaaacgtacagtctaggaatccctaactaggccctctcttcaactcatggggaacttatggccaagaatatgggatgtggtgatatctcagaagcttattccatcatatgtaattagctaggtctccttttcactagttgatttgtggtataggcaaattgatttaacacttcatttcaaaacctggttttatctgcagaataaggaaattattcagattcctataaaatcatcatcttgctttgttgctagtctttcttcattacaatctctggtttcataaggaagacttttcaattctgacccataccccttcctcctgaacttcactgcagaccaggatttgttctgaaatctccatgccatgtttttccttcatatcccagggagaagcatttgcctgtccatgcaggttcacacaaaggcagtgtgttctagttgcccagagggttggccttcctgaatcttgcggttcccagtgacgtggacactgttttatcttctagatgagaaacctggatgagtgtgaggtgtgccgggacggaggggagctgttctgttgcgacacttgttcaagagtcttccatgaggactgtcacatcccgcctgtggaagctgagaggtaagtgacatgcaggcgtctctctttttgtcctttaagggatcttccacctgccatgcgcactctccagcagagtgccggcttgtgtctagatggggaaagagcaggttcatcgggtactgggacccagcagtgtgatccagagagcagtgggagacgctggcagcaggaggttaatgtcctctgtgctctcagggacacctcctctgatatgctgagggcagtgttggggacctttgcctacataccggcattgtcctttccttgaagttttgcagctgggtgggttggagacaagaaacaccagttgtttatattttgtgcttattcatacaagacaggaagcacgatctcattgggctgttggaggcccgaggtccctggggctgaaaacccagtttctgaaactcaggcctgacagacagggttccctgtgctcccagcagctcagacagagaaaggagagtccacactcacggtgacaccaccttcctcagacttcctgcctgctgctaccactgatgcgagggaaaggccaatggctggagaccccatgtgtgaatcttgcatactttgggaggtgttcccctccctcccatgactgagcccatcagccattcctgaaggaagacagtggtagccacaggaacggtggccatttccaagctccctgccctctgctcacccatgtccaatctctcaggaccccgtggaattgcatcttctgcaggatgaaggagtctccgggaagccaacagtgttgtcaggaatctgaggtcctggagaggcagatgtgtcctgaggaacagttggtaaatcagatgcaaaccccaagccttctcctttcccctcacacgtgagaaccatgaacaagcgcaagggcaggggaatgtactgaaaggagcctgctcttccgcgccacacttcaatggcactgatagaacaccacaccttgtttgcacaaaaaataactcagccatgacatgtctgtttccaagagccacacatgttagagaaacttgaggaagaagggtgtgagttctgtgctgtgtctcatgcatgtgggctcattctctccaagctgcttttcatttacggcctctttcttttgcagaaatgtgagttcctcctcttgaaagtctattgctgttctgagagctccttttttgccaagattccatactattattatgtaagtaacaacagcaacccatgattacaggctgccatgacattacctgaccctgaaatgggccctcgtgagatttgtgatcttaatcccacggggcaagagcacacgctgtcgttagttgccttcaccttgttgtatttctgctggattttatgggaatccacagaaggtagacactgaactatgctggtagcttttccattggtatatttgtcaccagattagagaggcgtgtcaaggcctgaaggagcccatgtggttggataaaatcaagaaaaggctgaatgagcacggttacccccaagtggaggggtttgtacaagacatgcgcctcatcttccagaaccacagggcctcttacaaggtaggtggctcttcctgcttccatttcatttctttccatccttcccctcattttctggtgccaagaaaaatttagtttccctcatcctgtaataagcttgcacgagcaagggttctggaagtgattgattggtttcagttcagaacttaagctcttcttagcaaagaaacagtgaatcaaaaggtgtccctgcaaccagaaccccaggtccctgagagctcctcccccacctgccccagaggagacaggagctcagagagagcaattgaatcctgcctgctgcagcatataaagaggagagaatttcatcttaaagtggtattgtgcttcttatctgctcccaatcccagaaatcccaaactccagattctttgcatgtgaatagaccatatcccaacaaggattgccagcaaggagtagaagtgacagagaaaggaacagatcagtgatcttaccttatacccttccactatctgaattgttgaaagaacctagattgcttttctaacccactgaaataagcaaccaaaggcaaagaagtaataatcccagctgtggaaatgatttcacttttctgccctgttaataagaaaggatcatgctggtaagaaacggaagttactcttagctgcatgagttttcaagtttaacctggttaatgtaacttagggtgtttaagataagtgttctacttaataatagtgtatttcacacttcaacattgttaagaaagtaaatttcaaatgtactcaccacaaaaaaatgataactatttgaggtgatgaatatgttaattagttcaatttaattattccacatagcagtcataaatcacaacattactttgtactccaaaatatatgccattataaattgtagacttacagtacttttttttttaaagacaagagtcctgatcattctcagttgaaaggtgtctcatgacgctaatgatgaggagcattgtttttgtctttattattttttcagtacaaggattttggccaaatgggatttagactggaggctgagtttgagaagaatttcaaggaagtgtttgctattcaggaaacaaatgggaacaattgactggattagtggatgctgaaagcattcagcaaatggcaccctaaaatatgccgctggtttgccactgacttcaaaatgaggtcacttgggcacagcacatgcagggaggggcttttctctgagcctccttcatctgcccaaagacaaatcctcaaaaggaaattcaatcatcatgaatcacaaccccaagtatctcatcagccagggaagagtaagtgggatcacagggaaggatgttggcagcgacaccatcccatacaggctcttacctcttctcctgagggctgctccagacaacatttattacccagaagaccttttgtctgaaaaccagccaagctttattcaggacacacttcttgccttcactttcccacttccgtggccacctccatgcagaagccctaagcccacattctttcgatagctcacggtggtgcatgagtgtccatcatctgactcttctcggagtctcatattttgtgggactcctgtgcaaacatatgttattaaaatttttttcctcctgtt

SEQ ID NO: 15824 - DNA, 31857 bp, Homo sapiens
gtgtgtggtacaagagatttccaaaagtttctaggtgccttcagtgggcaaagtgcaaggtattaaaaaaactgagagggaaggaccctgccaagaaggcggctaccatgagggagagatggaaggtgaggctgagacccagaggaggtgcaatgccagagggtgcagaggtgagtttgcttcattgtggaaaaagaacacaattttcaccggctgttgactttagaagctgatcccacaggatgaccgctgtcctgttgaacaagaacgtttctctgcaggttagaaaggacacagagtgtgcagccatgcttcccgcacgcaagtgcggtgatatccgcaggccacttccggaggaaaaggcatgggtgaacccttaagagggggcggaagcgaaagcccggtgggacccagggctggcgggaagttcaaacacggaagttactgaatatttatccagaagaggtggggcagcctgatagagcctaaaacttgcctttcattgccaagtttagggttttttttctgcataactaaaggagggtttcggagatgagaacacttacagaaaatatgagagtgtggtatgtatattttcagcactactatatatatttttctcttacaattttgaaacatctttttatgtgttttgttttgtaaaaaataaagctgattaattaaatgtaaaataatatgactcttaaaaatatctctgttgggctgcgggcagggaggaatggggagttgtttaatgggtacagggttttagttttacaagataaaagagtcctggagatggatggtggtgatggttgcacaacattgtgaatgtattttaataccattgagctatgcacctaaaaatggttgagatgataaattttatgtcatgtgtattttacccaggtaaaaaattggaaaattggaaaaaagaaaattaaaagcacatcatctgtcacatttaaaataaaacgattcttttaaaaaacctgaaaaatttcatttaaatacaatatgaagaaaggcaaatctggaagggactggagtctactcctttcggtagcttggcagagagatgtcaaaaggtcagagttacctcaacagaactgaccatctgacactgactccagaggtttcccctctctaacaaagtcacttctctgaccagggagtgttcataattgtatagttgcatagacattccctgtctccctaatcctataacgtgtagagcattgtgagagtgggcatctcactactgggctgctggccacggggtgtgcagagtacgtatgtctgccctaaatatgggataataagaatttggagaattgtattggaaatttccctccaataacctttagtttgtatctacaccacgtggtgcccataatgtctatgaccccttttcataacacaataatgaattcataaactatcctttgtcagatcattattcaaattttgggttacagaaagtatggtttctttcatttttttttcattaaaaaaaaattaatagctaatttgtgccaggacattaccatctagcctagaagagacacattatgtaagtaattacaatagagtatttggaaccttccaaaagagccagtgctgggtgctgtagaaattatgggaccagcttggctaatttaggggtcagagtatgtattcctgagatagacataagtcaacacgactgatgaaaaggagataactaaacatttatggggagtagtgtaggttcagaatatagcatccaaagagaatagcacatgccaaggatcaaaggggagagaaatgaaatgggaagaaatgaaagttcagagtggttgactggagttttgagtggaaagagatatattaatagttggagggtaaggcatgagttagactggatagaactttaacaatcacattaaggacagtgaacattaccctaagggcaataggaggccatggacaagatttaagcatggaaataaactaattagattttaatgtagaaaagaagagggtgaaccaatagaccttgtcaatatgctaatagagttcagttagtcacggatgactaaggtttttgcttggcacctgggtagattaagttcctcatttcaagttaaactacaacaggctcccaagggcctgtgaaaccctacataatctgattcttgtttactttttcacttcctaccaccttctttcttcatcatcaccaacaacactggtctttcctctctgcctcaggttctttgcacttttgagtccctctgcctggaccatccaatccaaagtgactcccaccccaacctgcaagtcactattgtaatcctatccattattttctttcatcctgtcatcagtacttgaaattatcttgtttatgtgctttctagtttatattctttccttcccccagccaggatgtaacctccatgagctttcccctttgttttttgcttactttcttactttctctctttaaaaaaaaaatctgtcttcagctttcagaatgggtatatacagttagtgctcactgcatatttgttggaataaatgtctgaatggtacttagaagactaggtttttggtaaagaaggtgaagttaatttcaggcatattgagactgtagtgtcaatgggagacttgcaaacaaagacgcccagtgtgcagctggctatgtgtttcttgaagacaaacctgagttgaagacgtagagttgggagccatcagtataaaggtggtaattgaagttgtgagagtgattgacaaagctcagaagtgtgagttgaataatctgactagtttacaatgaaccaaggaggcccatagagaatacacataacatggtgagagggcattgactaataagtagaatgggggagaaagcagcttgtctctccttcctgcccaggaaggtcacttacttttcttagaatggaatcatttctgttaagtgtcttaaaaggacaccagccctgtgattttggacactgggatcatactaatgataaactaagtcagggaagaggagctttaagccactggcttaggctgccatctattgctctgtttccttttacagctagagttgtctacatatgttatcacctcccattcattatccttcccacacaactggctcctgcctccatcaccaaaatttttcttaaattttccagtgattctttgtgaccaaactcaaggccctcttctctgaatttatcttagtctctcagtatagtcaaccattccctcttggcttgctaacatgttctttcttggtgctcctctgtcttcactggtctcgttccctcagtctgtcttgctagattcctcttccactgggattacttagagcagggctaggtctgtggttctcttttcttctcccatagatcagaatacctttattttattgataactcatatatatacatatatctggtccagatattatatattatctggtccagattttatatatatatatatatatatatatatatatatatatatatatggaccacactttttcagtgagtgccaaattgccatattgtggggaatataacttcctgatttctcagtgttcctgtaaaaagccctagtcccggagacacagaaatgtatgcaatataaatataggaaatacttgctttcacttccccagaaacattttcctcttcccacaccatgagaattagagctatagctatttttctagttaattactctgatctagagggagaatagaacctctcttatctcctgagatggccaaatgggttcacccaggactagcttcctaggttaaatcctaaagtaccaggaaaactggagtggtctttccctaggtatttatatatcacaaggggtaaagcccagaacttggagacatctttaggttgtaaaagccagcaacacctagagtttctctggcctttggaaagatgcatttaaattccaaaggttaggatggagagctttggaacgaggatcttttccattttatctcaaagcagcaaagttttttcttttcctttcaggaggaaaggatgatggctatccctctcatgtatctaaacagaaaaatccatcattctacatcccttatacatgagttgtagtctattttgaatagaaagattccattagctctcttagcattgcctttgggtttgtgtatgggagacagacgctgcaatattgctctggctgataagctggttgtgaatatcagtaaagaattattttccctgaccagataccttgtgttcctgcagcactcatatatataaggagataccaatgcaagtggagtaacatcttagaccctttacagttcttgacaaaacacacatctatacacagctgcatagatggctagcagaaacctctaaaggaacaggtcaataattgaactctaagagttatcccccaatatatttgcatcttccctcagcaatgggcattaccacttacttgttcaagccagaaattgaagagtgggccttgatttttctctttctcatctgtagctaataatatgtcaaatcctgtcaacaatacctgcaaaactgatcttgaattggcactcttctctgcatctccactgtcagatctgaatccaagccaccaagaactctcatggcatctgccccaaaatggctgccctgcctccattctttcccagctccaactcattctttacaccgtagcaaaattgagcttacattgtgtcacttcactgactaaatctcttcaatggcttcccattgcatttagaataaaattcaaccctccacagcttgacctacaagccctgcatgagctgtttccagcctccagcttcctcttgtactctcatcttacctcctgggaggctttttttcttatgtctcctttttggagttgaccagatacatctttttcttttctttcctaaaaagaaaggataatgttttatagttacaaacattgatctcccaatcttgtatgtcaatgatattcagcttttacttttggtcttcaaaccacattgctagaagttcattggtgaccttaggtgatggtacttcagggagtaataggggaagaaggactctaaaatgacagaggaaaaggagaaacgaagaaatagagacagggagtttaggtagctcatttctagaagtttggttgtgaaatgaaggagagagatatggaagtagttgaagtgagatgagaatcaagaaaaagcattttttaatgagctgtgatacatgtaatgcagattcttgtgtgagacatactgctttaatgaatacttgagagagaagggatcatggatactataagatgaggcagaaggattgtcttagaagagaaggagggaactcggagaggagggagacagatgtagttagggtttgtaggactagcagcacaaataaggggattctcatctgatatctccttatggtgcaggagggaaagtcactgattgagcaaaaagcaggaggtgagggggtcagaggtttgaaaaatagggcttgaggtttgaaaggattattgcaggaagtagcattgtcacacagtaaggagagatgatttgtgctggaaccatgaagaccagtgagtgcactctgccctgctgtggaactctctccagcactgctggctttcagatgcagtgtacaggaagtaggtaagtagggtcttccaagacttgccagagagttctaggaaaaggcagagaggaaaggcaggtttaagataatggcaatagattactgaaatgatgaatcttggactgtgagttagtgtcaatgttaaaaagctgggaagcaaagaaaagcagatgatggcttggaaggaggaaaggccagtggactggtgatccaaatgaggttgaaggacaacttcagaggaaacaacaaataaataagcacagaaaaatatatttttgattctttttcttttgttaggattgggctgggaaagagtgatcagaggttgaatgatagctataaaaggagaaaagctcaaggacaggtatcaaaaaaggaattctgaaattaactgttgggaaatcgagccaggtttgaatgacgatagggtctatagcttgcctttgggtatgggaggccaagaattggtggaggaaaaagtcatggaaaatgagaagatgaaggatttgaggggccagagtattggataacagagttgtctgttatccgtgtgtaccctgaaggcatctaggatgatgctgggacttgaaatgacagaaaagcagcttttgaaaggattattggggaaattattggatgatattgatgatgagtgagtgaacattttaattgaatggttaagactcaaaggagaggatcagggaggaaggggctggatggggccagtaggcagcaaaggacagacatctaacctgtctctcaccatgaggtgtgagtgatggatggcagagaatgcctagccatgtcttaagaggaagtgggttcctctctggggaaccaactttcagttaaagagggaagtgcaattaacactctaagaagttgtgaatataggagattgattttttcagaacaggcaattccaatggcatatttcaatacccccaaatgccttctggtttcctgataattttcataaaggcctttttggaagatgcagcaaatggaaactgcagaaacgaactgtgtgtggcatcaggactgtggtcacatagtggtgctcttgacaagatacagtcagaaaaacagaaagcaactctgaattcacccttctgacctctacagaagaaaggcttttcttacctttcttgtctgaaggtgtgctggacacctcctggggctcttctgggtcatttggttctggagaattatctcttatctctgacaaaagaaatataagtcatttcagagctcagatccagtgaagagaaagtgctgagggaagtcaatgcaagaactagaaaagtagaaagtacatgcagcccagggccgggaatctgcttgccctaagaattccctggctctgtcttgatttttgccaacttgtggttattgttacctgtgcgaccatcacagggaactagggcacaactgccccacagcagaggctcagtctgatccttttagagagattatcttatggatggaagagaagtgagtgaagaaggtgcaatgaatggaaattgcaggaataaactgtgctgggtatcatgactatagtcacatggtttctgctcccagcagcccctgctcaaggaatgaagctgagagcggaaagtggtgatattgaaatctgatgtccatgatgaaggggaatgtctttgctgtatgaaaaatacatcttattgctttgacgtctatgtgtggatattctttaactgctctatctgtggttattttacttggagaaatagtggagaaggctaaatgccttatatatttctgtatataaggattgtttgaagaaagcaggagctagcctgtgcttgctagcacctgttaacagcaaagacatataaagctctgctagtttttgctgcacaaagaaagacagagaacttgaagccataacaaataaaggctcatctcacatgaagctgtcacctttttctttacacactgcattgagattggtctcaaatgctggcctgcttaggaataggtgactgaggcaggtggcaagcagtcattagatctttggaataatttattacctttcaagttatattcataatatcaactcttaaactccaagtgatatagaaatgaccagggttgaaagtgaaaattccccacagtcaggtgggggcttggaaggaggaccatccatgtctgctgcagcaattcactattagggccacacagtgtttttgttcatttgctttgcattttgacagagccgttttgagcactactttattgaagtggcctcagaagagtggctctgtcaaacagtccagcctgactcagttcccttgctttcccctggggttcctgccacaaccctttgtggcaggtgaatgtttccctttcaggcgctttgtggcatttggagtccaaacctacaggcactggtggggctctgtccatcatcatccgtggccctatccaagtctaccttttccagacttgcctcctttgccctcccccagggactctgtatccattcagaggtcgggtctcctgcctgttcaagctcccaagtgctgggtgaactggaagctgggccaagattgctgagaggcaggaggagagccccctctctagaagatccgaatggcttttcctcttagtaaacacagaaacaaaggcaagcttttaggttgaccaaaccaagattacctggcatagagcccaagggagagtggggcatctcttgagggtcttctttatctcttatttgggggatcaggttgtcactggccactgaatggaggaagaaaaagttttagatctcaggaacagcaagcagggaccagaatgaggagaaaagagaatgctctattccaacaagtaaaaatgacggggtaacagcaaccaaggcctgggaaaggatggcatagagtgggaaagtaagcaaccattcactctcaattagccacttgttcttccattgctgttagcttcctgattatgttaacctttttggatggtaggtattagaggagtggatgcaatattatttggatcgaagaggacccctcttctcagtactggagagctcagaatccatggtatcatttttgacaatgcccaatatcataccattcttacgtttaatgtaatcaaactccattatgatgatggtttggggaggacaagtgatacaatttgagaagctaaatattaggtctagcagacctttaaacattttatcatcttttctagtaattttgataacattgttcttagaatccaaaccatataaaaatgaagaatgttgaaactctaaggcccccataatcaggtgggggtgaggaatcagctaagggtcactagtgtgagtgttacgcaggttacttgtcaattcagaatggtgttttggttgttggtttgttttgcattgctgcgttggtgaattggccccttctgtttcttttcctttgtattgctcagttctttttcccagggttcccaccatagcctcttggttggcagacgcatgttctcccttcacagtcaccttgagctaagcggtatcagccccagtcagtgttaccttgcacagtgctagtgaggaggctgggcatctcttctgagtcttcttccgcattcattttggatgttaacttgtcattggtcactgaaggaggaaaggaaattattacagattgcagggactggatgtcagggagaagagtgaatgttaaaagtgcctggggcagatagagcatcaaggcacaagggcagagggttggaatgtcccgggagtgggaagcaggtgttctggactctaggtcttacccaccccccggcagtgctcataatccctcttgaaaagggttgtgtttgggtagatgggtgcaagagaagaactaggacaataaaagtcaagatgctgggattggcggcaacatggcacaggcaccttaggctgaggatatacaggtgttggatgggatctgtttctcacctgaagtgcttcttccttcctggatgagtgcagggagaggcaggacagggtcagatgggctgggcgactcactcaggatctcatcgctttgctgggaggatgttccaggctcactgactcttggcgcacagggtgaacagcttggttgagggggttgtggtgggggcagcgccagtggggtatggagggagcttccttctgctaggccagttggggcttcaagtaggattggtgtgtctctgctctgccattcataggaagcaccaactgggattggtgaagggacacacatcagtaccctggagactcagaattacttggggaaggggatttcttaatacatgccttccaataggatgggggcatggagctattcattgtcccccaggtgcagagaactgattcattgtcatcattatccatttgtggccccttaatattttatttatctggtttgggcattgagtgctacaataagtgcatctaagccctgatctaataccaaaatggtttcacacataaaagttgagtttgggtttgtacccaggggtttaacttttctttaatcttggtgtcatataatttagtcaataatgaacatgctatagttttaaaagaggtctctgttttaataaataaacagatcatacttccccgaagcaaataagagaaaataaaaattccttagcagggtgtattaggacatttatattctggtttctgctcatttctgcagagtcagcttctgtgccttctattgtaccctgtgatctggtcacacccagctttctctcccatccacaataccccagacccttggctttctgcatgctattcccttgcatggctagtgctgggtttctcttaagattcttctccatcatttatttcagaagtaaatggtctcaaccagtgaatggaaaaaggaaagtaacttcaaattttggaaagggattcagaacaaaatcatcaggttgaagatcccggaagatgactgaagctcagccaggtcaggggcacatcagtgtgtgggtccccatggttctcagatgttcttaccatagcctttaaggccatgcctctcctagtattgcccagatgctgccaggacagtgggccctctgtagctgcccctacctggaggtggacttgcccctttcactgtccatgtagctcaagaaatcatctctcccttcagggggaagccttttgatggtgaagtgtcagagagcaaaggaggaactgtcaacaatggtgattccactaatgaaaatatccaatgtgagctggtggtcctttgcttgttgttctgaggtaagtgaacatgtgatttggccacagtgttttacttccaacctaaaatgactttactgcctctctctttccctggctgatttcttcccaactctgccactgttctttttcctactcctttatttatccagtctcttttctttctctacgtacttcatgatccattctttctcagaccctctctttctgtggctatgtttgcgattcactccctttctctgtagctaccttttttcccttctctggctttacaatctgccttccagctgtccttgtccggactagtggttaaaatcttgggccctggtattgggagacccaagtaggactcttgctctgcttcttaaccaacaagtaattttgggaagattacctctgggctttaatttctctgtcagtcaaatggggttaaaaatgacttcaaagggttgttttaaagatgatgtgagataatcaaataaagtgtttgcgataaggcaccaaaaaaagatacttattattatccgtccacattcattttttcttcctccctggctctccttgtccttccaccagacctgatctttgtaactttgcatttctgtcaccttatgcattccctatagattttccagtatgccaaattgtatgatttttttccaaattcatagaacacataagaaatgtttatgtcctctagaagttcatcttagagagttgggatcagctttagcaaggggctgctcctgcagctgtaccaatgagagaatatggtccattccaccccagagagaaggcgggggattaacgtgcatattccacagggctagaagtaaacccagacttttaccatagcaactttttaaatgcaaaaagcacttgagaaatctcattaccacgtttgaagcttctgtaaatcgtcaccagattgggatattcacgcaggttaatttgactgaacaatgtcaccagaagagacaggttaaaagtcctctccagttgggtgagaatgttgtgcaccactctggatacagggatcaaatttctacaggcttccagagattcctataaaaatggagtgaaggtttttataaatgactataaaattgaatgggaagttatacatttatggttttctaagttttaagaaagctaccttactcttttaagaagaaattcaacataaaatatatagtcacattctctaaggtagagcggtcacagttttacatgcttatttttgaaactttacacatatttggatgactagcaacaaaaataaataatttagctttcttaaagtaagtctatattctgaatccaactttcaggcacatttgagacgagagaaatttgaaggaaggaaagtggggttaaaggatgctactatgtaattgattctttaaagctgtgggcaggatacttcagcaatggttctagtgatggtcacagaggcaattctgctggttgcttgtgagcctctgctcagtctctctctgtgtctctcaaacttgagataagcctgaatggattccagccacagagaagtcaccctgagaattttccttgcctagaggatggacaaaaggagaaatacggcaagagagaactgattgcaaataattattgaacatctactaggctcggtcagcgagtctttgggtacacagcactgaataagaccaacatggagttgcctatatttgggggtcagggtaggcactgtcaagtggagaagatgagcattaataaacacaaataaatacccatttacaattgagagtagtgttacggagggaaagcatagattgctatggaactgaataactaaggggtcttcatgagatgagttggccaaggagatgtctctgaggagtgctctctgggctgtgatctgaagagggagttggggccaaccagactaagactaagggaagattattggcacttccttgagtctagggctcaattaatgcttttaaaaaccaaaattatataaaaataggtccacttttgtccacatagcatatctcccagtgcctgcctgtctcacatcagaatgcactgtgagcaatattagctgttataaattgggatgatgcctgtagtgagttgaatgttggatggatatatctcagccaagatatatccatctagaatctgtgaatgtgaacttatttggaaaaagtgtctttgcagttgtaattaagttaaggatcttgagataaaatcatctttgattagggtgaccctaaatccaagtgtcctcagaagattaggtagaagactcaaaagagaggtgatgtagagatgaaaacatatcagagtgatgcatctacaaggcaaggaacactaaggatttccaacagctaccagaagctaggagataggcagctatcggattctcctcagggcctctagaaggaaccaaccctgtcaacaccttgattttggacttctggcctccacacctgagagaatatatttctgttgttttaagctacctggtttgtagtcattgttacagcagtccttatgacaccctagaaaccaacatagcccctatgacaccctctctcctaactacccccaccttctgtgataatgaacatgcctgggctgggccttccaaactctggaagccctggtggtttgtggtttgagactttaataatcaggcatattggtgggggctgggctgccatggaagggttcaacatgactcaccatgtacattctcttagtgatgatggagttgtctaggaggccttcaaagaagggaaatggcttgtgtatggcataggcgatccccagcttctggtgcatgaagtgctgaaaaagagcctcttccatggctcttgtcatggtgaacatcctatggaaagaggcatgataaaaaatagaagcaaaggctgggcgcggtggctcatgcctgtaatcccggcactttgggaggccgaggtgggtggatcacctgaggtcaagagattgagaccatcctggccaacatggtgaaactctgtctctactaaaaatacaaaaattagctgggtgtggtggcgcacgcctgtagtcccagctacttgggaggctgaggcgggaaaattgcttgaaccggggaggtggaggttgcagtaagccaagattgtgccactgcactccagcctgggtgacagagtgagactccatctcaaaaaaaaaaaaaaaaaaaatagaagcaaaaccttgaggaatgtgggaagcttctctctgcattaaatgggcagatctaaaggtaagcattctggtcccaaaggcatccttagtagcctgcaaagcaatgtctgcctaaaaggctcatgggtataggaaacaaggacaattcccagcaacaatggaggctgagagtgactgaaaatataatgacagaatcccaaggcgctgcaggtaaacataaggaaggtattaaaagtagctaatatttatggagtgtttcctgtgtgccagactttgttctaagggtttcatatgcagtaacttatctgattttcataaaacccttgcgaggtggttcctatgactgcacctgtttatactgttgaggaactgagacacagaaatgtttaataacttgccccagggttgcacaactagagagtggaagagctgggagcaaatcctgattccaggcttacagtgctaactatgtgttctatggccacactgatctgggttaaacaagatgacctgggctacggctgaagccattaactagcaatgctcatgcaacagggaccaccctaaaatgggtagagttcagctggaaacctggtaatatttggaaactttaacgaaccactcccaatcttcaacacaaatgggccaagcataaataaaagcatgagggctgagaaaggcatacttagtaaaagtgacttaactgacttgttcactgcaaccatttcatgtctcagacatgcgccttttcccatgcccatgcagcatgtattaaagattggccatttatggactgtgaggagatatcaataggttataatgggaagaaagtttacaaatgacattcttgacaaattgtcaagaaaaggaaaagcactaacaaaacattcaatcaacttgacagtttttaacaaacagaacaaacatggattccacttttccaacttcattttgtgttgaacagaaaagtaaatcgtaattaacaactgtttacagggatttaatcccagtggcagattaagcaccctagtctctttctcctcattccccaatttttttaacttggcagaaaaaaatactcatgaaaagaataatccgcaatcgcataggaaaacaagaaaagatgccattgagagtctgtggtggtaaagaagtcttggaagatagagaacagataggagagaaatctactatccacaatatgcacaggggaaggagatagtgcaaagatcagtgcaaagtcagagaaaggcagagtaaacatatactaagaagaggaaggggtcttggaggctccttttagaacaattcattatacagcagcgctcagaacaggaagtctagagcttcctcattcttcatctgtcatgagtcccaaagatgaaagggaggcacagagaggtttagtaactcacccaaggtattcagtggcaaagcagagcttgtctgactctaaagccctgtttctttctatgcaagatactacatctcatatatgactgttcagatttttattatgtaaagagattttgcaaacgaataagcaaaagacaaacatccaactagaaaataaaaaagcaaaatacatgaacagagagtgataaaagaataagccaaatgtgcaatgaataatacgataagcatgttaactagctagtagaaagcataaagaaggccaggcatggtggctcatgcctgtaatcccagcactttgggaggttgaggtgggcggatcagctgaggtcaggagttcgagaccagcctggccaacatggtgaaaccctgtctctactaaaaatacaaaaattagctgggcgtggtggtgcacatctgtagtcccagttactcaggaggctgaggcaggagaatcgcttgaacctgggaggtggaggttgcagtgatctgagatggtgccattgcactccagcctgggtgacagagcgagactccgtctcagaaaacaacaacaacaaacaaccaaaaaaagtgtaaatgaagacaatttgataacatatttgtctatcaaattggccaagatagaaaataatagtaataatctcagacactgtgagtgggaaggtcaacaggtccaaatgttctgaaggctgatttagtaatcagtgtcaaatgtcctaaaacatgtgctcctttgaatttccacttctaataatttatttcaaggaaataatcatgtatttagagaaaatatataaaaagttcatgatacactagagacgaaattaaatgtactctcatttttttcttttccaccagcttcccaagtacctctagtcatttacacaatggataacagatgagccgcctattgcgggcactgaaggatcagagcttaggtgagggtagagggcaaatctcggctccattcacaataacaggctggactctggcgaaaaaaagaggtgtcagtgttccctccatgtgcccccttttaacagtctcctaataagtaccacatgtctgagctctgagagagcctcagagtttaaatagttgaactccaccctgcagctgctgccgcgaagttaactctaagagctgcagtcaccaagagcgaagaataaagcagcaaagacagaaactcacctggactttgagtttgtcgttcctgcccctttccaggggctgggacagggatcactcctcaagattgggagagttacagggagatgctagcaggcaaaacaggaagtctgtgctttgacaaacgcagtaaggggccgggcttccgagaaaagaaaagtgaaagttttcggagtttgccaagccggaagctgaaggcaggtcggtgcctgcagcctctctccacctcctcatgggcacttgtgaggctcccaggacgtcttggcagttggggtttgggggagggcgtgttgccagttgggatcagcccagagagggaggtatgggaggaggaggcataagggtacagccccagcggcaataggaactgggaactcagcgtccaaatgcttccctaaccacatctattttcccatgacttgtcctcattctgtacattttaggttgatgaaaatgttctcaaactggattgtggtgatgtttacataactgaatgaattcactggaatttatccagtgtgttatcaaactctaacaacacacaaaaaaacaaagagaatgtgccagaaatgcctagaacttgtcaggataagattattacaggaagaaattgaaatgaaagggaacctgcacatgaactggaattgtgcagaggcaggcagacctccaggcagaaaaatggctgagagctgggcaggtagttgggagccaggagtctgaggcagaactgggacctgctgattccagagagcagtaactcaagggctggcagggacaccccttctcatgccccttttaaagatccctaatgtacattgacatgtggggcctatgaaaaatcctaaactattggccaggcacagtggctcatgcctataatcccaggactttaggaggccaagatgggaggattgcttgagcctaggagtttgagaccagtctgggcaacatagtgagaccccatctctacaaaaaataaaaaaataaaaaattaactgagtgtggtggcatgcaccttgtagtcctagttagtgaggaggctgaggctggagacttgcttgagcccaggagttcaaggctgcggtgagctatgattgcaccactgcactatagaaatctgtgtaactttgggccaggctcggtggctcacgcctgtaatcccagcactttgggaggctgagatgggtggatcacaaggtcaggagtttgagaccatcctggccaacatggtgaaaccccatctctactaaaaatacaaaaattagccagatgtggtggcgggaacctgtaatcccagctacttgggaggctgaggcaggagaattgcttgaacccaggaggtggaggttgcagtgagccgagatcgcaccactgcactccagcctgggtgacagagcaagactccatctcgaaaaaaaaaaaaaaaaagaattctatgtaactttgattaaatcaataattctcaaatgtatttgacccacaagttcccctaccaggacatccacaaactcctcagataaaagatgggagacatggatctaaagtttaagaagctttgaaaccaaggctaactgcataagagcaagcccttctatgcaggcacaaacagcatatcccaccctagtatgtacagaatagcagacccggccttgcgggtaatggctgtgggtgaaacagaggcatggaagccacagccaggaaaaattcaatgctaacagctgaggagagggtgcattgatgcctcagcatgcagtaacatacagcgctgtgatgcaggggatggcggtggtaaaggaattaaggttattttatgcaaatgtcacatgtcacttacctgaagcccctccccatcacctggaaagccccttcatgggcatctgaggatcctggcagcaagaacttcttcctttagatctattcagagatacaccaggcaaatgcaaaacaaacaaacaaaagtaaagcaggagtgggaaaataaagtcaatgtcaaatcaggcaaaaattgttacatgaaaaaaagacagctgcgaatgaggatgaaagatgtttattctaagccatatatgcttggctgggcacagtggctcaggcctgtagcttagctagcactttgggaggctgaggcaggcagatcacttgaggccaggaattcaagaccagccttgccaacatggcaaaatcccgtctctactaaaaacacaaaaaaattagctgggcgtggtggcacatgcctgtaatccgagctactcgggaggctgaggcatgagaatcgcttgaactcaggagctggaggttgcagtgagctgagactgcgccacagcagttcagcctgagcaacagagtgagatcccgcctcaaaaaaaaaaaaaaaaaaatgcatgcttgagaacatggtaataatgggaaaacgtcacctgttaattcacatgctagtgattatgtactgagataaattatacataattctttttagctccattttattgaggtataaaatttattcattgtaatgtacattttaccaaatgtagttactacaccagtcaagatgtagaccatttctaggcctggagagtcgcttgtgcctataatcccagcattctgggaggtcaaagcaggaggatcgcttgagcccaggtgtttgagaccagcctggacaacagagcaagacctcgtctctacaaaaatacatttttttaaattaattgggcatgttggcatacacctgtggtccccgctatcagggagacagaagtgggagaattgcttgagcccaggaggtccagtctctggtgagcagtgacagagtgagaccctgtctcaaaaaaaaaaaaaaagatacagaccatttctgttaccctagaaagttccctgtgacctttgcaaacaatcccctccttaaggccagcaccaggcaaccactgatctgctttctatcaccacagattagtttcgtgtgtattaaagttttttttttttttttttttatcaatgaaggcacatggaatgcatttttggtgtatggctttcttttcctcatcatcatgcttttgagattcatctctgttgttgtgggtcagtaatttattcttctttagcaggtatgctagccaccaagatcctgctcatcctgtctgatcagcatgatgtcatcaatcagtctgacttttttttttttttttgagacagagtcacggtctgtctccaggctagagtgctgtggcgcaatcttggctcactgcaacctccgcctcccaggttcaagtgattctctttcctcagcctcctgagtagctgggactacaggcacgcatcaccatacctggctaatttttgtatttttagtagagatggggtttcaccatgttggccaggatggtcttgatctcctgacctcgtgatctgcctgcctcagcctcccgaagtgctggggttataggcatgagccaccatgcccagcccagtctgacattctatgggatgtccaggtgatccagatatctttcaactatattatgacaaagggcaagtgagtcaatataacctgcctggactgcctactttcttaacctagtcctctggctttcccatacattctgtgagctacccaatatagttctaagaaattgactttttgcctgagttagccagagtcagtttggattacttttactcccaaatcctgactgataaaaatgttgggcaccagaggttgaattataggcaagagatattcaaggaaatatgatcaatctgggattggttatctgacataattggacataaaaacagtgaacatccccattagcgttcagagtcaggaattttggagttgtgggcaaataggggtaagttggcaaattaaattacagcactggattgtgatcaagactctatacaattcatttccccaattccaggtgtcagattctagcatgcttagcaaaatgaagagaaatcttccaggtagaatgaaagcattgatttacctttggggattatgacctacttggcctaaatctggatgggggaacagagccaggaggcaggccggagccttctgactccactggtcacgtggcagtaaaggaagacattgggaaccagagatggtctgatggtcctacatatgcctggcccaggaatcccttacccaggagaggttctgtagtgagcatagggaaaaacaagatagtgggaaatagaactgaaatttcaggctatccttacctgggctaatgcatggtgttgcaaagtagggctttctagtagtagcagcagtacccctgaagtaccaatcttaccaccagtcagctgaggaacaccaatggccttgtgcttataagcaaaagaagctggcacattttcaaaaatgtccagttcattggtgtcctgggtctgcctactgcctaagggcagagagaagagagagaggggatgctggagcaggcggtatagtctgtaccaggccttgttggagccccatggagactgggaggagaggacagctgtgtctaacagaagcccagcatacttttccttcttgttttaaagagggagggagagggagggagagagagggagagggagggagagggagggagagagagggagagagagggagacagaggagagagaggacagagagagagagagagaggagagagagagagatactggaaaaggtgtcctcatcagtgttctagagtttgtctcaaccagattggtgtttgttcctttggtagaaagaaagcagaagtgtggaaggggtagaaatttcttgcactctgtattttgcaaacttatgtatgcaaatttccttgcatatgtgtaatgaaccagaaaaagtaggattcaggagcacatgttttggaaaaatactgctttgcctctggcttttcaatcctcactactgttctgtcactggccctggattctacccataccctggctctcatcagccccctgtctttgacccatttttctgcctggatttctagtcctgtggttatattttttatatttgccctttgcttccatttgtttatcactcgactttatgctgatatagtgtgtttttgtaaattgtttcaaatcctttacagaatgagggctgggtataaatgaaaaattgtgtgcaaacataaatgtaatacagctatcctcctgtatcatattgtccttgaaggtctagataatctcagctccaaaccctttccccatccagtgagaaggctgtcactctcctcaagatttcagtgaaatggttgaagctcatttttttcccagtcacccctggctgctgttgtaaagtgcccacatatttgagaaaacttagaattgcacctcatttctctgcccaacctcagcacttgcctttggctggaggagttgagagagttgtcttttacctctgtctgctttcatggagtgctaagagcatctcccccactttctaatgcatgctatttcagttctccctggccccatgtccaaacactgggcctaagccatccagcccaggctcactaaggtgcatggccagccctggagcctgactgaagatttgaaatgtctggtcttcacttgtccttctcagccacctcagcaaggggtggggacaaatacagagtttacttcctcctcatgatgccaccttacctcaaaacaactttgatctgcttgagttgaatgacttttccaccctctttccttggcaggaacaagtgaccctgtcttccgtggcctcgtggggctggctctgctcctcctcccttgactgagagacgtcatggagattgggtggagggaggactgtagagttggtgcacccacgtcagctagttaggcaatttcacttttcttttcctctttgactgagcaccgaggggcagttggcagcttcacctcagagctgcaggaaggaacggggcagtgaaaatcgaatcgggtgtgatcctaggccaagctcatggcccagcagggccagcaggggcagatggcaagtggagacagcaatctcaacttcaggtgggtcatcgtctcctttcccgtctgtccttcatctctggtagggttccctttcatacttgttatttaatgtctacccagcttcactctacaggtatacaatagaattcagttacaaataaataacgaggcaatcagattttttaaattgcagggattggctgttggagaaactcaaggatgccgtgactcacatcatcttcctattctcttacatctgcaaatggctggactggagctgtttgaacatcatgcctgttctgaggctttgtgtaggattggatgattccccgtgacctctgaaccctctcttctcccccaggcctcctttatccccactccaaaagacaactctgtctaaaaaggatctttttagaagaattaaaatccaaacgcctgtctgttgtcacactttccaggctgtgtagttggggaccggttctgctctgagcccatctatgtggctcttagccctagaatcacttcaggatctctgaatacttggtaggaggaagtgaaagcagatgagacccaacaaaaaaggcaagcaggtagagagtgagtgctgcttctgctttttttattcttctgttctggtattttttacatatctggtcagagaagcctggaaatcatctttaaaaaatgtaagacaatgagaccagtctgaccaacgtggagaaaccctgtctttactaaaaatacaaaattagctgggtgtcatggtgtatgcctgtaattccagctactcaggaggctgaggcaggataatcgcttgaaccagggaggcagaggttttggcgagccaagatcacaccattacactttagcctgggcaacaagagtgaaattccatctcaaaaaaaaaaaaaaaaaaagacaagtacatcaatacggtcatttcttcttatctgtggattctgtatccatggatctaaccaaccatgaatgcaaaatattttctaaaaattaaaaacataaataacaacaataaaaagtaatataaaaatttaaaatacagtataactatttgtatagcatttacattgtattaggtattataagtctagagatgatttaaaatatacaggaggatgtgcataggttatatgtaaatactacaccttttatatcagggacttgagcatccatggattttggtatccatggagggtcctggaaccaattccccctggataccaagggatgactgtacattcttgataaaaatgaaaatgtgtggaatgtaaaaatgtatggaaacttgtctaattgggactctgtgctaaggctacttctggcgctggtacagccccaagaaagcaaaagctattgctattatcagcagtagtggtggcaccagactggttttcagtgcccagtgccaccactcccagacaggcatccctgtcatctctctttcacttgctctctagtgaagggaagatgagccagcggagctcaaagtccagccagcccatggtcaccaagcaggaagaagacggcactgagaggtgacaatgggctaatgctaacctcaaagaatgagttaggaagtgttgcctctgctcttatttttggaggaaattggggaggatgatgtcatttcttccttaaatatctggtaggattagctagtgataccatctgggcctagtactttcctttctggagggctattaattatcgattcaaatttctttaatagatgtaggcctattcagacaacctatctcttgtgcaagttttggttagtttgcctcttaaagaatttgttcatttcatctgtgaccaaatttgtaggtgtagagtccatagttttcctttattacctttccattgtccatggaattcgtagtgatgacccttctttcattctgatgatttccgtcttctctatttttttctttgttaggctggctagaggtttattaattaactctttgaaaagaaaatcagcttttggtttcattaagtttctcgaatgttttcctgtttcaatttttttaacttccactttaattttaattttttttcctgcttgcatcaggcttaaattgctccttttttctctagtttcctcagatgaaagcttagattattgacttagatctttcttcttttctattgtatgcatttaatactatacatttccttctaagtgctgcttttgttgcatcccattcattttaataagttgttttccttttcatttacttcaaaatatttttaaaattcttttaggacttcttatttgaccctagaactcttttggttaatctggaaatattttggaattttccagctatttttctgttactgatttctagtttatggtctgagaacaaacttttaggatttctattcttttaaatttgttaaggtatgttttatggcccaaaatgaagtacatcttggcaaatattctatgtgagcttaaaaagtacatgcattctgctattgttaaatggagtaccgtataagtgtcagttagaccaagctgattgctattgctcatcaggtcaactacacccttactgatttttctgcctgtgtgatatgtcaattaataaaaaagaagtgttgaagccttcaataatagtagtgaatttgtctatttctctttatagttctatcagtttttgcctcatacattttgccattagtttgttagttgcatacacattaaggattgtgtaccttcttggagaattgacccttttatcataatgtaatgtccctctttaatccctgacaattttccttgttctgaagcttctttgtctgaaattgatatagctactataccttttctttgattagtgttggcatggtatatcttgctccatccctttatgtttaacctatctgtatttttatatttacaatgactttcttatagacaacatatagtcgggtgttttgtgttttttatgtactctgttgatctcttgtcttttaattggtgttttagaccattggcattaaagtgattattaatatagttagattaatatctaccacatttgtaaatgtttcattgtacctatcgtttttatcttttcttccttttttcctgccttttctggtttaattgagcattttatgcttctattttctctcccttcttagcatatcaattatacttcctttaaaacatttttagtggttccctgaagtttgtaatatatatttacagcgaatcatgcccattttaaattacactatatcacttcatgagtagagaatacaccatgcaactgaatgtcccaaattctgccctcctgttctttttaacattgtgaaatgactgacaatgttaaaaagaacaggagggcttccagtcattccatttatttatgtcccataaccactcaatatgttgttgattctattaatttgaataaatggcttcattttaggttaacttggagtaggaaaaatgaaaacattttattatatctgcatttatttcttctctggtgctctttctttctctatgtaaatctgagtttctggcccacatcatttttccctttgcatgaagaaattctttttttttttttttttttttttttttttgagatggagtctcactctgttgcccaggctggagtacagtggtgcaatctcggctctctgcacactccgcctcctgggttcacgccattctcctgcctcagcctcctgagtagctgggactacaggcgcccaccaccacgcctggctaattttttgtatttttagtagagacgggatttcaccatgttagccaggatggtcaagaaattcttttaacattttcacatggagtaggctttctggcaaagaatttcctcagtttttgtttgtttgagaaaatctttatttctactttacttggaaggttaatttcacaggatatggaagcctacataggctttttttttctttcatcactttaaatatttctttccactttctttgcttgcatggtttttaatgagaaatctgatgtaattttatccttgttctttcacaggtaggggttttttgttttttttccctaccccctggcttttttcaatattttctctgtctttcgtattctgcagtttgaatataaaattgtaattgccaaactagactcttcttgtccattgcccagaaaagccacacattgagaatagtaggagttgcaggagagagagaatttaataatcgcagggccagccaagcgggagatgtttctgaaatccatctccccaagaattcagagactaggctttttaaaggatagttaggcagacagggggctggggaacagggaagtgctgattgcttaggttgggaatgaaatcacagggggttgaagctgtgttcttgtgctgagtcatttcctgggtaggggtcacaggacctggttaccaatcctgtggtattagctgttccattagaatgcaaggtctgaaaaatacctcaaaccccagtcttaggttttacaatactgaagttatctataggagcaattgcggtggttatggatcatgtgacctccagctacatgactcctgaaccataattctaatcttgtatccaatttgttagttttacaaaagtggttttggtcccagagcaaggagggggtaagttttgggaagggattgttataatctttgttttaaagttaaactataaactaaattcttctcattgttagcttggcatacacccaggaatgagcaaggacagcttgtgaggttagaagcaagatggagtcagttaatttagattcctctcactgtcatgatttttgcaaaggtggtttcaatatgtctaagtctagatcatttgatatttatgcagcttggtgtttgatgagtttcctgaatctgtggtttgttgtctgtcattacttttggaaaattcttggctatcactacttgaatatttcttctgctctattttctctttcttctccttctcgtattccaattacatatttgtcacactttctgaaattattccagcattcttggatattgtgttctgttttgttttttcctttttttttcctctttgcatttctatttgagaagtttcttttgacatatcttcaattcactgattctttccttggccatgtccaggctactgatgaactcatcaaaggtattcttcatttctgttacattgtttttcatttctagcatttcatttttcattatgtctttgagttgtcatctttctgctcacttaaccatctgttcatgcgtattgtgtgcttttttctttagagcccttaacatattaactaaccatagttattttaaatttctgtctaaaaacttgaaaatccatcatatctgagtctggttttgatgattactttgtctcttcacactgtgttacttcttgccttttggcatgtcttataattttttttttaagtcagacatgataagtcaggtaataggaactgaggcaaataagccttcaatgtgaggttttatattaatctgggtaggaaatgggccatatctaatgtttgttctagctgtaggtggcagaggtgtcaaattcctctagcgttcttgtttttctttcccctgctttctctgggtttctctgagaactcctttttaaatagtctgtttcttgtagttcttccagctgtaatctgctcttattatacaggaaccctgttgatggaatggtaacgtgtcagagggggaagtggtctataatcttatgattacatctcgatcttttaatggaactgcaccttgggctattacttttaaaagaatttctccctccacccttttttttcaatttttttgagatggagtcttgctttgttgcccaggctatagtgcagtggcgtggtctcggctcactgcaacttctgcctcctaggttcaagtgattctcctgcctctgcctcctgagtagcagagattacaggtgcctgccaccatgcccagctaattttcttttgtgtttttagtagagacggggtttcaccatgttggccaggctggtctcaaactcctggctttgtgatccacccgtctcagtctcccaaaatgctgggattacaggtgtgagccaccgtgcccagcctcacctccaccctttttagaagtgacaagatggccagaaggggctagattttggtagtcacccttcccctagaatggttaaagcattttccctggagagcaggcccttgtcatggagaatgctttggctttttaaaaacttttcttttccctcttcttgccagaaggataaagagatttttcttggggtttgtggaggtaaaatccataaaaggttgggggcctgccctgagatgatgacccccaggagtttctcatgctcatgctcctccacactcagcctccagcaattcatcaaacataccaggctatgacttcagtgcctgctgcctcagatagttgatctcggctaattctctggatttgcctgtatctccagattttggggcagtttgccttgtgactttggttatttgagagatagaagaaaagttgttaattcatagtttgttcagcagggttgttgttgttgttgtgaggatgggagcgatgacttccaatgtctttgcgtgttgaagctgaaaccagaggtctagtgaacttttacatttttgaagtttagacttttttcttaagacaaactttctttttgttttaaattttggttttattatagtattatcttatagccagagcatgtaacctgttcaatttctcttcattattatttattgaaattacttcagggccaaatacctggtatgatcttgtgtgtttaacacagtgttattaaaaatcaattttgccagtttttaaaacttacattttgtgtatctttgttcttttatttttatctacttgagaagctaaggactggaagtaagatgttttttaacagccttgaaagatttccccattagtaatctttaatcttactttttaaatgtgagtattgagaattttaccttctttctcatttgtatttgcttaatgaaacttatccatcttttgactgttaacatttttaatgttattttatctctgttatgtctcttgtagttagattctattttgaccatttataatttaagatggtagcttaatctgttttaaatatcttgttgcttatggattttttatttttatattttatgcctctttattttctataagaaaaagagcatgtttttctttctcattattttgtaaagtttgtagcctcattttgactctatttgttacacttgggtttctaattaattctttaatgtatatttctctaactgagaccatcaaatttataactatatcatttgaatttgtatttgaaataagttacttaactcaattttttacttgtcctcactcaatttaaaaaactttaccaagatatcgcaccactgcactccagcctgggtgacagagcgagattccgtctcaaaacaaaacaaaaaaaacattaaaatagaatctaaagtttaagattgaaattactataattttattatatgcagtatatatcctctctttttagaacagtgcttctcaagtatttgggttcaggatatttttatatttttaaaaattatcgagaaccccaaagaactggcttttgtttattgggttatatctgttgctatttacgatattagaaattaaaactttgaacacttaaaatatgtatttattcatttagaaataatagtagtgaatttattacccgtgaatatgtgatgtgtttttatgaaaaataataaaacttttcaaaatagaaataaattagccagaggattagcattgctttacatttttatacgtcttttaaatataagtagaaggcagctagaccctcctatctgcttctgcattcaatccgttgtgacatcacaggccatttagcctctgaaaaatttcattgtatattcatgagagaatgagaaagataaagggaaaataatatgttattatgtgaagagttttacttggtgacacctgaaagggtcttgcacaatcctagggggtccctaaccccactttgagaattactgttctaagataatttatacatttgagacatcagtattgtaactggttttaatgatgcttccagttcctctacaataaggctttactgatactgatttcttgattctgttaatgtagtacatcatcaaataattcgtcctacacagtgtcagtaaaaatggagtagggtgatctataggaacaaacaattcccaaatctcaacgggtcaccagccctctgcacagaggaccctcatcctggactctgtctctggctgaggagcagccaccccatctgaaatgacagtcactgtggtagaggaacagagagcatgcctaaccaggtgctgcctctgagctcttctgccagagtgatacccattgctccaagggaggtacaatcttaccttggcccagaagaaaagaacattgaaaaatgtgtgaccaacacagaaggtgcatgagcaaaatattctttgagtccttgtctatctaagtattgattctgccctcatacgtgaatcattgaataaggtatacatttttccattttaatttttttggacccattctcaagaactgaatgggtatacactttttttagtagtttcctcttacctctaggtttataggtttgcatcattgctttagacatttagggtttcaaattcacttatttttccctttagggcttttccccatatgttctgggaaattctccctcctttatcttataaaaattttcattcactttttaaaaatttcacaatcattttgaatttccaaggtcgttttattttctggttgtttcttttctgcatggaatttttggtacaatatattctctttctgtgtgataatatttgttgtttagaaattcttttttgttccctgaaacatctgtatttccgctagggtaattttttgccttttgcttatcttggttttactccttaatgttgtaggtttccacaaatgctgtggtctgttgtag

SEQ ID NO: 15825 - DNA, 38253 bp, Homo sapiens
atagacagacgaacgggagtgggcggagcgggcgccggatgtgacgtttccggaacctccgggtgtcatccgcggggaaaggtggggaagggtcccgggaacgtggtggggcagggcctccgagcgtggttggactttgaaggggatcggccgccgtgagtgtggggcctgcagcctactctccccgagtcccctgcccggcctgcctcgctcgaggcacccgacggcttctgtctccgcgggctggcgcctgaccagccaggcccagcggttccccgcctactgcatttgaaagatcccgaaaaccctggatgattgtgcctggggttggcaagttcgtcttgagtgccttcaagaagggttcctcaagcagttgtcgatagagccctccctactgtatacgccccctccgctcattcctgctacttcctttctcctcctcgtatttccccctcggtcctttacgccgcctttccccctcatttgcagatgctgcatcccctttttggaattgctcaaccaggtggtaaccggcgccgcttcctggccttgggaggtggttcctttcttaacccacaagaacctctcccaagaggtactgagatgcaacaagcatcctctgtttcagttaactttcatgggccgtggactaggtttactaattacttggggaggttttagatatgcttgcggctttctgagtccctaaggaggcctcgtgagagatggactatctctgcatccctagtagtcctcacggcttttgtgctattagtgagggtgttttagaggggaaggtttgtggaggaattgtgacccgaatattgaagagacctaaagatggaattggctgagagaagactacccctgagggaagagttgtagtagaaaagaaaaactggatagataaatgaaactgaaatgtgaggatgcctgggcggattggaatcctgactgaagcaaaagatctctgttggggagggccagttgccacagggccttgaattccaagatttattctactgtagtttgtgtattctagagcatactgattagggtttgctgtaatgcaatgtgtgtcaaatgcccagttttattttggagatgatagtggtgatatctggttggaatttggaatctgattctaacagcaactatatctagaaagactagaattactggagttttgggacaccaggggtttttgcaatgcaagttaccatcgtgcctttttgttattcagtgtttagtctatgaagatgagtaaatggttgttttcaagatttaagtctcttgccatgataatgatgaatgaatgattttatagattgactatagtggtttagtgagcagagttacaattatgagcattaattcccagaccagttcccctaactcaccttgtgctcaaatatgaaaaaggataccacagaaaatgtcagttactctcagattaagtaaaaatggtcaaccttgaagttagttaacaatcctcaagaaagttcactgagtgcactctgccaggtactggggtggaggtatgtgggtatctggaaggagaaataatagaaaataaaagatgctgttcccacttttacagtgctgtgggcggagccccctaatggcaaaggatttgattaacttgaactgaacctttggttggtccactgtggttctactccttataccacctaattatggtacaggggttgtatgttttctagtctgccagtactctcatcgttgtgatttgggcttccttgagggtctcagccttcttgtaggaaagtccttatttaataggagccacagcatttggtatgtttctcttatattttcttcttaaggtagaggtctgtgagataaactgtaaaactgctgggatgatgagggcaacggtattgatgccatctgttttttctgtctcagaacttggtcctgatgtctgaccatggagatgtgagcctcccgcccgaagaccgggtgagggctctctcccagctgggtagtgcggtagaggtgaatgaagacattccaccccgtcggtacttccgctctggagttgagattatccgaatggcatccatttactctgaggaaggcaacattgaacatgccttcatcctctataacaagtatatcacgtaagacacctacagtttcctttttcctttctggtgactggtgcctcgcctatttggctcagaattgctaaaaccacagaacttcacaatatcatcaacattaatcatttttgctggcaactcctacatattggctgtccttgccgttcaaagacatgagtgctgaaggtgttattttcatgactcagtaatttatgagtaagagatttagttctttggcctatgcccacatagcccagctgttagacaaaagagttggtggttaaactagacatattatgttctgatgaatgcttttactgttctctttctactaaagcagccaatcataggattattgttggggtctagcagagccaaaattcctcacttgtacttattttgtagcaaatttagtgatacaggaaaaaattttttcctcttaacctttatcataatcatgcaaatcatcaaataattagtaactgcctacagtttgtgtggctcatcataataagacctttcccttaagttatttatcatcttagggtaggcagcataagtagaagatttcagtactattaacagcaaacaacttctaaaactccattgacaatgatacataatttagaaaggaaataatgttaaaggtcttatttatcatttctaatcttgttctttcacaatatcaggactttttaaaaaataattataatgtatttggttctgagtagctcatagtgtgtttcacctgcataatttcatttgatcttcacagttctgtgtgcatggaatagggtacactaccctacattctacatatgaggaaacaaactcagtgtttggtggatgctcatgtttgaagtgacaaaaccttggttttctgactcctaattcaggatttgttctacaacataggtcctgttcttcttgttttccatttagtaatgttctagagtcagaggtagtcttttgagatcatagtcatgagccacactggctatttttttgttatttattttactactgatttttgagtaggtaacatatatatatatatatatatatatacacatatatatggtgcacaattcagaggcacaaaagaataactatagttaaaaagtaagtcttggccaggcgcagtggctctcgcctgtaatcccagcactttgggaggccagggcaggcggatcacctgaggtcaagagttcaagaccagcttggccaacatggcaaaaccccatctctactaaaaatacaaaaattagtcgggcatggtggcgtgtgcctgtaatcccagctacttgggaggctaaggcaggagaatcgcttgaaaccaggaggcagaggttgtagtgagccgagatcgtgccactgcactccaggactccagactaggtggcaaagcgagactgtttcaaaaaaaaaaaaaaaagtctccccacccactcctcttttccccccaaaccctcagtgcttctccccagagacaaccactcttagtagtttcttagatatcttccaagagatgatatacacataccagttttatcacattaagtttttgatcacatactcctctaaagcagggcttttcaactttggccctattgaccttttggactgaatcattatttgtggtgggagctgtcctgtgtgtcacagaatgtttagcagcatccctggtttctgctcaccagatgccagtatcccccctccccgcagtgtgacaaccaaaaatgtcaccagacattatctgatgttctcccaggggcagaatcacctctgagaaccagtgctccaaaggaaagtatgcggaagaatggactgtctaggattcatattgtaattgtagagtggagaaatgggactgctattgtcttttttatttagaagtgttgcctgtgttaagaggagaaaaccttagacaagttaaatttaacagagtttaatccagtagaaaaaggttcagggaacactcaggaccaaaagtggtgcagaatgttccaccccatagtggaggttgtgcaggctatatttatagtcagagaaaaggaaatgagatacagaaatagcctgattggctacagttatgtgtttgccttatttggtcatgttttggcaggctttagcctccaattggctggaggtttcagctgctatgattggctgagactcagctatttgttacacttgtaacctaactcttatgttaagttacagtttgtttatacattaaattaggttacagttcactatctttggaggcagctttaacttaacacctgtttccttaaagatctgtagttctttaatgccattatgtcatgtcatgtggcctcaatgttgttaaggtttcataaaattataattatatttctgcttctgtttgctgttatgagtttttcattcctaggcacactatttattttcctgcacagtttttttgaccctgtcttctttatatattcttggtagaaagaatattcttatgtatttcctataagcttgtagattgttctctcagaatgaaacccaggggcacaattcctttggagaaacactaattcagaaagttcagtagaatcatggaatcactgcaccaggtatttcctgaagggccttcagaatcctattgccccacaatagaaagggctttcagggcaaagaccatattcattcaacacatgtatattgagtatacctgctgtctacatggcactgcactaggtcctgaacagcagtgagtaaaatggcccctgtccttattggtgttcctttataggtatgggagaagacaataaacagataagcaaataaatacagctgacccctgaacaacacagaggttagcaccaatcccccatgcaatcaaaaatatacatatggtcaggcacagtggctcacacctgtaatcccagcactttgggaggccgaagtggatggatcacttgaggtcaggagttcaagacaagcctcgtcaacatggtgaaaccccgtctctactaaaaatacaaaaattagcctggtgtggtggcgggtgcctgtaaccccagccacttgggagactgaggcaggagaattgcttgaactcaggaagtggaggttgcagtgagccgagatcacgccactgcactccagcctggggacagagcaagatcatgtcttaaaaaaaaaaaaaaaaaaaaaaaaaaaatatatatatatatatatatatatatatatatatatatatatatatatataaagtttttgactccccagaaacttaactactaatagcttactcttgactggaagccttattgataacatggtcagttatcacatactttatatattgtatgtattatgtactatattcttacagaaaagtaagcttgagaatagagaatgttattaagaaaatcataaagaatagaaaatatagatactatttgttaagtggaagtggatcattatgaaggtcttcatcctcgtcatcttcatgttgagtaggctgaggaagaggaggggttggtcttgctgtctcaggggcggcagtggcagaagtaaatccgtgtataaatggacccacaccattgaaacccatgttgtccaaaagtcagctgtagtcgaaataaggaaaatacttaagagtactgtgatagagaataagcaggggtttatgactagagtagtcagggtaaggtctgtctgagaagacaagatttgagctgagacttgagggatgcaatacagttggtcattccaagagcatagggcagagcattaaaacacaggtaactatgtgtttagaagtgcttagatgggaaagaccttagcatgttctggggattgaaagatcattgtgtttggagtatagccagagaaaagcaagatgactccaggtaaggctggagaggcaagtggggctggatcatgcaggactttatgggccatggtaaggagtctgttttttatcttgagggtaacagcaagccattgaaaagttttaagtgggattcagacctaaatttacttactgttttttaaaagagatgaggtctcggccgggcacagtggctcacgcctgtgatctcagcactttgggaggccaccctggagttcaaggccagcctggccaacatggtgataccccatctctactaaaaatacaaaacttagccgggcgtggtggcccacgtctacaatcccagctacccgagaggctgaggcaggagacttgcatgaacccgggaggcagaggtttcagtgagccaagatcgcggcactgcactccagcctgggtgatagagcgagactcggtctcaaaaaaaaaaaaaaaaaagagatgtcactaatgttgcccaggctggtctcgaactcctggatgcaagcgatcctcccatctcagcctcccaaagtgctaggattacaggtgtgagcctccatgcccaatcaatatttaaagtataaattttggcagttgtgtggtaaatggtggagcaagcgttaagagaaggcagggagagtagttaggaaattcttgcaggctggtggcttgaagtagtgtggcaacatggaaagagacagatggatttggtattttggaggtcaggtccataggacttactaatcacttaggaaaaaagatactgcggaggttgatgtcgtgtttctgccttgaacaacttaaacgatagggtagtccatgtattgagatgggaaaagccctctaaagagggctgggtagcgggggaatttaaccgttcacgtttggggtttttttgacatgttaaaatttgagatgcctgtgagatatccaagtagagatgtcaagtgggaggttgaatgtaccagtctgaactcagaagactgaggtctgggctggaaatacagacaagggagtcctcagcatacagatggttctgaagtcatgagaatggctgagattttctttttctttttttttttctgctgtagaaattaattttattcttattcagactattttcaaaagaagcagtggtgcgctgtttttctaaaaatacgcctttagagatttttatatatgtatataataaaatccatacatgtatttacatgattgctacatacaaaattacagcactgtggtatgtacacatctacaggtacattctttccacacatccctgctgtgctttccccgtgtgaaggagggagactgaatcagttgtgagcagccaagggctggcccgtcgtcggaacctccgaatgggggctggggtggaggaggtgaggcgattgccgaggcaggagcagcagctgttgcagggctctcctgcaggccagcaggcagcatctggaggctcccggcagcctccccctcccctccaccccgtggtgcccgcgctgccctcaaggtggggtggctgaccacagacccctctggtgccattctgtggcctagacttgcttggctgggccaagaagttgtgtatgtgaggggtggaggagggagctgtgggaggaatagaccctgtccagccccagccctgagcaggggaaagggctggatggctaaagcctgcagatgactggtgagaacactccgcttggcccggcactgctaagggtcagagactagaggctgggagggagagcagtggccgccggctggggaacagggccttcttcctccctggggctcagagggtggcctcagctgagcttgagtaagcccagctcttaggccctgcggccagaggcttggcctcctgccagcagaggtgcatgcacactggggaggggctgccatctccacttcaacccctgggccaggggctggggaagaaatggaggcttaggcctggcctgctgccctgtaggactaggtccccggggctcaggattcctgaggcatgcagagaagggcctgagaatgcctgagattttctagtgaaggggctcttaatctggggtccaggaacctcacagagattcattgatagaattcaggggatctgtgaaccggaataggaaaaacttttcttgttttttctaaccagtgactgaaatttagcatttccttccattttgaatgtaggcctcaaagtacagtagtagtaatatttgtaattttgtcaccagtagaaatcaagatattttcatattgcattacagttgttgctgacatctcaaaatagcatctaaacatcactacttcagaattacagtacagaattattagacctacagctagatcccattatcaaatgcattgataaagaacacattaggccgggcacagtggctcacgcctgtaatcccagcactttgggaggccaaggctggcggatcacgaggtcaggagatcgagaccatcctggctaacatggtgaaaccccatctctactaaaaatacaaaaaataagcctggcatggtggcaggtgcctgtagtcccagctactcagaaggctgaggcaggagaatggcgtgaacccgggaggcggagcttgcagtgagccgagatcgcgccactgcactccagcctgggcaacagagcgagactccatctcaaaaaaaaaaaaaaaaaaaaaaaaaaaagaacacattaatacagaagaatatatcacaatttttaaaatttttgaaaactgtttttccataaaattggggtattcttggtaatcctttgtactttaagttataccttaaaaaaattgttctgaaaagggtccataggcttcaccagatgccagaaggatccatggaacataaaagatcaagtatctttgttaataaggctagggaatgagaagagaaggagcctaggactgagccctgaggttagttaatggagggagagtcaataggggagactttctttgaagggaggttcaagaggcaggaggaaatccaagagagaatggtgttgtgtcatgggagccaaaataaattagtgtttgaaaaaggagagtagccacctatgtcagatgggtgaagacagaagattggcctttgggtttggtaagatgatgtcatgggtgatcttcataagcaatttcgctagaaggattacagagaccctaattagaacgggtagaaaggtgaatggacagtaagaaagtggaggcaaagggtatagacctgaaagtggcaaatttttttctataggggaccagagagtaaaaatttttggttttgtaggctacttgctgtgtctgtgactacctctgctttatagtgtgaaagtagccatagacaacacataaatgaatggatgtgactggttccaatgacactttatttacaagaacagatggctagctggatttggcacaccagctgtagtttgccaaccccggtatagacaactctttggagaagtttagatgggaagggaagtagaaaaatggggaagtagttgatgggggacaaggagcgtgtgaacatgtgtatgtattttaagttaggagattttagagcatgtttttgctgatggaaaaggatcttatggaggaggagaggctaacagtccagaagagagcttagctgtactaataaactcctcagaagtcaagaggggataggattaagagtacatggatgcctaaggaattgttttttatgacacttagtgttattttgagtgacatattagtgttaacagcaagactgatatggggagtttgtccctgtcacttataggaccacttaaaatgatgaactactaggagagttggtgcggatgagatttagcagctcatttacttgatttgtgggatttagagtttaatttggaattttgttgtattggccttacctgaagtaattaatgtagctaccttcacttttcttggagatacctttaaaatcttgattctgattctgattctgtgaacagaaaatcacagcaattgcaaacaaattctagctcactgattctcagtctgttttctgttgtattttacttagtacattcctatcaataacagtggctcagctttggcagttactacaaccgaggagaaaagagaggggagtatacatctgcctcaccactcctctgcctcccctactactgagaatcattgttctagaccttttgtggatactttctttacttcagggttttaaaaggcatgtttgttccttttcctggagcagttcaggcatcttaatgatctcaggcatatttcccccctcagtagcttccctaatgtaggaatgctttgccttttgcagaccccagtatagaagaaagagttcagcatattaaatcagtacatattttcatgatgagcgcagacaataaaccaggcagtggattctttcacagctttttatggtcatcaactaggctgcccagaagggagtgagagtattcaggcaattcctgtgtgctatgtgagcctcctggaacaccaaccctttttctgaaaatgaactgtcacctgtgttgaaaatgtttgctgggattggggtttatagactgaagaaggttccatctgtgatcatgcttaccatgctgagtaacttttaagactggaagaatcgagatgaggatccttaatgcatccatgttaaagaacctttgcttgactttttgaattagttgttttcatacaaaattaacacttattcacgatttaaaaaatttttcaaacactacaagggagatattaaagtgaaaagagaagtctcatctatcagaggtggccactattgtatttctggcatggatgaggtgtgattaagctcataggtgcccccatgtgtccttttccttaaagcatcaatgggatcttaccacgtattctgttctgcgacttgctttcttcacagtagtgtctttccatatcaggacatactgagccatctcattctgcctcagagctattccatctgcctggaacatgaatctggaacagtcccagattcatggctcactcttgtctagtccttactcaaatgcctccttcttaatgatgacttccttagctgctgtatctaaaatttcaaccattcccctatccctttctatcccccttccctattaatgactttcctagcatacttctgtttattgtctgttcccccattgtaatgtatactctatggtggggaggaatatttgactgtgttgttcactgccatatccccaacctttagaataattctggaccctgtagtagatgctcagtaaatattcactgaatgaatgggtgaatgattacattgtcttcacatttgaatgcacattattttttaaacaatcccctattgatggacatttaggggtttgttttttttttttttttcagttttttctactttttaaaacaatgctgtattgaatatttttatacatatatctttgtactgttttataatgatctctaggataaattcctagagatagaattgtgagtttaaaggatatacacattttaagttggatgcggtggctcacgcctgtaatcccagcatttcgggaggctgacgcgggcagatcacctgaggtcaggagttggagaccagcctggtcaacatggcgaaaccccatctctactaaaaatacgcaaattagctgggcgtggtagcaggtgcctctaatcgcagctactcgggaggctgaggcaggagaatcacttgaacctgggaggtagaggttgcagtgagccgagactgccccactgcactccaaccagggcggcagagcaagactctgtctcaaaaaaaaaaaaataaataaatcaaaaaaaaaataaatagtacaaattaaaaataaaggatatacacgttttaaattttgaataattagcttccattttccctcccttaagatgaaaggttatattaatttacaatcttgctaacactgtatgggtatcccatttctctataccaggtatgatcaacctttaagtcccatttctctaccaggtataattaacctttacgcctttgccaatccgatggatgaaaatggtatctcatcctaatttgaatttctttaattatgagtggattcagcattattgcatatattcatcttttgtatttacttttctgcttatgtcttcttttttcattgtttattgggtcattttgcttgtgtttttgcaatcatatctttgtttgctttggtacctttcctctctccaggcttcaaccagatataaccccagagaacagtatacatctgggccaccgctttctatccttagaaagtttctagggatagaactttgaaccatgtaatggagtctagtttataagtaaagaaaaaactcccaaacctgtatatgatgctggtgttagcatcttcatctcttattcttgctcacattttttgtttattagttaaaaaaaatcatagaaacccatagcaaatattgactatgttctagataccgtgtttagcattttattatctctttaagtgtcacagcaagcctgtcagggagtactagtttgtctccatctctacaattttatggacaggatatcagccatgtccaaccctttgaatgcaaggacttttttgcttatctatggtagcagatatcacctttttaaaagttcattagctagttagtgttagtgtattttatgtatggcccaagacagttcttcttccagtgtggcccagggaagctaaaaggttggacacccctgcaaaaaactgagggatggtgagattaagtgacttgcccaaggtcacatagctagtaaatggcaaaaccaggatttgagcccaggcacagtggctccagagccagccctactaaccactaagttcttttacctccagtatgagtaatggggtatgttgcccattgtctgtttcaggagacctttttgcccatctatccccattcagaaaactggctacagttgttgaagcaagggaaagctattcatgtacaggtctgggaggttttttttgtttgttttttgtttttgtttttttacttataaactagatttccattacatggctcaaagtcaaagtaatataaagaggtacttggtgaaaagtttcacacctactcttatctgttctattacccctgccctcatttctgtgtatacttcctgtttctttgtatacttacaaagcaaagtaaataaatacggcaggctaaatacggcaggttgtcaaataatgtcgttttgtccaatgtcgttttgttttaatgttgatgagaaaagaaaaatccattcctgcctggggccactgtctgtgtggagtctgcacattctccccatgtctgtgtgggttttctccgggtattcaagtttcttcccacaccccaaaggtctgcacattaggtgaactggcatgtctgaattgtccccagtctgagtgagtgcaagtgtatgtgtgatgccaatgggatggcatcctctccagggctggttcccaccttggccttgagctgctgggatggactctggccacctgggactgaataggcaggtaaatcatttacttacttgtttttataagtctttcttaaatgtatgtatagctcatatttatttcagtgtttaatattagaagtgttttggtctgtatttagaagtctggtgtttttgtgaccaggatagatcaaaggaacttaactcttgtttatgtcaattagtgcatggtaaagttggttttgttatatgtcattgtgcttaaagtcacaatttccaagaacctatcaacattaaggacttactgtgtatatgtacatacttgtacatatatgtaatgtttactcatcaaatatttattgagtgcctctttatacaaggcactgtgctggcttccaaggagtatacaaagaagcatgaaacacagaaatctctggcctcaggaagctcgcagtgtagttctataataagagcataagtaaaaataaaacatagtgtttatatgacatagtactttcttagctgattcaggcctcaatacaaagcacattcagcctgctaaaggtagtaaatattaatatgtatcttggcttttggggctaagatgagagttctactgaatcatctatcagtctctaaaatataagaaatatgtcttatttatcttaatagattcttcaggactttatggtttgaacaaatgaatctgtatttcttttaaatatagacttcaaggaaactgttttatatctttctttttttttttttttttccaaatagagataggatctccctctgtcacccaggctggagtgcagtggtgtgatcaaagctcactgtaacctcagacttctgggatcgagagatcctcctgcctcagcctcccaagcagctgggactacagatgcataccaccacacccagctaatttttgtgtttttttatgttttgttatatatgtttgtgtatgtatatatatatatgtatatatatatataaattaaaaaatataaatagagacaaggtctcaccctgttacccaggctggtcttgaactcctgggctcaagcagtcttcctgcctcggtctcccaaagtgctgggattacaggcatgagccaccgcacccagcctcttttatatcttcttcatgaacccaaaaggaagctttttaaagaaccatttttattttagagtccatccctgccttgaggagccttatcaagttggatcaaaatgaaacttgtgtgcctaatatagaactgaaggatgaggacttatctttagaaagtttgttttggtggggatcatcttttttctttattgaggattcttcttccaattacttctgccccatgggcagtaagtagaaaagagtttatcccaattacaatataatattttagagctatcagcaagctaccttcaatttatttttttatctcagtttctgtgtattacaacttaattctgttaaaagacatctttgttcagaatccctccagtagttctagacattccagaatccgtatggaagaagtatggtgtagtggttaaaagaataggctctggagccagcctgctcatactgaaattctgaatctgccactttctttctgtgacaggttactggacttttatttattttcactgcccctaagtagatgtcttaaatgttagagatttgtgaattaattaagtttattctccccactgagctttagagccatggacaagaaccaaaagatgaaatctagcatcttatatttacctaagcacttttcatcaaagacagtgcatgctaacatgtaatatgcacatactacatgcatagaacacatgcactaagtatttccatgcatttttgtatgatgcaaagtagtattcttctttgaaggaacacgaatcccaaaggaaaaaagccaaagttaaaggttacataagagctagaaggagtaaggaaacatggttttctcttgcttcctgcccatggctgccaaacggttctctgaagactgctatgtgacagaagccctttcctttgaaaacctgtcacgtcacaacaagaaaaagatctctttctttggaggtacatttttgggcacaagaaaggctttttaaaatttttttggccatctttttcattgtaggagtctggtgcttgctgcctagtttgggagtagaggaaaagactctggctctttagggggatagagatgggaaaggagcatggcccagctgggtgtattagctctccctccgctgcacttctggaacctttcatataagggcttcaggataagggggttgcatagctttagggtcttatggacatttggaccatttgcttcataatcattttgaactgtttccttaggctctttattgagaaactaccaaaacatcgagattacaaatctgctgtcattcctgaaaagaaagacacagtaaaggtgggtcttcactttcattgttgcccatctaaaagcttcagagcagcacagactgacttcaagataaaagtagtagtctctgcatctgagtaccagatcctgcaataggagataaggccatttcaccacaacagttctgaagtagcaggtatggtacagtagggggtattttaaatcattttgggaaatgttgcagtcaccaacttgacttaagtcttcttttggattctgtaattttctggcattgttctaattctattttctgttttgtgtctcagaaattaaaggagattgcatttcccaaagcagaagagctgaaggcagagctgttaaaacgatataccaaagaatatacagaatataatgaagaaaaggtcagtatataacagctaagaagaaaattattttgcttttttaggctgtgccctgggattgtaatatgacatttcaatatatcctgtgcttttaatgtgctgtttcaccttttttgggcaaagaccagaaactcaaaaaagtagaacaccagtggttaggctcagggttgtaacacagatatagcctatttgtcgaagagagtgacttgagggacagaaaatctgtcgcctacctgctatgtctagagtgagaatcataagaacaatgaacattctctccaaaacataggtttttagatcagagaatttgagggttggattcacatttggttatacctgaagctatttataagaattgacttttcaagctattttttttttttttttttgagacagtctcactctgtcgcctaggctggagtgcagtggcacgatctcagctcactgcaacctctgcctccccgactcaagtgattctcctacctcagcctcccgagtgactgggactacaggcatccgccaccatacccggctaatttttgtatttttagtagagatggggtttcaccatgttggccaagatggtctcaaactcctgacctcaagtgatccgcctgcctcggccttccaaagtgctgggattacaggcgtgagccgctgcacccagccatttcaagctattttcaaatgattctttttaggaagtcagttaaaacatgtggagaaactgccagggcgctgtcagtggccagctgtgaatacatactgcagccactcacaggctgttgtgtagctgtctgctggtctctattctggactctgatgttgaaaatcagcagagggatgaacagctatgaggtatatacttctaaagcaccaagtgagtgtaagctttaaggaggaggttattacttagcatttctttctttctttttttttttaatccaaatgcctctcaagtatttcttattagcttaaaatgtcactctgtgttgaacaaatgcacaaaaaccataaaaatttcagaggcctcattttgggttaaaattcagtagaaggcaagacgtggtggctcatgcctgtaatcctagcactttgggagcctgaagtgggtgatcgcttgagcccaggagttcgagaccagcctgggcaacatggtgaaaccccatctctacaaaaaatacaaaaattagctgggtctctacaaaaaatacaaaaattagtgtggtggcacgcacctctggtttcagctactcgggaggctgagatgggaggatcacctgcgcccagggagattgaggctgcagtgagccatgattgaccactacagtccagcctaggtgacagagtgagactctctaagaaaaaaaaaaaaaattcagtagagacccccaagatagcaggtataagtttggatctggttctattttatagccttacttgaaatatagaatatgtacatgacacagagagaagaataaaactgtctgtgatacaggttaggagaacacagatagtaagttgcatcaagatttcaggccagacattgtggctcacacctggaatcccagcgcttcgggaggccgaggtgggcagattgtttgagcccaggagttcaagactagcctgggcaacatggcgaaaccctgtctctacaaaaaatacaaaaattagccaggtgtggtggtgcacacctgtggtcccacctactcaggaggctaaggtgggaggattgcttgagcctgggaggtcaaggctgcagtgagctgtgatcatgccattgcacttcagcctgggaaacagaatgagaccctgtctcaaaaaaaaaaaaaaaaagatttcagtgaagaggaaagtgcattaggtagagtcattgtcgggagggtattgagaggattgggattttaattgtccttggagataggtatactgtggccagatagaaaggggtggtgactacactccgtgggtataaagatactgaggaaagcatgaattctgtgttaggtaatcaggccacagcagaagtacattttggaaatctccatgctaaaaagccttgttctcctgaagtgtgaagtcactgaggtgtgaagtgttagcctaaattttctctctttgtagaagaaggaagcagaggaattggcccggaacatggccatccagcaagagctggaaaaggaaaaacagagggtagcacaacagaagcagcagcaattggaacaggaacagttccatgccttcgaggagatgatccggaaccaggagctagaaaaagagcgactgaaaattgtacaggagtttgggaaggtagaccctggcctaggtggcccgctagtgcctgacttggagaagccctccttagatgtgttccccaccttaacagtctcatccatacagccttcagactgtcacacaactgtaaggccagctaagccacctgtggtggacaggtccttgaaacctggagcactgagcaactcagaaagtagtaagtgcatttgctgatgtcctcttccttctcagttgcagccaaacagtatcattctgacggggtcaacctaagattacctccctgatcccactcattaagctttggtcacagaaacccatctgataagtattgctgtactgtgtcctaatacactggctatgttataaaagtggcctttgctgaaacctagtctggtcgattttctgaagagctaatattattcttgaaagtcagactgtcaactttttagtgaaaggaaaagaatgtgccaaaccgaattcataatcctcagataacatcatcagactgctgtgtgactctgtgtcccctgctctgactttgttacctctctagcaattcagatcttgctgttgaatacgcaaaagcagaacatctttcccctcccactttttttttttaaatatgaaaatatagctgtgagagacacttcctaactttagcttgctggctgtctcacagagtttctccatggtgttcagaaactgggtccattcttggcattttttatgagctgctttgttcatgccttttttgggggactacactgtattttttattttgttgtggtttggcatttaacttcttccagaagagtaagttcagaagtaaataactgcccagattgttttccattctcaagaatatacaccagtgtatttcttttaaagtcatactctgatattcttatctgagataaaagagatttaaaattaaaagttcagatgaatgggcagtgtcttagtccattttgtgctgctataacagaatacctgaggctggataatttataatgaacataaatttatttggttcatagttctggagagtggaaagtccaagacccaggggcctggcaaaggccttcttgctgcgtcatcccacgacagaagggtggaagggcaaacaaagatccctcatagcctcatcacctcttaaagatcctacctctcaataattttgcattaggaattaagtttccaaaacatgaactttgggagacacagtcaaaccacagcagggaggttatttttttaattctttgtattagattctgacagaaaattcccaaatgtttcaagaacttgtgtctttttcccccctaaattttattttttacttttattttttaagtttttgtgggtacatagtaggtgtatgtatttatggggtacatgagatgttttgatacaggcatgcaatatgaaataagcacatcatggagaatagggtatccatcccctcaagtatttatcctttgagttacaaacaatccaattacattcttaaggttatttttaagaaaacttttcttaaggtagtagtttgcccttttcttaacttgaataattaaagcctactattttctcttcttgaagtaatgtgctccttacagctgtggcccaagattggagaagacactttacagccctttttttggtgccattagaatgagatccctactcactgcctgaagttgggggaatcccagtggcttaatgttgctcctccagggctgctggctgtgaggtctgcttgaggaggcagggctcagtggtcgcagactattctcctttctcctttacagttcccacaatcgatggattgcgccatgtggtggtgcctgggcggctgtgcccacagtttctccagttagccagtgccaacactgcccggggagtggagacatgtggaattctctgtggaaaactggtaaaaagaaaaaaaaaaccaaactcttctctgaaccgaaactgtttcttcccctcttggcatcctgtgactctcagagaaaatatccagggtcagttactctttgtaccaaggaaccgtggactgcataatttcatgtcactttgaatttggtgaccctgtattgattgattgaattgaagtggttattttaatgctagtagtaagaaatacctaattttaaacttggtaggaagatccagtcattatctacatatcaatttttttggtacctactttatggtaggacctgggaatataaaatatgtaaagcacatagtatgtgtccacgaaaagtgcccagtcactttggagagaaggcagacatgcactaaagtctaaccagcatgctgaaaaatatgtacagtataagtattgggaattttgaggaaggaaaggtcactgaatggaggcacttaaagaacccattactgctgaatgaataaataaatgaagtagagtaaatgtaagccgaggcttacaggatgagaagggcttaaggaaacagtgacaggacaacaactttagacctgagcaagggaagagaaatggtactctacccagagcttctcagcagagcagtttggcacagcaggaaattccctcagggctgtggtgtttgcccaggctgcagagttctggggttggtctctgcatctgtcgctgtacagagtaccccaggcaatgtgcatcagcagccaaggttgtgaaccactgagtggcaggactcctgctgtgtgggaagggctttcacttgtatagatgcttacctttccactgtcgggatggagtggagcagggttgcatgagcaccagggaattgtgaccagctgttttctcctttggcagatgaggaatgaatttaccattacccatgttctcatccccaagcaaagtgctgggtctgattactgcaacacagagaacgaagaagaacttttcctcatacaggatcagcagggcctcatcacactgggctggattcatgtaagcaattctgagctgtccgagagttagtctctgcctctcccatggtggtataaatacatgagtgtttctttgaacaaagtcaattatatccagattatttattgtttttctctcttttggatgcagtccttagcatacttgactattgcactttggtattgttttctgggaacacttagggcttttaaatttttttaactttttatttattttttagtaaaaataaactgttttccctaaagttccagtttccctctgagtgtaactggtgatgggatgctggcctagaatataagtggacattgaccttagagactatgcctactgtgtacagatgatgttccttaaaggtatataattcaaaatattttaaatgagccaaggaggttaattcagatgcttgcatttggtctttcttaaagcacctttatataaacaagaagggctataaatacacatgattttcaagtgtctgcatatcttgtgcagccttctggtaatgttcaggtaaaatataatgccttccctaaagattatttttaaatttttctttctattccttttcaacccctcactctcatagcccaagctgcattttatgctgtatgacagagttacaaataaattggcttattcttggattacacatacttgtatgccagaatttgggaaagactgacctgtgaggcagtcccatgtgccttctgtcctttcttctattcaattacattcatgttgatgatttgcctattattgtgtatccccatcccacccccattgtagtagatgggggagagaaaacttgttccttatctgccagggcatacaaatttgagtaaggtatgattttagcctcatgaaggagattaaataaatagacaattaataacttcacctggggcagaacgtgctaaaggccacaagaggtgccagcgaggcactgtggaattcagaggaaggagggaccatgcctgatagggtttagtagaatgttggcaagctgggccaagggcaagttccttaaggagcagacaggtggagaagaggcggactctgtccctggagcactggggggaccagttcactgagatttatggttcatatcaggaaacagtggtagatttttttttttttttttttgagacagagtttcactcttttcacccagactggagtgcaatggcaagatcttggctcactgcaacctccacctcccggattcaagcgattctcctacctcagcctcccaagtagctgggactacaagcgcccgccaccatgcccagctaatttttgtatttttggtagagatgggatttcaccatgttggccagactggtctcgaactactgatctcaggtgatccacccgcctcagcctcccaaagtgctgggattacaggcatgagccaccacgcccggctagatatgttttaatgtagtacattggagccgagttctggagggtctggggtggacaggcagaattgttccactttttagtaagtggaaaattcctaaaggtttttgagtagagcaatgatatgattaaagccatactttagaaaatttaacataaatacagttttaaggtaggttgtggcaaggagatgatttaagaggttagtgtgctgataaagcctaataatgataagagctagggtgatgctagtgtgtttgggaaggaggagatgaatgtaggatttcagaggatttgggaaatgagtaatagaggatgatgactcagagtcaatggtgactcagagatttggggccttgcagtgatcatctcataagcaaaagtaggggatccaggagaaggatttggtttgaaagtggggttcagttctgagcatgttaaatttcaggtattgatgagatattaaatcactggaggtagttatcagccagttggcaatgtagggctagaacttgggagcaaagtcaaagcaggagagagggctctgggaatccactatttagtgctgatcttggaagccctggaagtaggagaagagtctagagcaagaaaaggttcactggcaacttgggggacaggctacctaatgtaacatagaatgtagttagcaatggagcaaagagatgtatgaaaaaggtgagggtagtggtaaggcacagaagccataggaggaggaaggctcttttgttttgttttgtttttgagacggagtctcacactgtcgcccaggttggggtgcagtggcgcaatcttggctctgcaacctccgcctcccaggttcaagtgattctcctgcctcagtgtcctgagtagctgtgattacaggtacccgccactatgcctggctaattgtgtgtgtgtgtgtgtgtgtgtgtgtgtgtgtgtgtatttttagtagactgggtttcactatgttggccaggtgtgtgtgtgtgtgtgtgtgtgtgtgtgtgtgtgtgtatttttagtagagactgggtttcactatgttggccaggctggtctcgaaatcctgaccttgtgatcctcgtgattataggcatgagccaccgcacccggccaaggaaggctttaagaaaaaatttccagatgttaaccatgtcacatcctatggagagctccagaatggtgaagactcggatcggcctggatttgatgaaattattgaggatctcgatttagtgtgttttaggcattaatgggagtagactgtaagagtttaagaactcatagggattaagtttgtggagacaatgaagtatacactaccattttgagcaacttagctctagaggaaaggagaaacatggaatggtggtttaaggagaagttgggttgagagaatgtttggttgattgttcaaagtgaaaggcttgaacatgttttgttttgatgaaatataacacatgtaataagaaagcacacagaaactaaatatatactttaggccgggtgcggtggctcaagcctgtaatcccagcagtttgggagaccaaggcgggcagatcacgaggtcaggagtgcgagaccagcctggccaacatagtgaaaccctgtctctactaaaaacacaaaaattagctggacatggtggcgcatgcctgtagtcccagctactcgagaggctgaggcaggagaattgcttgaaccccagaggcggaggttgtggtgagccaagattacgccactgcactccagcctgggcaacagagcgagacttggtcttgggaaaaaaagaaactaaatgtacactttaacaaatcattaagcaaatatctatgtacatacactacctaggtcaggaaacagaacactgtcaggagcatgcatgccctaagggagggaagtcctcccttccttgcttcgtttataatttcaccacttcaatgtgtatctctaaacactatagtttacttttgcctggcttttacctttttgtaaatggagttataccatatgtatatttgtgtcttgcttcttttgctcaacattttgaaggtttatccacattcttgtgtgtagttttctgaacatgttcttatgcccaatgagccaacaatggagatgtaaaagggcaggagagacaaggtaatgtggtgataaggaaggatcgaatgagaagtacatagagggattcatcttcacagggggaaaaacatccattcctccaagacaagattgaatgaacggaaatgaagatccagagagatttttgaaatgatgtctggaggagttgaggaaacacgttttagacaatcttgacctcaataaggttggagtctaggtctgctgttgagcaagagggagaccaaggaggaattagaaactggaggagatgggggaaagtttagaatcattactgtacagacttcaggtagaacttagctacaaatgaataaaagagttttaagtatcagtgagggtccagttgggaacagatttgaagcctaaattgatagtagttcagcttttttatttttattttttgagatgaggtctcactacattgtttatgttggaatacagtggctattcacaggcacaatcatactgcactacagccttgagctcctgggcccaagtgatcctcctgcctcagcctcctgagtagctaagactacaagcacacaccactgtgcccagctagttcagctttttttcctccatatttctgcaccattccttcctaattcgggattaaaaacaaacaggctgagtatggtggctcacacctgtaatcccagaactttgggaggccaaggtgggaggatcacttgaggccaggagttcaagaccagcctgggcaacatagcaagacctcatctctataaattaaaaaaaaaattatgcatttgtggtggcacacgcctgtggtcccagctacttgggaggctgaggcaggaagatcgcttgagactgggaggtcaaagctgcagtgagccgtgatcacaccactgcactccagcctgggcacctgggcaacagagcgaaaaccctatctcaaaaacaaacgaaaagcagaccgaaagatttattcagatcttaaaattggccagaggaaaatgcaaaagatcagttcttccttcttaaccttgtcaactatgaatcagctgcccaggtcaaaagtatggttatggattgatcaccaactgttgtcaaacctccagcccagaactcaaggcactcctcatcatgtttcagcgctatctgagccatttccctttagggaaaatttccctcttaggtacccaggctgccttcagcattcaccctccttgctcatttctgctccttcggtatattgttttctctttgtcaaagtgccttcctctatccccagcagcatgggcacagtgaacataatgaactattcattcaagaaacttgactgtgaaaggaaggagggagagaaggtacagtagttagagaggagcaggggatcatggcaaagttttttgattctgtttaagagttgtttactgagtccctgcttatgtctctttattatctttctggctacccacgtttgctcccagttagaatcctggactctaaccatgggatggaaggtggtgttggcacaggccactgctctttagcagcctaaaggattatattctcatcaggtagaaactttgtggtcactgaagtccttacatgccccatgaagacttgtgtgtggatttgctgcctgcactgagctaacacgttcctgtcctgaaggcttcttccacagtgagctcatcacagcaccctgtggaatggtgcttctcagatgaggctgcacataagaatcacttagtgagctttcaagaaaaatgttccttcatgatggttctttctaggagtggggtgcaggagtctgggcttttgtcaagctcctcaggagatttgtttttttggacagcaggtttgaaaacgctagtcaattgcatgtctttattgtctgtgcttttctgtcagtgaaggttggttgtctttttgaatcatgctagatctttttccatttttgttacctaagatcacacctcctctaagatgaacataagtcattatatagttgtctgttttgtatataaaatatgtgcttaataaaacaaacaatggaaacaaataatcgggatgcacatttaggtgatattttaactgattaacctcaaattttagcatcgtgttctccttccaaacagaatggtctcctttgtatggtttaactatcaactgaaattcaagtattcccctacctcccatatcttccttggatgatgctttagctacaggacagcctttgcctatagaacctgattcatgtttgaccttttaacacctctgtgggagagaagaatcattcatctaattgtggtttactaagtccttgacttccaccatgttgaaatattgggtatgtaccatctgttccagaatgggtgactcagtggtatgaagagaccttgtaaggaaccaaataagtcttgatggtcagttagaaattatgagtctcttgaaaaaccaaagcctgaatcatccagagagaaacacttcttagaggagatagaagaaattccctagcaaaagttccaagggccactgagtgccattcacaattgttgaggacacccacctaccttgtccatggatgcccatcatgacaaccccattaacacctttgattccatggatccctgggtgaatccaacatcatagtccttgagttcttccaatttggttcaagaacaggagagctagagcaggaaatatcaacaaacaaccccctcttctgtctccaaccctgagatgcaaatgtcttttcctgtctccactcctactgtctggtgatctttgtgcagcaggtatgtgcctgaaggaggtctccaagccagtttctgtgtgctgtcatctgagatggggttccccttgccagttctcacaccccacaagacccaccatactgatctcctggctagcacacaccaaccccagggaagccttttcttcacacttggaacctagatcttgatttccttttgtgaggtcagaatttgtttaactggaatgtggcacagcattgaattcttctgccttgtctattccagcctcagaattctgtttttctcccactttgcagtggtctttgagttttaacactgtggaacagtatctttccccgatgatgccccagatggaaggtttgagttctgtccctgggtcctctccataccctacctgtttaatggcccgatgtcttgatgccttctcgcatcaaggctctgcgcctacagtccttcatccaaccaggaattccagaacccatcaggtaccctagatcttctgaaccagtgggatcagagtccccgttttgagtagtacagagaagaaagttccccctttgtgtttacctccctttttgtctgcctactccagttcccccttccccctgagtgctcaagctgcctaacatcttccactgccttcaaacaagggaagccagaaagttccaagcctcttcgtccacagtttacttttgtccagtacagccttggtgacctctgggagctctctccctgagaaggttgtctgagtgaattagatgaaatgtggtgggtgggttatttggtatgtcatctataaccatgagctaggacggcatgcgcttgcctgggcttaatgctgttactttccattagaaaaagatcaccttatcattcatcagacactctacagaatctcagaattatggttctgcacaatgtaagtgagggcatacatccacctacccaggaactgaagtggaatctcccccaccccacttgtggcatctccccacgattgctcttcagacaaatcctcatctgtttagttgtcattctgctggggacaatgcaatctaagttatttcatttagttattttcatccccttcccctctctcattgtatccttcaccacagacagctcttccagtttccaataattgtttatactccttatttctttttctttttttttgagatggagtctcgctctgtcacccaggctggagtgcagtggcgcgatctcggctcactgcaagctccacctcccgggttcatgctcttctcctgcctcaacctcctaagtagctgggactacaggcgcgtgccaccacgcctggctaattgttttgtattttttttttttttttttttttttttagtagagacagggtttcaccatgttagccaggatggtcttgatctcctgacctcatgatctgcctgcctcagcctcccgaatagctgagattacaggtgcccgccaccacgcccagccaacttttgtatttttaagagagatgtggtttcaccatgttggccaggctggtctcaaactcctgacctcaaatgatctgccctcctcagcctcccaaagtgctgggggttacggacataagcctccatgcccagcctgtttttgttttttctttttttaattgacaaataacaatagtctatatgttttgaaatatgtatgcatatattgtggaatgggaaaatcaagctaattagcatatgcattatgtcacatacttttttgtggtgagaacacttgaaatctactctcttaagcagttttcaagtgtataatacattgtgatgaacagtagtcaccatgttgtatagtaagtctcttgaacttaaaaaaggaaagaaattatgagtctcttcacatactggtattaagcaatatttgtttacagtgctggaaaggagcttccttacttattaggaacctcaggtggacctctcatggttgcagatggcttctcacttacaaaggagattgtgaccagctgttgagaactgtttggctttacttccttcagagaccagacttggttgtatgtcagagtagtcccccccttatcctcaggggatatgagcccagaccccccaatggatgcctgaaatcacagatagtaccaaaccctatatatgctatgtttttttcctatacatgcatacttgcgataaagtttaatttataaattaggcacaggaagagattaacaacaactataataaaacagaacagttataaaaatacagtgtaataaaagttatgtgaagatgatctctctttctcaaagtatgttatcgtatgtaatattttcagattgcagttgatatggatagctttaaacctcagaaagggaatcgcaaataaggagggattaccatatatcctcgctaagagtcctctgactctttttctctcctcagactcaccccacacagaccgcgtttctctccagtgtcgacctacacactcactgctcttaccagatgatgttgccagagtcagtagccattgtttgctcccccaagttccaggagtgagtatagagggcatggttctgggtgtttcaagggggtagtagggaagaaagcctcaggggaaaaggtctctattcttgtggacttgtcctttgtaaaatacatagattataatgtaagttggttattctaaagggcttccttttaagccccatatcatgatttatctatcatgcttgttcaaaaagatatccaagtaacaacttagttgcttttctaagaaaagtctacaagaaatttgaagtgtttgacttgaagcgataggaatgtcaagagttttatgttggattagaaagtttcaaaatcataaaatataaaaaaataaaaaataaaaaataaaaaaatataataaaaaaataaaaataaaaaataagaaagtttcaaaatcaaacacattatctcagaatgcacttctttttcataccaaatcctgtctctactcccactttgattatttactatgaattctccagcaaaactagtgtgatggcagtaatgagtcattctctaactgtgattcattcaccagagaagagacctgtgaggcagcatcctacagaagctgtctcacaatgacctctgccctgctgtgtgagtgtgcatgctggtgtgtgtgtgcgtgcatatgtttgggatggagggacacctttgcttgactcttagcctgccttttttaaatttcagaactggattctttaaactaactgaccatggactagaggagatttcttcctgtcgccagaaaggatttcatccacacagcaaggatccacctctgttctgtgtacgtatctatgtaaaagaaaatggggctatgcttcaagcagggaggacagtcagagctgatgaaatgcatcatcctttctgatccacacagaagaccagctttgtcacttaccttgccagatctccataataaggacgtacatgagaagcagtgtgggacaggaatagatttgaatcttagctttgccactgtgtgcctttgattgggctacttaccgttcctgggcctcagttttcccatctataaaataggcataataataacacctactttatagggttcttgagatgattaaatgaagtaatgtgcaggaagtacgtaatgcagttgctggcttattaaatgttactttttcctttcatcaatgtctctttctaagcctgtacttcaataagagatttgaaggcaaaggaaaagagaagccacttcagataggtaaattaagtatatttgtagaattttgcttaaatcataggggctttacgaccttcctacaaagttcttttttccctatgttgtggtctgtgaataaaaagtttagttgatgataagatcagtatgtttccatttgcccctgcaagctgatttgatggtgttgcattactccatgctggccatggagtattatttcttttgggttcagagaaaagtgagcaatatggaaaagggactaagaaccttgacacttaaaaggacctggagatgcttagaagagaaaccccaggaaggatctgagagctgatttcaagtgttagaagagttgaagtataaaaaaagggattgggtatatttcacgtcactcctagcactaaaacaaagacttcatggaatgatggttttctgctgagcgtgaggaagaactttctgacaaatctgttcaaaaatagatcagtctgccttggaatgtctaagtactaggatgttgaaacaaagactacacaatcagaaaaaaaggtctggggcaccagtgcccatgttttcagttataaaggcccctgttgcatgccaaaagggagcattcttctctcaccatgtgacagtaggtatactttattatttgggtgacatcatagctaaaaaaactgtgatgaattcagtaattcttttaaattaatatatattttagggatgacactatttgttcccaagtttaggaatcaaagaatgagtctagaatgtatatacattttaaaaataaacaaaggtaaatgggcaaacactgattccatctacaggtgggactggtggtagtaatgagtcccagactcttaccacaactaccacttaaatagcagtctggcttccagactgagaaccactagcctagaatgaacattttaaataagggtttttttgtttttgtttttgtttttgtttttgtttgaaacagagtctcgctctgttgccgggctggagtgcagtggtatgatctcagctcactgcagcctctgccccccaggttcaaacaattctgctgcctcagcctctcgagtagctgggactacaggtgcgcgccgccacaccgggttaaattttttttttttttttttttttagtagggtcagggtttcaccatgttggccaggatggtcttgatctcctaacctcatgatctgcccaccttggcctcccaaagtgctgggattacaagcgtgagccaccgcacccagccaaaaagtggttttttaaaatgacttttcaggccgggcacggtggctcacgcctataatcccaatactttgggagactgaggcaggcagattacttgaggtcaggagttcaagtccaggctgaccaacatggcgaaaccccacctctactaaaaacacaaaattagccaggcatggtggctcgtgcctgtaatcccagctactgggaaagctaaggcagaagaatcgcttgaacccaggaggcgggggttgcagtgagccgagatcgtgccactgcactccagcctgggcaacagagcaagaccctatatgaagaaaaaaaaaaaaaagacttttcagaattttctaggactccacctttcttttttcctattgcagagctgcagccacgtgactgttgtggacagagcagtgaccatcacagaccttcgatgagcgtttgagtccaacaccttccaagaacaacaaaaccatatcagtgtactgtagccccttaatttaagctttctagaaagctttggaagtttttgtagatagtagaaaggggggcatcacctgagaaagagctgattttgtatttcaggtttgaaaagaaataactgaacatattttttaggcaagtcagaaagagaacatggtcacccaaaagcaactgtaactcagaaattaagttactcagaaattaagtagctcagaaattaagaaagaatggtataatgaacccccatatacccttccttctggattcaccaattgttaacatttttttcctctcagctatccttctaatttctctctaatttcaatttgtttatatttacctctgggctcaataagggcatctgtgcagaaatttggaagccatttagaaaatcttttggattttcctgtggtttatggcaatatgaatggagcttattactggggtgagggacagcttactccatttgaccagattgtttggctaacacatcccgaagaatgattttgtcaggaattattgttatttaataaatatttcaggatatttttcctctacaataaagtaacaattaacttatgtttttgtgcttcagagtgatccatttgatcaagcattgtataaacaggttaaaaaaaaggtatggttgttttggaaaggtgaaggaaaaatggaatttgagatatactgacactgatggtgtgtcccagttcacttttaattactccttgttttttatctgcctgttgccatcttccagaggtgttgtgaagtcatctctgttcttttggtgctgtctcaaatgggtcaaccattcacttcctccttatgccctccatgcttttggctgaggataatgaagcctttgtttggagtaccaggttacactccaataaatgattacatttcccagccaccccaccctaccaatttcattgtgttggctgttcttttctgactaaggcaatacctaggaaaacgcttgaagcagcaattgttactgcaattttctgtgagctgagcctggtgttctaggtggcctagaaataatggtgtcatttgtgacacctcgagtgagggcaggagagtaaatactttggctaggagaagagtgatttattctttatcagaattctaggtgggggagggagaatctgtgaatgcataaagttttcttcatttttaaattttgtctcagtctttattgcttaggttagtggtccttgaacttgtcccctgaaagagcccagttctctatattctttttcttctcttgggttcttaattccccatatagtggaaattccttctttgctgttttggtatgggtgggtctgggggccagctgggcttggacaagccatttcctgctgcagcccagagcagcctggctgttccaccttgctctaaacagtcctgaaattgcccagtcctctgcttttgggaaatccatccccttcttcccattctttgtctaccacttagcttagggctttcttaccttttatttcgactgtagccgttggcttttaccaagtctctttgtttttagcatttcttcattccagtctgttctgcacactttgatcaggagaagcttctcacattccagccatgttcatgttttctctcttgctcaaaaacctgcaatagcttcccattgctgaaaatctaaatttagcttttagtcagaactttccacttaaagttcttacccctggctatatattcaaatatctagggagcaatttaaaaaatactgatgcctgtgttctaccccccaccaattaaagctgaatctctagggtggagcctcagatgttgtttctgcatttgtctttcaagctgctagaattctcaagtacaaccagggttgacaaccactgcattggtctttgatacctaagaattgtgagctctcttatccgtctctgcccaccaaagacattcagccaggtcaacaacatatcatacgttgcaaccacattgatcacagactgatcaccaaactgctatattttcttttctcttcctctaggcacaagatatcttagtggctagatgggtgcaggaaatcagtctgtagatccctcttcatatctgctgcagcctagccactgcagaggcactctgcataggatggtctaagtgtctctgtcttcatcttacctctgtggaggagacgtggaatcaagccagcccacaagccctgagactggataggccggagagaaagaggagtagccagagcggtcgggaaaagaggaaaggaatactgtgggtaaaagggacaaagaccacgcaacctgaggaaagacattgtattgaaagggtaatgactatttggctaaagggactgactcctgggttcccgaggctcaaagaccaggagacttttccactcttgcaagctgcacaagtaccatacttagtgttctgggctgagaggggagacaaaagcatcgtcaggttgccaaacaatgtcccagttgccctgggaggcacaaacctaccaaagtgccataggccaggtgcagagagaatcagaggagctgatttgcttggggtcagagcagagctgggttttttcagatgatcactttcacatactccttgttaaatgggaccaaaggggaagaagaagaaacccttaagcttttgtaatattgtcttgggtaccagataccataaaaggcagcatgagagaaacattcccttgggccagtgtcatggtggattttcttgcttgagaggcaaggatttcagctttcatttggtaccacagaatttaaaattgtaagtgcctatcccttttgactgttgatggcttctttggggttttagttaccccagttgaaagagaaatttttcatattggggttgagaagaatggaggctattaggagcaaagctttaatgagtgaaagtctggtgaatcctgcaattttgatatgtttccagtggattttgagaacacagttttaggaccagagtagatgttgttccctagaaaatagagtcagctattgatattgtgcctcccatccctcatatctcagtgttttaaccccacctgagtttggagaccagtttgtccaaggatctttcaaacatgtgagcccagagtagaacttctgagtcaaggatcatgtctttttctgaggagctttgcttggggcactggaaatcctgtttagatcaggactattggaatattatcctctccaggggaagtgccaggttgaacatttaaggctttgcttctaggcccagctatacattcaccagcaaatcacttaacttcctaaatttctttaaaatctgtaaaatgggatcagtctaatatgcctacctcaaatgatgacagaatgacatctatatgcatatgaggcctacgttagttgaaagatgctataaagatataagggatttgttacttgtctttcttgaaatgttacagttggggtgcggttgcttctatcttctggacctctgcccattcagcatacagctagaggaatctttgggcagatccacattctttagcactagctaggctttgactccaaagctatctggtctaccttgatgttctgagcaggaaaactgaggacctcaagaaccattccaaatttctactcattctccctaagacccagagcagacccaggacctaaagaaattacatcatctctattttcccttggctccagcccactcttgtttgaacctcccacttttgttgttccaactacttcttgagatgaaggaagggcagaacattggccctcttcactgaagtcttcaccccttaatccagggttcaatttttagttcaccttagcctgtttgagattagaagctgggccttaacttacaggtgtgtccggcatcattcaatcagcctgttagatccagaatccagcactgtgacgctacataaccatgggctctgtccttccagttcctttagtgccttccctcactggtaggttcactctgagggcttccttccttgaactccagtggcaactatagtctgtttcccacaatttgttgtgtgtgttttttgttgttttgcagcgttttcatattgtcttttatgtaagtcatgtttctgaactatcgtataaatttcattagggtaagaatcatgtttgctttatgcactgtgtaacatgccttgcagtcagtataggcacttaaccttattgatcagttgttccttggtgttgaataatgtgttaggtagccaggtggacctgtgtcctagcctggagaagctctatgtcaccttgtaggaagccatctgaatttgactcagcatcatatgctgggcctgtgctgcacttgagctttctttccagccgccaggagggatggttgtcctggccaacagcgaatttaatgggtggtcaaaagaagatgtgcctgcatagaaggctgaaagagggagctggaagtaggaggagacaaggagatagtgacaccagtatcttgtcacagaaatcaaggaaggcaacagtttaaaggaggggagggagatcagtggtgccaactggctcagaagaggtttgctgggttaaatctcaagatgagcccatgagatctggtggttagcagaggcctttcctgacaaccccattttaagcacctcttccccatcactctatctcatcactgttactgtctgtgtagccctgtcatgagctaaaatcatcctgtttgtttattgctagcttatgtgtctaaagtatactccttgagaacagcaactttgtctttttcacctttgtactgagtcccctgacatggaataagatatgaataaatgcacagacttgtccaaaatcatccaattaa
